United States Patent Application Publication US 2004/0029133 A1 - sequence listing, part 3

SEQ ID NO: 366 - DNA, 16570 bp, Homo sapiens mitochondrial
  3108: "n" refers to a nucleotide at position 3107 of the Cambridge Reference Sequence (CRS, Anderson et al. 1981 Nature 290:457-465), later determined to be absent from the human mtDNA sequence according to the revised CRS (rCRS, Andrews et al. 1999 Nature Genetics 23:147); "n" therefore represents a single nucleotide deletion at a position corresponding to nucleotide 3107 of SEQ ID NO:1 as provided herein.
gatcacaggtctatcaccctattaaccactcacgggagctctccatgcatttggtattttcgtctggggggtgtgcacgcgatagcattgcgagacgctggagccggagcaccctatgtcgcagtatctgtctttgattcctgccccatcccattatttatcgcacctacgttcaatattacaggcgaacatacttactaaagtgtgttaattaattaatgcttgtaggacataataataacaattgaatgtctgcacagccgctttccacacagacatcataacaaaaaatttccaccaaaccccccctcccccgccttctggccacagcacttaaacacatctctgccaaaccccaaaaacaaagaaccctaacaccagcctaaccagatttcaaattttatcttttggcggtatgcacttttaacagtcaccccccaactaacacattattttcccctcccactcccatactactaatctcatcaatacaacccccgcccatcctaccccgcacacacacaccgctgctaaccccataccccgaaccaaccaaaccccaaagacaccccccacagtttatgtagcttacctcctcaaagcaatacactgaaaatgtttagacgggctcacatcaccccataaacaaataggtttggtcctagcctttctattagctcttagtaagattacacatgcaagcatccccattccagtgagttcaccctctaaatcaccacgatcaaaagggacaagcatcaagcacgcagcaatgcagctcaaaacgcttagcctagccacacccccacgggaaacagcagtgattaacctttagcaataaacgaaagtttaactaagctatactaaccccagggttggtcaatttcgtgccagccaccgcggtcacacgattaacccaagtcaatagaagccggcgtaaagagtgttttagatcaccccctccccaataaagctaaaactcacctgagttgtaaaaaactccagttgacacaaaatagactacgaaagtggctttaacatatctgaacacacaatagctaagacccaaactgggattagataccccactatgcttagccctaaacctcaacagttaaatcaacaaaactgctcgccagaacactacgagccacagcttaaaactcaaaggacctggcggtgcttcatatccctctagaggagcctgttctgtaatcgataaaccccgatcaacctcaccacctcttgctcagcctatataccgccatcttcagcaaaccctgatgaaggctacaaagtaagcgcaagtacccacgtaaagacgttaggtcaaggtgtagcccatgaggtggcaagaaatgggctacattttctaccccagaaaactacgatagcccttatgaaacttaagggtcgaaggtggatttagcagtaaactgagagtagagtgcttagttgaacagggccctgaagcgcgtacacaccgcccgtcaccctcctcaagtatacttcaaaggacatttaactaaaacccctacgcatttatatagaggagacaagtcgtaacatggtaagtgtactggaaagtgcacttggacgaaccagagtgtagcttaacacaaagcacccaacttacacttaggagatttcaacttaacttgaccgctctgagctaaacctagccccaaacccactccaccttactaccagacaaccttagccaaaccatttacccaaataaagtataggcgatagaaattgaaacctggcgcaatagatatagtaccgcaagggaaagatgaaaaattatagccaagcataatatagcaaggactaacccctataccttctgcataatgaattaactagaaataactttgcaaggagagccaaagctaagacccccgaaaccagacgagctacctaagaacagctaaaagagcacacccgtctatgtagcaaaatagtgggaagatttataggtagaggcgacaaacctaccgagcctggtgatagctggttgtccaagatagaatcttagttcaactttaaatttgcccacagaaccctctaaatccccttgtaaatttaactgttagtccaaagaggaacagctctttggacactaggaaaaaaccttgtagagagagtaaaaaatttaacacccatagtaggcctaaaagcagccaccaattaagaaagcgttcaagctcaacacccactacctaaaaaatcccaaacatataactgaactcctcacacccaattggaccaatctatcaccctatagaagaactaatgttagtataagtaacatgaaaacattctcctccgcataagcctgcgtcagattaaaacactgaactgacaattaacagcccaatatctacaatcaaccaacaagtcattattaccctcactgtcaacccaacacaggcatgctcataaggaaaggttaaaaaaagtaaaaggaactcggcaaatcttaccccgcctgtttaccaaaaacatcacctctagcatcaccagtattagaggcaccgcctgcccagtgacacatgtttaacggccgcggtaccctaaccgtgcaaaggtagcataatcacttgttccttaaatagggacctgtatgaatggctccacgagggttcagctgtctcttacttttaaccagtgaaattgacctgcccgtgaagaggcgggcatgacacagcaagacgagaagaccctatggagctttaatttattaatgcaaacagtacctaacaaacccacaggtcctaaactaccaaacctgcattaaaaatttcggttggggcgacctcggagcagaacccaacctccgagcagtacatgctaagacttcaccagtcaaagcgaactactatactcaattgatccaataacttgaccaacggaacaagttaccctagggataacagcgcaatcctattctagagtccatatcaacaatagggtttacgacctcgatgttggatcaggacatcccgatggtgcagccgctattaaaggttcgtttgttcaacgattaaagtcctacgtgatctgagttcagaccggagtaatccaggtcggtttctatctacnttcaaattcctccctgtacgaaaggacaagagaaataaggcctacttcacaaagcgccttcccccgtaaatgatatcatctcaacttagtattatacccacacccacccaagaacagggtttgttaagatggcagagcccggtaatcgcataaaacttaaaactttacagtcagaggttcaattcctcttcttaacaacatacccatggccaacctcctactcctcattgtacccattctaatcgcaatggcattcctaatgcttaccgaacgaaaaattctaggctatatacaactacgcaaaggccccaacgttgtaggcccctacgggctactacaacccttcgctgacgccataaaactcttcaccaaggagcccctaaaacccgccacatctaccatcaccctctacatcaccgccccgaccttagctctcaccatcgctcttctactatgaacccccctccccatacccaaccccctggtcaacctcaacctaggcctcctatttattctagccacctctagcctagccgtttactcaatcctctgatcagggtgagcatcaaactcaaactacgccctgatcggcgcactgcgagcagtagcccaaacaatctcatatgaagtcaccctagccatcattctactatcaacattactaataagtggctcctttaacctctccacccttatcacaacacaagaacacctctgattactcctgccatcatgacccttggccataatatgatttatctccacactagcagagaccaaccgaacccccttcgaccttgccgaaggggagtccgaactagtctcaggcttcaacatcgaatacgccgcaggccccttcgccctattcttcatagccgaatacacaaacattattataataaacaccctcaccactacaatcttcctaggaacaacatatgacgcactctcccctgaactctacacaacatattttgtcaccaagaccctacttctaacctccctgttcttatgaattcgaacagcatacccccgattccgctacgaccaactcatacacctcctatgaaaaaacttcctaccactcaccctagcattacttatatgatatgtctccatacccattacaatctccagcattccccctcaaacctaagaaatatgtctgataaaagagttactttgatagagtaaataataggagcttaaacccccttatttctaggactatgagaatcgaacccatccctgagaatccaaaattctccgtgccacctatcacaccccatcctaaagtaaggtcagctaaataagctatcgggcccataccccgaaaatgttggttatacccttcccgtactaattaatcccctggcccaacccgtcatctactctaccatctttgcaggcacactcatcacagcgctaagctcgcactgattttttacctgagcaggcctagaaataaacatgctagcttttattccagttctaaccaaaaaaataaaccctcgttccacagaagctgccatcaagtatttcctcacgcaagcaaccgcatccataatccttctaatagctatcctcttcaacaatatactctccggacaatgaaccataaccaatactaccaatcaatactcatcattaataatcataatggctatagcaataaaactaggaatagccccctttcacttctgagtcccagaggttacccaaggcacccctctgacatccggcctgcttcttctcacatgacaaaaactagcccccatctcaatcatataccaaatctctccctcactaaacgtaagccttctcctcactctctcaatcttatccatcatagcaggcagttgaggtggattaaaccaaacccagctacgcaaaatcttagcatactcctcaattacccacataggatgaataatagcagttctaccgtacaaccctaacataaccattcttaatttaactatttatattatcctaactactaccgcattcctactactcaacttaaactccagcaccacgaccctactactatctcgcacctgaaacaagctaacatgactaacacccttaattccatccaccctcctctccctaggaggcctgcccccgctaaccggctttttgcccaaatgggccattatcgaagaattcacaaaaaacaatagcctcatcatccccaccatcatagccaccatcaccctccttaacctctacttctacctacgcctaatctactccacctcaatcacactactccccatatctaacaacgtaaaaataaaatgacagtttgaacatacaaaacccaccccattcctccccacactcatcgcccttaccacgctactcctacctatctccccttttatactaataatcttatagaaatttaggttaaatacagaccaagagccttcaaagccctcagtaagttgcaatacttaatttctgtaacagctaaggactgcaaaaccccactctgcatcaactgaacgcaaatcagccactttaattaagctaagcccttactagaccaatgggacttaaacccacaaacacttagttaacagctaagcaccctaatcaactggcttcaatctacttctcccgccgccgggaaaaaaggcgggagaagccccggcaggtttgaagctgcttcttcgaatttgcaattcaatatgaaaatcacctcggagctggtaaaaagaggcctaacccctgtctttagatttacagtccaatgcttcactcagccattttacctcacccccactgatgttcgccgaccgttgactattctctacaaaccacaaagacattggaacactatacctattattcggcgcatgagctggagtcctaggcacagctctaagcctccttattcgagccgagctgggccagccaggcaaccttctaggtaacgaccacatctacaacgttatcgtcacagcccatgcatttgtaataatcttcttcatagtaatacccatcataatcggaggctttggcaactgactagttcccctaataatcggtgcccccgatatggcgtttccccgcataaacaacataagcttctgactcttacctccctctctcctactcctgctcgcatctgctatagtggaggccggagcaggaacaggttgaacagtctaccctcccttagcagggaactactcccaccctggagcctccgtagacctaaccatcttctccttacacctagcaggtgtctcctctatcttaggggccatcaatttcatcacaacaattatcaatataaaaccccctgccataacccaataccaaacgcccctcttcgtctgatccgtcctaatcacagcagtcctacttctcctatctctcccagtcctagctgctggcatcactatactactaacagaccgcaacctcaacaccaccttcttcgaccccgccggaggaggagaccccattctataccaacacctattctgatttttcggtcaccctgaagtttatattcttatcctaccaggcttcggaataatctcccatattgtaacttactactccggaaaaaaagaaccatttggatacataggtatggtctgagctatgatatcaattggcttcctagggtttatcgtgtgagcacaccatatatttacagtaggaatagacgtagacacacgagcatatttcacctccgctaccataatcatcgctatccccaccggcgtcaaagtatttagctgactcgccacactccacggaagcaatatgaaatgatctgctgcagtgctctgagccctaggattcatctttcttttcaccgtaggtggcctgactggcattgtattagcaaactcatcactagacatcgtactacacgacacgtactacgttgtagctcacttccactatgtcctatcaataggagctgtatttgccatcataggaggcttcattcactgatttcccctattctcaggctacaccctagaccaaacctacgccaaaatccatttcactatcatattcatcggcgtaaatctaactttcttcccacaacactttctcggcctatccggaatgccccgacgttactcggactaccccgatgcatacaccacatgaaacatcctatcatctgtaggctcattcatttctctaacagcagtaatattaataattttcatgatttgagaagccttcgcttcgaagcgaaaagtcctaatagtagaagaaccctccataaacctggagtgactatatggatgccccccaccctaccacacattcgaagaacccgtatacataaaatctagacaaaaaaggaaggaatcgaaccccccaaagctggtttcaagccaaccccatggcctccatgactttttcaaaaaggtattagaaaaaccatttcataactttgtcaaagttaaattataggctaaatcctatatatcttaatggcacatgcagcgcaagtaggtctacaagacgctacttcccctatcatagaagagcttatcacctttcatgatcacgccctcataatcattttccttatctgcttcctagtcctgtatgcccttttcctaacactcacaacaaaactaactaatactaacatctcagacgctcaggaaatagaaaccgtctgaactatcctgcccgccatcatcctagtcctcatcgccctcccatccctacgcatcctttacataacagacgaggtcaacgatccctcccttaccatcaaatcaattggccaccaatggtactgaacctacgagtacaccgactacggcggactaatcttcaactcctacatacttcccccattattcctagaaccaggcgacctgcgactccttgacgttgacaatcgagtagtactcccgattgaagcccccattcgtataataattacatcacaagacgtcttgcactcatgagctgtccccacattaggcttaaaaacagatgcaattcccggacgtctaaaccaaaccactttcaccgctacacgaccgggggtatactacggtcaatgctctgaaatctgtggagcaaaccacagtttcatgcccatcgtcctagaattaattcccctaaaaatctttgaaatagggcccgtatttaccctatagcaccccctctaccccctctagagcccactgtaaagctaacttagcattaaccttttaagttaaagattaagagaaccaacacctctttacagtgaaatgccccaactaaatactaccgtatggcccaccataattacccccatactccttacactattcctcatcacccaactaaaaatattaaacacaaactaccacctacctccctcaccaaagcccataaaaataaaaaattataacaaaccctgagaaccaaaatgaacgaaaatctgttcgcttcattcattgcccccacaatcctaggcctacccgccgcagtactgatcattctatttccccctctattgatccccacctccaaatatctcatcaacaaccgactaatcaccacccaacaatgactaatcaaactaacctcaaaacaaataataaccatacacaacactaaaggacgaacctgatctcttatactagtatccttaatcatttttattgccacaactaacctcctcggactcctgcctcactcatttacaccaaccacccaactatctataaacctagccatggccatccccttatgagcgggcgcagtgattataggctttcgctctaagattaaaaatgccctagcccacttcttaccacaaggcacacctacaccccttatccccatactagttattatcgaaaccatcagcctactcattcaaccaatagccctggccgtacgcctaaccgctaacattactgcaggccacctactcatgcacctaattggaagcaccaccctagcaatatcaaccattaaccttccctctacacttatcatcttcacaattctaattctactgactatcctagaaatcgctgtcgccttaatccaagcctacgttttcacacttctagtaagcctctacctgcacgacaacacataatgacccaccaatcacatgcctatcatatagtaaaacccagcccatggcccctaacaggggccctctcagccctcctaatgacctccggcctagccatgtgatttcacttccactccataacgctcctcatactaggcctactaaccaacacactaaccatataccaatgatggcgcgatgtaacacgagaaagcacataccaaggccaccacacaccacctgtccaaaaaggccttcgatacgggataatcctatttattacctcagaagtttttttcttcgcaggatttttctgagccttttaccactccagcctagcccctaccccccaattaggagggcactggcccccaacaggcatcaccccgctaaatcccctagaagtcccactcctaaacacatccgtattactcgcatcaggagtatcaatcacctgagctcaccatagtctaatagaaaacaaccgaaaccaaataattcaagcactgctcattacaattttactgggcctctattttaccctcctacaagcctcagagtacttcgagtctcccttcaccatttccgacggcatctacggctcaacattttttgtagccacaggcttccacggacttcacgtcattattggctcaactttcctcactatctgcttcatccgccaactaatatttcactttacatccaaacatcactttggcttcgaagccgccgcctgatactggcattttgtagatgtggtttgactatttctgtatgtctccatctattgatgagggtcttactcttttagtataaatagtaccgttaacttccaattaactagttttgacaacattcaaaaaagagtaataaacttcgccttaattttaataatcaacaccctcctagccttactactaataattattacattttgactaccacaactcaacggctacatagaaaaatccaccccttacgagtgcggcttcgaccctatatcccccgcccgcgtccctttctccataaaattcttcttagtagctattaccttcttattatttgatctagaaattgccctccttttacccctaccatgagccctacaaacaactaacctgccactaatagttatgtcatccctcttattaatcatcatcctagccctaagtctggcctatgagtgactacaaaaaggattagactgaaccgaattggtatatagtttaaacaaaacgaatgatttcgactcattaaattatgataatcatatttaccaaatgcccctcatttacataaatattatactagcatttaccatctcacttctaggaatactagtatatcgctcacacctcatgtcctccctactatgcctagaaggaataatactatcgctgttcattatagctactctcataaccctcaacacccactccctcttagccaatattgtgcctattgccatactagtctttgccgcctgcgaagcagcggtgggcctagccctactagtctcaatctccaacacatatggcctagactacgtacataacctaaacctactccaatgctaaaactaatcgtcccaacaattatattactaccactgacatgactttccaaaaaacacataatttgaatcaacacaaccacccacagcctaattattagcatcatccctctactattttttaaccaaatcaacaacaacctatttagctgttccccaaccttttcctccgaccccctaacaacccccctcctaatactaactacctgactcctacccctcacaatcatggcaagccaacgccacttatccagtgaaccactatcacgaaaaaaactctacctctctatactaatctccctacaaatctccttaattataacattcacagccacagaactaatcatattttatatcttcttcgaaaccacacttatccccaccttggctatcatcacccgatgaggcaaccagccagaacgcctgaacgcaggcacatacttcctattctacaccctagtaggctcccttcccctactcatcgcactaatttacactcacaacaccctaggctcactaaacattctactactcaccctcactgcccaagaactatcaaactcctgagccaacaacttaatatgattagcttacacaatagcttttatagtaaagatacctctttacggactccacttatgactccctaaagcccatgtcgaagcccccatcgctgggtcaatagtacttgccgcagtactcttgaaactaggcggctatggtataatacgcctcacactcattctcaaccccctgacaaaacacatagcctaccccttccttgtactatccctatgaggcataattataacaagctccatctgcctacgacaaacagacctaaaatcgctcattgcatactcttcaatcagccacatagccctcgtagtaacagccattctcatccaaaccccctgaagcttcaccggcgcagtcattctcataatcgcccacggacttacatcctcattactattctgcctagcaaactcaaactacgaacgcactcacagtcgcatcataatcctctctcaaggacttcaaactctactcccactaatagctttttgatgacttctagcaagcctcgctaacctcgccttaccccccactattaacctactgggagaactctctgtgctagtaaccacattctcctgatcaaatatcactctcctacttacaggactcaacatactagtcacagccctatactccctctacatatttaccacaacacaatggggctcactcacccaccacattaacaacataaaaccctcattcacacgagaaaacaccctcatgttcatacacctatcccccattctcctcctatccctcaaccccgacatcattaccgggttttcctcttgtaaatatagtttaaccaaaacatcagattgtgaatctgacaacagaggcttacgaccccttatttaccgagaaagctcacaagaactgctaactcatgcccccatgtctaacaacatggctttctcaacttttaaaggataacagctatccattggtcttaggccccaagaattttggtgcaactccaaataaaagtaataaccatgcacactactataaccaccctaaccctaacttccctaattccccccatccttaccaccctcgttaaccctaacaaaaaaaactcatacccccattatgtaaaatccattgtcgcatccacctttattatcagtctcttccccacaacaatattcatgtgcctagaccaagaagttattatctcgaactgacactgagccacaacccaaacaacccagctctccctaagcttcaaactagactacttctccataatattcatccctgtagcattgttcgttacatggtccatcatagaattctcactgtgatatataaactcagacccaaacattaatcagttcttcaaatatctactcatcttcctaattaccatactaatcttagttaccgctaacaacctattccaactgttcatcggctgagagggcgtaggaattatatccttcttgctcatcagttgatgatacgcccgagcagatgccaacacagcagccattcaagcaatcctatacaaccgtatcggcgatatcggtttcatcctcgccttagcatgatttatcctacactccaactcatgagacccacaacaaatagcccttctaaacgctaatccaagcctcaccccactactaggcctcctcctagcagcagcaggcaaatcagcccaattaggtctccacccctgactcccctcagccatagaaggccccaccccagtctcagccctactccactcaagcactatagttgtagcaggaatcttcttactcatccgcttccaccccctagcagaaaatagcccactaatccaaactctaacactatgcttaggcgctatcaccactctgttcgcagcagtctgcgcccttacacaaaatgacatcaaaaaaatcgtagccttctccacttcaagtcaactaggactcataatagttacaatcggcatcaaccaaccacacctagcattcctgcacatctgtacccacgccttcttcaaagccatactatttatgtgctccgggtccatcatccacaaccttaacaatgaacaagatattcgaaaaataggaggactactcaaaaccatacctctcacttcaacctccctcaccattggcagcctagcattagcaggaatacctttcctcacaggtttctactccaaagaccacatcatcgaaaccgcaaacatatcatacacaaacgcctgagccctatctattactctcatcgctacctccctgacaagcgcctatagcactcgaataattcttctcaccctaacaggtcaacctcgcttccccacccttactaacattaacgaaaataaccccaccctactaaaccccattaaacgcctggcagccggaagcctattcgcaggatttctcattactaacaacatttcccccgcatcccccttccaaacaacaatccccctctacctaaaactcacagccctcgctgtcactttcctaggacttctaacagccctagacctcaactacctaaccaacaaacttaaaataaaatccccactatgcacattttatttctccaacatactcggattctaccctagcatcacacaccgcacaatcccctatctaggccttcttacgagccaaaacctgcccctactcctcctagacctaacctgactagaaaagctattacctaaaacaatttcacagcaccaaatctccacctccatcatcacctcaacccaaaaaggcataattaaactttacttcctctctttcttcttcccactcatcctaaccctactcctaatcacataacctattcccccgagcaatttcaattacaatatatacaccaacaaacaatgttcaaccagtaactactactaatcaacgcccataatcatacaaagcccccgcaccaataggatcctcccgaatcaaccctgacccctctccttcataaattattcagcttcctacactattaaagtttaccacaaccaccaccccatcatactctttcacccacagcaccaatcctacctccatcgctaaccccactaaaacactcaccaagacctcaacccctgacccccatgcctcaggatactcctcaatagccatcgctgtagtatatccaaagacaaccatcattccccctaaataaattaaaaaaactattaaacccatataacctcccccaaaattcagaataataacacacccgaccacaccgctaacaatcaatactaaacccccataaataggagaaggcttagaagaaaaccccacaaaccccattactaaacccacactcaacagaaacaaagcatacatcattattctcgcacggactacaaccacgaccaatgatatgaaaaaccatcgttgtatttcaactacaagaacaccaatgaccccaatacgcaaaattaaccccctaataaaattaattaaccactcactcatcgacctccccaccccatccaacatctccgcatgatgaaacttcggctcactccttggcgcctgcctgatcctccaaatcaccacaggactattcctagccatgcactactcaccagacgcctcaaccgccttttcatcaatcgcccacatcactcgagacgtaaattatggctgaatcatccgctaccttcacgccaatggcgcctcaatattctttatctgcctcttcctacacatcgggcgaggcctatattacggatcatttctctactcagaaacctgaaacatcggcattatcctcctgcttgcaactatagcaacagccttcataggctatgtcctcccgtgaggccaaatatcattctgaggggccacagtaattacaaacttactatccgccatcccatacattgggacagacctagttcaatgaatctgaggaggctactcagtagacagtcccaccctcacacgattctttacctttcacttcatcttgcccttcattattgcagccctagcagcactccacctcctattcttgcacgaaacgggatcaaacaaccccctaggaatcacctcccattccgataaaatcaccttccacccttactacacaatcaaagacgccctcggcttacttctcttccttctctccttaatgacattaacactattctcaccagacctcctaggcgacccagacaattataccctagccaaccccttaaacacccctccccacatcaagcccgaatgatatttcctattcgcctacacaattctccgatccgtccctaacaaactaggaggcgtccttgccctattactatccatcctcatcctagcaataatccccatcctccatatatccaaacaacaaagcataatatttcgcccactaagccaatcactttattgactcctagccgcagacctcctcattctaacctgaatcggaggacaaccagtaagctacccttttaccatcattggacaagtagcatccgtactatacttcacaacaatcctaatcctaataccaactatctccctaattgaaaacaaaatactcaaatgggcctgtccttgtagtataaactaatacaccagtcttgtaaaccggagatgaaaacctttttccaaggacaaatcagagaaaaagtctttaactccaccattagcacccaaagctaagattctaatttaaactattctctgttctttcatggggaagcagatttgggtaccacccaagtattgactcacccatcaacaaccgctatgtatttcgtacattactgccagccaccatgaatattgtacggtaccataaatacttgaccacctgtagtacataaaaacccaatccacatcaaaaccccctccccatgcttacaagcaagtacagcaatcaacccccaactatcacacatcaactgcaactccaaagccacccctcacccactaggataccaacaaacctacccacccttaacagtacatagcacataaagccatttaccgtacatagcacattacagtcaaatcccttctcgtccccatggatgacccccctcagataggggtcccttgaccaccatcctccgtgaaatcaatatcccgcacaagagtgctactctcctcgctccgggcccataacacttgggggtagctaaagtgaactgtatccgacatctggttcctacttcagggccataaagcctaaatagcccacacgttccccttaaataagacatcacgatg

SEQ ID NO: 367 - DNA, 16568 bp, Homo sapiens mitochondrial
  3106: "n" refers to a nucleotide at position 3107 of the Cambridge Reference Sequence (CRS, Anderson et al. 1981 Nature 290:457-465), later determined to be absent from the human mtDNA sequence according to the revised CRS (rCRS, Andrews et al. 1999 Nature Genetics 23:147); "n" therefore represents a single nucleotide deletion at a position corresponding to nucleotide 3107 of SEQ ID NO:1 as provided herein.
gatcacaggtctatcaccctattaaccactcacgggagctctccatgcatttggtattttcgtctggggggtgtgcacgcgatagcattgcgagacgctggagccggagcaccctatgtcgcagtatctgtctttgattcctgcctcatcctattatttatcgcacctacgttcaatattacagacggacatacttactaaagtgtgttaattaattaatgcttgtaagacataataataacaattgaatgtctgcacagccgctttccacacagacatcataacaaaaaattttcaccaaaccccccctcccccgccttctggccacagcacttaaacacatctctgccaaaccccaaaaacaaagaaccctaacaccagcctaaccagatttcaaattttatcttttggcggtatgcacttttaacagtcaccccccaactaacacattattttcccctctcactcccatactactaatctcatcaacacaacccccgcccatcctacccagcacacacaccgctgctaaccccataccccgaaccaaccaaaccccaaagacaccccccacagtttatgtagcttacctcctcaaagcaatacactgaaaatgtttagacgggctcacatcaccccataaacaaataggtttggtcctagcctttctattagctcttagtaagattacacatgcaagcatccccgttccagtgagttcaccctctaaatcaccacgatcaaaagggacaagcatcaagcacgcagcaatgcagctcaaaacgcttagcctagccacacccccacgggaaacagcagtgattaacctttagcaataaacgaaagtttaactaagctatactaaccccagggttggtcaatttcgtgccagccaccgcggtcacacgattaacccaagtcaatagaagccggcgtaaagagtgttttagatcaccccctccccaataaagctaaaactcacctgagttgtaaaaaactccagttgacacaaaatagactacgaaagtggctttaacatatctgaacacacaatagctaagacccaaactgggattagataccccactatgcttagccctaaacctcaacagttaaatcaacaaaactgctcgccagaacactacgagccacagcttaaaactcaaaggacctggcggtgcttcatatccctctagaggagcctgttctgtaatcgataaaccccgatcaacctcaccacctcttgctcagcctatataccgccatcttcagcaaaccctgatgaaggctacaaagtaagcgcaagtacccacgtaaagacgttaggtcaaggtgtagcccatgaggtggcaagaaatgggctacattttctaccccagaaaactacgatagcccttatgaaacttaagggtcgaaggtggatttagcagtaaactgagagtagagtgcttagttgaacagggccctgaagcgcgtacacaccgcccgtcaccctcctcaagtatacttcaaaggacatttaactaaaacccctacgcatttatatagaggagacaagtcgtaacatggtaagtgtactggaaagtgcacttggacgaaccagagtgtagcttaacacaaagcacccaacttacacttaggagatttcaacttaacttgaccgctctgagctaaacctagccccaaacccactccaccttactaccagacaaccttagccaaaccatttacccaaataaagtataggcgatagaaattgaaacctggcgcaatagatatagtaccgcaagggaaagatgaaaaattataaccaagcataatatagcaaggactaacccctataccttctgcataatgaattaactagaaataactttgcaaggagagccaaagctaagacccccgaaaccagacgagctacctaagaacagctaaaagagcacacccgtctatgtagcaaaatagtgggaagatttataggtagaggcgacaaacctaccgagcctggtgatagctggttgtccaagatagaatcttagttcaactttaaatttgcccacagaaccctctaaatccccttgtaaatttaactgttagtccaaagaggaacagctctttggacactaggaaaaaaccttgtagagagagtaaaaaatttaacacccatagtaggcctaaaagcagccaccaattaagaaagcgttcaagctcaacacccactacctaaaaaatcccaaacatataactgaactcctcacacccaattggaccaatctatcaccctatagaagaactaatgttagtataagtaacatgaaaacattctcctccgcataagcctgcgtcagattaaaacactgaactgacaattaacagcccaatatctacaatcaaccaacaagtcattattaccctcactgtcaacccaacacaggcatgctcataaggaaaggttaaaaaaagtaaaaggaactcggcaaatcttaccccgcctgtttaccaaaaacatcacctctagcatcaccagtattagaggcaccgcctgcccagtgacacatgtttaacggccgcggtaccctaaccgtgcaaaggtagcataatcacttgttccttaaatagggacctgtatgaatggctccacgagggttcagctgtctcttacttttaaccagtgaaattgacctgcccgtgaagaggcgggcatgacacagcaagacgagaagaccctatggagctttaatttattaatgcaaacagtacctaacaaacccacaggtcctaaactaccaaacctgcattaaaaatttcggttggggcgacctcggagcagaacccaacctccgagcagtacatgctaagacttcaccagtcaaagcgaactactatactcaattgatccaataacttgaccaacggaacaagttaccctagggataacagcgcaatcctattctagagtccatatcaacaatagggtttacgacctcgatgttggatcaggacatcccaatggtgcagccgctattaaaggttcgtttgttcaacgattaaagtcctacgtgatctgagttcagaccggagtaatccaggtcggtttctatctacnttcaaattcctccctgtacgaaaggacaagagaaataaggcctacttcacaaagcgccttcccccgtaaatgatatcatctcaacttagtattatacccacacccacccaagaacagggtttgttaagatggcagagcccggtaatcgcataaaacttaaaactttacagtcagaggttcaattcctcttcttaacaacatacccatggccaacctcctactcctcattgtacccattctaatcgcaatggcattcctaatgcttaccgaacgaaaaattctaggctatatacaactacgcaaaggccccaacgttgtaggcccctacgggctactacaacccttcgctgacgccataaaactcttcaccaaagagcccctaaaacccgccacatctaccatcaccctctacatcaccgccccgaccttagctctcaccatcgctcttctactatgaacccccctccccatacccaaccccctggtcaacctcaacctaggcctcctatttattctagccacctctagcctagccgtttactcaatcctctgatcagggtgagcatcaaactcaaactacgccctgatcggcgcactgcgagcagtagcccaaacaatctcatatgaagtcaccctagccatcattctactatcaacattactaataagtggctcctttaacctctccacccttatcacaacacaagaacacctctgattactcctgccatcatgacccttggccataatatgatttatctccacactagcagagaccaaccgaacccccttcgaccttgccgaaggggagtccgaactagtctcaggcttcaacatcgaatacgccgcaggccccttcgccctattcttcatagccgaatacacaaacattattataataaacaccctcaccactacaatcttcctaggaacaacatatgacgcactctcccctgaactctacacaacatattttgtcaccaagaccctacttctaacctccctgttcttatgaattcgaacagcatacccccgattccgctacgaccaactcatacacctcctatgaaaaaacttcctaccactcaccctagcattacttatatgacatgtctccatacccattacaatctccagcattccccctcaaacctaagaaatatgtctgataaaagagttactttgatagagtaaataataggagcttaaacccccttatttctaggactatgagaatcgaacccatccctgagaatccaaaattctccgtgccacctatcacaccccatcctaaagtaaggtcagctaaataagctatcgggcccataccccgaaaatgttggttatacccttcccgtactaattaatcccctggcccaacccgtcatctactctaccatctttgcaggcacactcatcacagcgctaagctcgcactgattttttacctgagtaggcctagaaataaacatgctagcttttattccagttctaaccaaaaaaataaaccctcgttccacagaagctgccatcaagtatttcctcacgcaagcaaccgcatccataatccttctaatagctatcctcttcaacaatatactctccggacaatgaaccataaccaatactaccaatcaatactcatcattaataatcataatggctatagcaataaaactaggaatagccccctttcacttctgagtcccagaggttacccaaggcacccctctgacatccggcctgcttcttctcacatgacaaaaactagcccccatctcaatcatataccaaatctctccctcactaaacgtaagccttctcctcactctctcaatcttatccatcatagcaggcagttgaggtggattaaaccaaacccagctacgcaaaatcttagcatactcctcaattacccacataggatgaataatagcagttctaccgtacaaccctaacataaccattcttaatttaactatttatattatcctaactactaccgcattcctactactcaacttaaactccagcaccacgaccctactactatctcgcacctgaaacaagctaacatgactaacacccttaattccatccaccctcctctccctaggaggcctgcccccgctaaccggctttttgcccaaatgggccattatcgaagaattcacaaaaaacaatagcctcatcatccccaccatcatagccaccatcaccctccttaacctctacttctacctacgcctaatctactccacctcaatcacactactccccatatctaacaacgtaaaaataaaatgacagtttgaacatacaaaacccaccccattcctccccacactcatcgcccttaccacgctactcctacctatctccccttttatactaataatcttatagaaatttaggttaaatacagaccaagagccttcaaagccctcagtaagttgcaatacttaatttctgtaacagctaaggactgcaaaaccccactctgcatcaactgaacgcaaatcagccactttaattaagctaagcccttactagaccaatgggacttaaacccacaaacacttagttaacagctaagcaccctaatcaactggcttcaatctacttctcccgccgccgggaaaaaaggcgggagaagccccggcaggtttgaagctgcttcttcgaatttgcaattcaatatgaaaatcacctcggagctggtaaaaagaggcctaacccctgtctttagatttacagtccaatgcttcactcagccattttacctcacccccactgatgttcgccgaccgttgactattctctacaaaccacaaagacattggaacactatacctattattcggcgcatgagctggagtcctaggcacagctctaagcctccttattcgagccgagctgggccagccaggcaaccttctaggtaacgaccacatctacaacgttatcgtcacagcccatgcatttgtaataatcttcttcatagtaatacccatcataatcggaggctttggcaactgactagttcccctaataatcggtgcccccgatatggcgtttccccgcataaacaacataagcttctgactcttacctccctctctcctactcctgctcgcatctgctatagtggaggccggagcaggaacaggttgaacagtctaccctcccttagcagggaactactcccaccctggagcctccgtagacctaaccatcttctccttacacctagcaggtgtctcctctatcttaggggccatcaatttcatcacaacaattatcaatataaaaccccctgccataacccaataccaaacgcccctcttcgtctgatccgtcctaatcacagcagtcctacttctcctatctctcccagtcctagctgctggcatcactatactactaacagaccgcaacctcaacaccaccttcttcgaccccgccggaggaggagaccccattctataccaacacctattctgatttttcggccaccctgaagtttatattcttatcctaccaggcttcggaataatctcccatattgtaacttactactccggaaaaaaagaaccatttggatacataggtatggtctgagctatgatatcaattggcttcctagggtttatcgtgtgagcacaccatatatttacagtaggaatagacgtagacacacgagcatatttcacctccgctaccataatcatcgctatccccaccggcgtcaaagtatttagctgactcgccacactccacggaagcaatatgaaatgatctgctgcagtgctctgagccctaggattcatctttcttttcaccgtaggtggcctgactggcattgtattagcaaactcatcactagacatcgtactacacgacacgtactacgttgtagctcacttccactatgtcctatcaataggagctgtatttgccatcataggaggcttcattcactgatttcccctattctcaggctacaccctagaccaaacctacgccaaaatccatttcactatcatattcatcggcgtaaatctaactttcttcccacaacactttctcggcctatccggaatgccccgacgttactcggactaccccgatgcatacaccacatgaaacatcctatcatctgtaggctcattcatttctctaacagcagtaatattaataattttcatgatttgagaagccttcgcttcgaagcgaaaagtcctaatagtagaagaaccctccataaacctggagtgactatatggatgccccccaccctaccacacattcgaagaacccgtatacataaaatctagacaaaaaaggaaggaatcgaaccccccaaagctggtttcaagccaaccccatggcctccatgactttttcaaaaaggtattagaaaaaccatttcataactttgtcaaagttaaattataggctaaatcctatatatcttaatggcacatgcagcgcaagtaggtctacaagacgctacttcccctatcatagaagagcttatcacctttcatgatcacgccctcataatcattttccttatctgcttcctagtcctgtatgcccttttcctaacactcacaacaaaactaactaatactaacatctcagacgctcaggaaatagaaaccgtctgaactatcctgcccgccatcatcctagtcctcatcgccctcccatccctacgcatcctttacataacagacgaggtcaacgatccctcccttaccatcaaatcaattggccaccaatggtactgaacctacgagtacaccgactacggcggactaatcttcaactcctacatacttcccccattattcctagaaccaggcgacctgcgactccttgacgttgacaatcgagtagtactcccgattgaagcccccattcgtataataattacatcacaagacgtcttgcactcatgagctgtccccacattaggcttaaaaacagatgcaattcccggacgtctaaaccaaaccactttcaccgctacacgaccgggggtatactacggtcaatgctctgaaatctgtggagcaaaccacagtttcatgcccatcgtcctagaattaattcccctaaaaatctttgaaatagggcccgtatttaccctatagcaccccctctaccccctctagagcccactgtaaagctaacttagcattaaccttttaagttaaagattaagagaaccaacacctctttacagtgaaatgccccaactaaatactaccgtatggcccaccataattacccccatactccttacactattcctcatcacccaactaaaaatattaaacacaaactaccacctacctccctcaccaaagcccataaaaataaaaaattataacaaaccctgagaaccaaaatgaacgaaaatctgttcgcttcattcattgcccccacaatcctaggcctacccgccgcagtactgatcattctatttccccctctattgatccccacctccaaatatctcatcaacaaccgactaatcaccacccaacaatgactaatcaaactaacctcaaaacaaatgataaccatacacaacactaaaggacgaacctgatctcttatactagtatccttaatcatttttattgccacaactaacctcctcggactcctgcctcactcatttacaccaaccacccaactatctataaacctagccatggccatccccttatgagcgggcgcagtgattataggctttcgctctaagattaaaaatgccctagcccacttcttaccacaaggcacacctacaccccttatccccatactagttattatcgaaaccatcagcctactcattcaaccaatagccctggccgtacgcctaaccgctaacattactgcaggccacctactcatgcacctaattggaagcgccaccctagcaatatcaaccattaaccttccctctacacttatcatcttcacaattctaattctactgactatcctagaaatcgctgtcgccttaatccaagcctacgttttcacacttctagtaagcctctacctgcacgacaacacataatgacccaccaatcacatgcctatcatatagtaaaacccagcccatgacccctaacaggggccctctcagccctcctaatgacctccggcctagccatgtgatttcacttccactccataacgctcctcatactaggcctactaaccaacacactaaccatataccaatgatggcgcgatgtaacacgagaaagcacataccaaggccaccacacaccacctgtccaaaaaggccttcgatacgggataatcctatttattacctcagaagtttttttcttcgcaggatttttctgagccttttaccactccagcctagcccctaccccccaattaggagggcactggcccccaacaggcatcaccccgctaaatcccctagaagtcccactcctaaacacatccgtattactcgcatcaggagtatcaatcacctgagctcaccatagtctaatagaaaacaaccgaaaccaaataattcaagcactgcttattacaattttactgggtctctattttaccctcctacaagcctcagagtacttcgagtctcccttcaccatttccgacggcatctacggctcaacattttttgtagccacaggcttccacggacttcacgtcattattggctcaactttcctcactatctgcttcatccgccaactaatatttcactttacatccaaacatcactttggcttcgaagccgccgcctgatactggcattttgtagatgtggtttgactatttctgtatgtctccatctattgatgagggtcttactcttttagtataaatagtaccgttaacttccaattaactagttttgacaacattcaaaaaagagtaataaacttcgccttaattttaataatcaacaccctcctagccttactactaataattattacattttgactaccacaactcaacggctacatagaaaaatccaccccttacgagtgcggcttcgaccctatatcccccgcccgcgtccctttctccataaaattcttcttagtagctattaccttcttattatttgatctagaaattgccctccttttacccctaccatgagccctacaaacaactaacctgccactaatagttatgtcatccctcttattaatcatcatcctagccctaagtctggcctatgagtgactacaaaaaggattagactgagccgaattggtatatagtttaaacaaaacgaatgatttcgactcattaaattatgataatcatatttaccaaatgcccctcatttacataaatattatactagcatttaccatctcacttctaggaatactagtatatcgctcacacctcatatcctccctactatgcctagaaggaataatactatcgctgttcattatagctactctcataaccctcaacacccactccctcttagccaatattgtgcctattgccatactagtctttgccgcctgcgaagcagcggtgggcctagccctactagtctcaatctccaacacatatggcctagactacgtacataacctaaacctactccaatgctaaaactaatcgtcccaacaattatattactaccactgacatgactttccaaaaaacacataatttgaatcaacacaaccacccacagcctaattattagcatcatccctctactattttttaaccaaatcaacaacaacctatttagctgttccccaaccttttcctccgaccccctaacaacccccctcctaatactaactacctgactcctacccctcacaatcatggcaagccaacgccacttatccagtgaaccactatcacgaaaaaaactctacctctctatactaatctccctacaaatctccttaattataacattcacagccacagaactaatcatattttatatcttcttcgaaaccacacttatccccaccttggctatcatcacccgatgaggcaaccagccagaacgcctgaacgcaggcacatacttcctattctacaccctagtaggctcccttcccctactcatcgcactgatttacactcacaacaccctaggctcactaaacattctactactcactctcactgcccaagaactatcaaactcctgagccaacaacttaatatgactagcttacacaatagcttttatagtaaagatacctctttacggactccacttatgactccctaaagcccatgtcgaagcccccatcgctgggtcaatagtacttgccgcagtactcttaaaactaggcggctatggtataatacgcctcacactcattctcaaccccctgacaaaacacatagcctaccccttccttgtactatccctatgaggcataattataacaagctccatctgcctacgacaaacagacctaaaatcgctcattgcatactcttcaatcagccacatagccctcgtagtaacagccattctcatccaaaccccctgaagcttcaccggcgcagtcattctcataatcgcccacggacttacatcctcattactattctgcctagcaaactcaaactacgaacgcactcacagtcgcatcataatcctctctcaaggacttcaaactctactcccactaatagctttttgatgacttctagcaagcctcgctaacctcgccttaccccccactattaacctactgggagaactctctgtgctagtaaccacgttctcctgatcaaatatcactctcctacttacaggactcaacatactagtcacagccctatactccctctacatatttaccacaacacaatggggctcactcacccaccacattaacaacataaaaccctcattcacacgagaaaacaccctcatgttcatacacctatcccccattctcctcctatccctcaaccccgacatcattaccgggttttcctcttgtaaatatagtttaaccaaaacatcagattgtgaatctgacaacagaggcttacgaccccttatttaccgagaaagctcacaagaactgctaactcatgcccccatgtctaacaacatggctttctcaacttttaaaggataacagctatccattggtcttaggccccaaaaattttggtgcaactccaaataaaagtaataaccatgcacactactataaccaccctaaccctgacttccctaattccccccatccttaccaccctcgttaaccctaacaaaaaaaactcatacccccattatgtaaaatccattgtcgcatccacctttattatcagtctcttccccacaacaatattcatgtgcctagaccaagaagttattatctcgaactgacactgagccacaacccaaacaacccagctctccctaagcttcaaactagactacttctccataatattcatccctgtggcattgttcgttacatggtccatcatagaattctcactgtgatatataaactcagacccaaacattaatcagttcttcaaatatctactcatcttcctaattaccatactaatcttagttaccgctaacaacctattccaactgttcatcggctgagagggcgtaggaattatatccttcttgctcatcagttgatgatacgcccgagcagatgccaacacagcagccattcaagcaatcctatacaaccgtatcggcgatatcggtttcatcctcgccttagcatgatttatcctacactccaactcatgagacccacaacaaatagcccttctaaacgctaatccaagcctcaccccactactaggcctcctcctagcagcagcaggcaaatcagcccaattaggtctccacccctgactcccctcagccatagaaggccccaccccagtctcagccctactccactcaagcactatagttgtagcaggaatcttcttactcatccgcttccaccccctagcagaaaatagcccactaatccaaactctaacactatgcttaggcgctatcaccactctgttcgcagcagtctgcgcccttacacaaaatgacatcaaaaaaatcgtagccttctccacttcaagtcaactaggactcataatagttacaatcggcatcaaccaaccacacctagcattcctgcacatctgtacccacgccttcttcaaagccatactatttatgtgctccgggtccatcatccacaaccttaacaatgaacaagatattcgaaaaataggaggactactcaaaaccatacctctcacttcaacctccctcaccattggcagcctagcattagcaggaatacctttcctcacaggtttctactccaaagaccacatcatcgaaaccgcaaacatatcatacacaaacgcctgagccctatctattactctcatcgctacctccctgacaagcgcctatagcactcgaataattcttctcaccctaacaggtcaacctcgcttccccacccttactaacattaacgaaaataaccccaccctactaaaccccattaaacgcctgacagccggaagcctattcgcaggatttctcattactaacaacatttcccccgcatcccccttccaaacaacaatccccctctacctaaaactcacagccctcgctgtcactttcctaggacttctaacagccctagacctcaactacctaaccaacaaacttaaaataaaatccccactatgcacattttatttctccaacatactcggattctaccctagcatcacacaccgcacaatcccctatctaggccttcttacgagccaaaacctgcccctactcctcctagacctaacctgactagaaaagctattacctaaaacaatttcacagcaccaaatctccacctccatcatcacctcaacccaaaaaggcataattaaactttacttcctctctttcttcttcccactcatcctaaccctactcctaatcacataacctattcccccgagcaatctcaattacaatatatacaccaacaaacaatgttcaaccagtaactactactaatcaacgcccataatcatacaaagcccccgcaccaataggatcctcccgaatcaaccctgacccctctccttcataaattattcagcttcctacactattaaagtttaccacaaccaccaccccatcatactctttcacccacagcaccaatcctacctccatcgctaaccccactaaaacactcaccaagacctcaacccctgacccccatgcctcaggatactcctcaatagccatcgctgtagtatatccaaagacaaccatcattccccctaaataaattaaaaaaactattaaacccatataacctcccccaaaattcagaataataacacacccgaccacaccgctaacaatcaatactaaacccccataaataggagaaggcttagaagaaaaccccacaaaccccattactaaacccacactcaacagaaacaaagcatacatcattattctcgcacggactacaaccacgaccaatgatatgaaaaaccatcgttgtatttcaactacaagaacaccaatgaccccaatacgcaaaattaaccccctaataaaattaattaaccactcactcatcgacctccccaccccatccaacatctccgcatgatgaaacttcggctcactccttggcgcctgcctgatcctccaaatcaccacaggactattcctagccatgcactactcaccagacgcctcaaccgccttttcatcaatcgcccacatcactcgagacgtaaattatggctgaatcatccgctaccttcacgccaatggcgcctcaatattctttatctgcctcttcctacacatcgggcgaggcctatattacggatcatttctctactcagaaacctgaaacatcggcattatcctcctgcttgcaactatagcaacagccttcataggctatgtcctcccgtgaggccaaatatcattctgaggggccacagtaattacaaacttactatccgccatcccatacattgggacagacctagttcaatgaatctgaggaggctactcagtagacagtcccaccctcacacgattctttacctttcacttcatcttgcccttcattattgcagccctagcagcactccacctcctattcttgcacgaaacgggatcaaacaaccccctaggaatcacctcccattccgataaaatcaccttccacccttactacacaatcaaagacgccctcggcttacttctcttcattctctccttaatgacattaacactattctcaccagacctcctaggcgacccagacaattataccctagccaaccccttaaacacccctccccacatcaagcccgaatgatatttcctattcgcctacacaattctccgatccgtccctaacaaactaggaggcgtccttgccctattactatccatcctcatcctagcaataatccccatcctccatatatccaaacaacaaagcataatatttcgcccactaagccaatcactttattgactcctagccgcagacctcctcattctaacctgaatcggaggacaaccagtaagctacccttttaccatcattggacaagtagcatccgtactatacttcacaacaatcctaatcctaataccaactatctccctaattgaaaacaaaatactcaaatgggcctgtccttgtagtataaactaatacaccagtcttgtaaaccggagatgaaaacctttttccaaggacaaatcagagaaaaagtctttaactccaccattagcacccaaagctaagattctaatttaaactattctctgttctttcatggggaagcagatttgggtaccacccaagtattgacttacccatcaacaaccgctatgtatttcgtacattactgccagccaccatgaatattgcacggtaccataaatacttgaccacctgtagtacataaaaacccaatccacatcaaaaccccctccccatgcttacaagcaagtacagcaatcaaccctcaactatcacacatcaactgcaactccaaagccacccctcacccactaggataccaacaaacctacccacccttaacagtacatagtacataaagccatttaccgtacatagcacattacagtcaaatcccttctcgtccccatggatgacccccctcagataggggtcccttgaccaccatcctccgtgaaatcaatatcccgcacaagagtgctactctcctcgctccgggcccataacacttgggggtagctaaagtgaactgtatccgacatctggttcctacttcagggccataaagcctaaatagcccacacgttccccttaaataagacatcacgatg

SEQ ID NO: 368 - DNA, 16569 bp, Homo sapiens mitochondrial
  3107: "n" refers to a nucleotide at position 3107 of the Cambridge Reference Sequence (CRS, Anderson et al. 1981 Nature 290:457-465), later determined to be absent from the human mtDNA sequence according to the revised CRS (rCRS, Andrews et al. 1999 Nature Genetics 23:147); "n" therefore represents a single nucleotide deletion at a position corresponding to nucleotide 3107 of SEQ ID NO:1 as provided herein.
gatcacaggtctatcaccctattaaccactcacgggagctctccatgcatttggtattttcgtctggggggtatgcacgcgatagcattgcgagacgctggagccggagcaccctatgtcgcagtatctgtctttgattcctgcctcatcccattatttatcgcacctacgttcaatattacaggcgaacatacttactaaagtgtgttaattaattaatgcttgtaggacataataataacaattgaatgtctgcacagccgctttccacacagacatcataacaaaaaatttccaccaaaccccccctcccccccgcttctggccacagcacttaaacacatctctgccaaaccccaaaaacaaagaaccctaacaccagcctaaccagatttcaaattttatcttttggcggtatgcacttttaacagtcaccccccaactaacacattattttcccctcccactcccatactactaatctcatcaatacaacccccgcccatcctacccagcacacacaccgctgctaaccccataccccgaaccaaccaaaccccaaagacaccccccacagtttatgtagcttacctcctcaaagcaatacactgaaaatgtttagacgggctcacatcaccccataaacaaataggtttggtcctagcctttctattagctcttagtaagattacacatgcaagcatccccgttccagtgagttcaccctctaaatcaccacgatcaaaagggacaagcatcaagcacgcagcaatgcagctcaaaacgcttagcctagccacacccccacgggaaacagcagtgattaacctttagcaataaacgaaagtttaactaagctatactaaccccagggttggtcaatttcgtgccagccaccgcggtcacacgattaacccaagtcaatagaagccggcgtaaagagtgttttagatcaccccctccccaataaagctaaaactcacctgagttgtaaaaaactccagttgacacaaaatagactacgaaagtggctttaacatatctgaacacacaatagctaagacccaaactgggattagataccccactatgcttagccctaaacctcaacagttaaatcaacaaaactgctcgccagaacactacgagccacagcttaaaactcaaaggacctggcggtgcttcatatccctctagaggagcctgttctgtaatcgataaaccccgatcaacctcaccacctcttgctcagcctatataccgccatcttcagcaaaccctgatgaaggctacaaagtaagcgcaagtacccacgtaaagacgttaggtcaaggtgtagcccatgaggtggcaagaaatgggctacattttctaccccagaaaactacgatagcccttatgaaacttaagggtcgaaggtggatttagcagtaaactgagagtagagtgcttagttgaacagggccctgaagcgcgtacacaccgcccgtcaccctcctcaagtatacttcaaaggacatttaactaaaacccctacgcatttatatagaggagacaagtcgtaacatggtaagtgtactggaaagtgcacttggacgaaccagagtgtagcttaacacaaagcacccaacttacacttaggagatttcaacttaacttgaccgctctgagctaaacctagccccaaacccactccaccttactaccagacaaccttagccaaaccatttacccaaataaagtataggcgatagaaattgaaacctggcgcaatagatatagtaccgcaagggaaagatgaaaaattataaccaagcataatatagcaaggactaacccctataccttctgcataatgaattaactagaaataactttgcaaggagagccaaagctaagacccccgaaaccagacgagctacctaagaacagctaaaagagcacacccgtctatgtagcaaaatagtgggaagatttataggtagaggcgacaaacctaccgagcctggtgatagctggttgtccaagatagaatcttagttcaactttaaatttgcccacagaaccctctaaatccccttgtaaatttaactgttagtccaaagaggaacagctctttggacactaggaaaaaaccttgtagagagagtaaaaaatttaacacccatagtaggcctaaaagcagccaccaattaagaaagcgttcaagctcaacacccactacctaaaaaatcccaaacatataactgaactcctcacacccaattggaccaatctatcaccctatagaagaactaatgttagtataagtaacatgaaaacattctcctccgcataagcctgcgtcagattaaaacactgaactgacaattaacagcccaatatctacaatcaaccaacaagtcattattaccctcactgtcaacccaacacaggcatgctcataaggaaaggttaaaaaaagtaaaaggaactcggcaaatcttaccccgcctgtttaccaaaaacatcacctctagcatcaccagtattagaggcaccgcctgcccagtgacacatgtttaacggccgcggtaccctaaccgtgcaaaggtagcataatcacttgttccttaaatagggacctgtatgaatggctccacgagggttcagctgtctcttacttttaaccagtgaaattgacctgcccgtgaagaggcgggcataacacagcaagacgagaagaccctatggagctttaatttattaatgcaaacagtacctaacaaacccacaggtcctaaactaccaaacctgcattaaaaatttcggttggggcgacctcggagcagaacccaacctccgagcagtacatgctaagacttcaccagtcaaagcgaactactatactcaattgatccaataacttgaccaacggaacaagttaccctagggataacagcgcaatcctattctagagtccatatcaacaatagggtttacgacctcgatgttggatcaggacatcccgatggtgcagccgctattaaaggttcgtttgttcaacgattaaagtcctacgtgatctgagttcagaccggagtaatccaggtcggtttctatctacnttcaaattcctccctgtacgaaaggacaagagaaataaggcctacttcacaaagcgccttcccccgtaaatgatatcatctcaacttagtattatacccacacccacccaagaacagggtttgttaagatggcagagcccggtaatcgcataaaacttaaaactttacagtcagaggttcaattcctcttcttaacaacatacccatggccaacctcctactcctcattgtacccattctaatcgcaatggcattcctaatgcttaccgaacgaaaaattctaggctatatacaactacgcaaaggccccaacgttgtaggcccctacgggctactacaacccttcgctgacgccataaaactcttcaccaaagagcccctaaaacccgccacatctaccatcaccctctacatcaccgccccgaccttagctctcaccatcgctcttctactatgaacccccctccccatacccaaccccctggtcaacctcaacctaggcctcctatttattctagccacctctagcctagccgtttactcaatcctctgatcagggtgagcatcaaactcaaactacgccctgatcggcgcactgcgagcagtagcccaaacaatctcatatgaagtcaccctagccatcattctactatcaacattactaataagtggctcctttaacctctccacccttatcacaacacaagaacacctctgattactcctgccatcatgacccttggccataatatgatttatctccacactagcagagaccaaccgaacccccttcgaccttgccgaaggggagtccgaactagtctcaggcttcaacatcgaatacgccgcaggccccttcgccctattcttcatagccgaatacacaaacattattataataaacaccctcaccactacaatcttcctaggaacaacatatgacgcactctcccctgaactctacacaacatattttgtcaccaagaccctacttctaacctccctgttcttatgaattcgaacagcatacccccgattccgctacgaccaactcatacacctcctatgaaaaaacttcctaccactcaccctagcattacttatatgatatgtctccatacccattacaatctccagcattccccctcaaacctaagaaatatgtctgataaaagagttactttgatagagtaaataataggagcttaaacccccttatttctaggactatgagaatcgaacccatccctgagaatccaaaattctccgtgccacctatcacaccccatcctaaagtaaggtcagctaaataagctatcgggcccataccccgaaaatgttggttatacccttcccgtactaattaatcccctggcccaacccgtcatctactctaccatctttgcaggcacactcatcacagcgctaagctcgcactgattttttacctgagtaggcctagaaataaacatgctagcttttattccagttctaaccaaaaaaataaaccctcgttccacagaagctgccatcaagtatttcctcacgcaagcaaccgcatccataatccttctaatagctatcctcttcaacaatatactctccggacaatgaaccataaccaatactaccaatcaatactcatcattaataatcataatggctatagcaataaaactaggaatagccccctttcacttctgagtcccagaggttacccaaggcacccctctgacatccggcctgcttcttctcacatgacaaaaactagcccccatctcaatcatataccaaatctctccctcactaaacgtaagccttctcctcactctctcaatcttatccatcatagcaggcagttgaggtggattaaaccaaacccagctacgcaaaatcttagcatactcctcaattacccacataggatgaataatagcagttctaccgtacaaccctaacataaccattcttaatttaactatttatattatcctaactactaccgcattcctactactcaacttaaactccagcaccacgaccctactactatctcgcacctgaaacaagctaacatgactaacacccttaattccatccaccctcctctccctaggaggcctgcccccgctaaccggctttttgcccaaatgggccattatcgaagaattcacaaaaaacaatagcctcatcatccccaccatcatagccaccatcaccctccttaacctctacttctacctacgcctaatctactccacctcaatcacactactccccatatctaacaacgtaaaaataaaatgacagtttgaacatacaaaacccaccccattcctccccacactcatcgcccttaccacgctactcctacctatctccccttttatactaataatcttatagaaatttaggttaaatacagaccaagagccttcaaagccctcagtaagttgcaatacttaatttctgtaacagctaaggactgcaaaaccccactctgcatcaactgaacgcaaatcagccactttaattaagctaagcccttactagaccaatgggacttaaacccacaaacacttagttaacagctaagcaccctaatcaactggcttcaatctacttctcccgccgccgggaaaaaaggcgggagaagccccggcaggtttgaagctgcttcttcgaatttgcaattcaatatgaaaatcacctcggagctggtaaaaagaggcctaacccctgtctttagatttacagtccaatgcttcactcagccattttacctcacccccactgatgttcgccgaccgttgactattctctacaaaccacaaagacattggaacactatacctattattcggcgcatgagctggagtcctaggcacagctctaagcctccttattcgagccgagctgggccagccaggcaaccttctaggtaacgaccacatctacaacgttatcgtcacagcccatgcatttgtaataatcttcttcatagtaatacccatcataatcggaggctttggcaactgactagttcccctaataatcggtgcccccgatatggcgtttccccgcataaacaacataagcttctgactcttacctccctctctcctactcctgctcgcatctgctatagtggaggccggagcaggaacaggttgaacagtctaccctcccttagcagggaactactcccaccctggagcctccgtagacctaaccatcttctccttacacctagcaggtgtctcctctatcttaggggccatcaatttcatcacaacaattatcaatataaaaccccctgccataacccaataccaaacgcccctcttcgtctgatccgtcctaatcacagcagtcctacttctcctatctctcccagtcctagctgctggcatcactatactactaacagaccgcaacctcaacaccaccttcttcgaccccgccggaggaggagaccccattctataccaacacctattctgatttttcggtcaccctgaagtttatattcttatcctaccaggcttcggaataatctcccatattgtaacttactactccggaaaaaaagaaccatttggatacataggtatggtctgagctatgatatcaattggcttcctagggtttatcgtgtgagcacaccatatatttacagtaggaatagacgtagacacacgagcatatttcacctccgctaccataatcatcgctatccccaccggcgtcaaagtatttagctgactcgccacactccacggaagcaatatgaaatgatctgctgcagtgctctgagccctaggattcatctttcttttcaccgtaggtggcctgactggcattgtattagcaaactcatcactagacatcgtactacacgacacgtactacgttgtagcccacttccactatgtcctatcaataggagctgtatttgccatcataggaggcttcattcactgatttcccctattctcaggctacaccctagaccaaacctacgccaaaatccatttcactatcatattcatcggcgtaaatctaactttcttcccacaacactttctcggcctatccggaatgccccgacgttactcggactaccccgatgcatacaccacatgaaacatcctatcatctgtaggctcattcatttctctaacagcagtaatattaataattttcatgatttgagaagccttcgcttcgaagcgaaaagtcctaatagtagaagaaccctccataaacctggagtgactatatggatgccccccaccctaccacacattcgaagaacccgtatacataaaatctagacaaaaaaggaaggaatcgaaccccccaaagctggtttcaagccaaccccatggcctccatgactttttcaaaaaggtattagaaaaaccatttcataactttgtcaaagttaaattataggctaaatcctatatatcttaatggcacatgcagcgcaagtaggtctacaagacgctacttcccctatcatagaagagcttatcacctttcatgatcacgccctcataatcattttccttatctgcttcctagtcctgtatgcccttttcctaacactcacaacaaaactaactaatactaacatctcagacgctcaggaaatagaaaccgtctgaactatcctgcccgccatcatcctagtcctcatcgccctcccatccctacgcatcctttacataacagacgaggtcaacgatccctcccttaccatcaaatcaattggccaccaatggtactgaacctacgagtacaccgactacggcggactaatcttcaactcctacatacttcccccattattcctagaaccaggcgacctgcgactccttgacgttgacaatcgagtagtactcccgattgaagcccccattcgtataataattacatcacaagacgtcttgcactcatgagctgtccccacattaggcttaaaaacagatgcaattcccggacgtctaaaccaaaccactttcaccgctacacgaccgggggtatactacggtcaatgctctgaaatctgtggagcaaaccacagtttcatgcccatcgtcctagaattaattcccctaaaaatctttgaaatagggcccgtatttaccctatagcaccccctctaccccctctagagcccactgtaaagctaacttagcattaaccttttaagttaaagattaagagaaccaacacctctttacagtgaaatgccccaactaaatactaccgtatggcccaccataattacccccatactccttacactattcctcatcacccaactaaaaatattaaacacaaactaccacctacctccctcaccaaagcccataaaaataaaaaattataacaaaccctgagaaccaaaatgaacgaaaatctgttcgcttcattcattgcccccacaatcctaggcctacccgccgcagtactgatcattctatttccccctctattgatccccacctccaaatatctcatcaacaaccgactaatcaccacccaacaatgactaatcaaactaacctcaaaacaaatgataaccatacacaacactaaaggacgaacctgatctcttatactagtatccttaatcatttttattgccacaactaacctcctcggactcctgcctcactcatttacaccaaccacccaactatctataaacctagccatggccatccccttatgagcgggcgcagtgattataggctttcgctctaagattaaaaatgccctagcccacttcttaccacaaggcacacctacaccccttatccccatactagttattatcgaaaccatcagcctactcattcaaccaatagccctggccgtacgcctaaccgctaacattactgcaggccacctactcatgcacctaattggaagcgccaccctagcaatatcaaccattaaccttccctctacacttatcatcttcacaattctaattctactgactatcctagaaatcgctgtcgccttaatccaagcctacgttttcacacttctagtaagcctctacctgcacgacaacacataatgacccaccaatcacatgcctatcatatagtaaaacccagcccatgacccctaacaggggccctctcagccctcctaatgacctccggcctagccatgtgatttcacttccactccataacgctcctcatactaggcctactaaccaacacactaaccatataccaatgatggcgcgatgtaacacgagaaagcacataccaaggccaccacacaccacctgtccaaaaaggccttcgatacgggataatcctatttattacctcagaagtttttttcttcgcaggatttttctgagccttttaccactccagcctagcccctaccccccaattaggagggcactggcccccaacaggcatcaccccgctaaatcccctagaagtcccactcctaaacacatccgtattactcgcatcaggagtatcaatcacctgagctcaccatagtctaatagaaaacaaccgaaaccaaataattcaagcactgcttattacaattttactgggtctctattttaccctcctacaagcctcagagtacttcgagtctcccttcaccatttccgacggcatctacggctcaacattttttgtagccacaggcttccacggacttcacgtcattattggctcaactttcctcactatctgcttcatccgccaactaatatttcactttacatccaaacatcactttggcttcgaagccgccgcctgatactggcattttgtagatgtggtttgactatttctgtatgtctccatctattgatgagggtcttactcttttagtataaatagtaccgttaacttccaattaactagttttgacaacattcaaaaaagagtaataaacttcgccttaattttaataatcaacaccctcctagccttactactaataattattacattttgactaccacaactcaacggctacatagaaaaatccaccccttacgagtgcggcttcgaccctatatcccccgcccgcgtccctttctccataaaattcttcttagtagctattaccttcttattatttgatctagaaattgccctccttttacccctaccatgagccctacaaacaactaacctgccactaatagttatgtcatccctcttattaatcatcatcctagccctaagtctggcctatgagtgactacaaaaaggattagactgaaccgaattggtatatagtttaaacaaaacgaatgatttcgactcattaaattatgataatcatatttaccaaatgcccctcatttacataaatattatactagcatttaccatctcacttctaggaatactagtatatcgctcacacctcatatcctccctactatgcctagaaggaataatactatcgctgttcattatagctactctcataaccctcaacacccactccctcttagccaatattgtgcctattgccatactagtctttgccgcctgcgaagcagcggtgggcctagccctactagtctcaatctccaacacatatggcctagactacgtacataacctaaacctactccaatgctaaaactaatcgtcccaacaattatattactaccactgacatgactttccaaaaaacacataatttgaatcaacacaaccacccacagcctaattattagcatcatccctctactattttttaaccaaatcaacaacaacctatttagctgttccccaaccttttcctccgaccccctaacaacccccctcttaatactaactacctgactcctacccctcacaatcatggcaagccaacgccacttatccagtgaaccactatcacgaaaaaaactctacctctctatactaatctccctacaaatctccttaattataacattcacagccacagaactaatcatattttatatcttcttcgaaaccacacttatccccaccttggctatcatcacccgatgaggcaaccagccagaacgcctgaacgcaggcacatacttcctattctacaccctagtaggctcccttcccctactcatcgcactaatttacactcacaacaccctaggctcactaaacattctactactcactctcactgcccaagaactatcaaactcctgagccaacaacttaatatgactagcttacacaatagcttttatagtaaagatacctctttacggactccacttatgactccctaaagcccatgtcgaagcccccatcgctgggtcaatagtacttgccgcagtactcttaaaactaggcggctatggtataatacgcctcacactcattctcaaccccctgacaaaacacatagcctaccccttccttgtactatccctatgaggcataattataacaagctccatctgcctacgacaaacagacctaaaatcgctcattgcatactcttcaatcagccacatagccctcgtagtaacagccattctcatccaaaccccctgaagcttcaccggcgcagtcattctcataatcgcccacgggcttacatcctcattactattctgcctagcaaactcaaactacgaacgcactcacagtcgcatcataatcctctctcaaggacttcaaactctactcccactaatagctttttgatgacttctagcaagcctcgctaacctcgccttaccccccactattaacctactgggagaactctctgtgctagtaaccacgttctcctgatcaaatatcactctcctacttacaggactcaacatactagtcacagccctatactccctctacatatttaccacaacacaatggggctcactcacccaccacattaacaacataaaaccctcattcacacgagaaaacaccctcatgttcatacacctatcccccattctcctcctatccctcaaccccgacatcattaccgggttttcctcttgtaaatatagtttaaccaaaacatcagattgtgaatctgacaacagaggcttacgaccccttatttaccgagaaagctcacaagaactgctaactcatgcccccatgtctaacaacatggctttctcaacttttaaaggataacagctatccattggtcttaggccccaaaaattttggtgcaactccaaataaaagtaataaccatgcacactactataaccaccctaaccctgacttccctaattccccccatccttaccaccctcgttaaccctaacaaaaaaaactcatacccccattatgtaaaatccattgtcgcatccacctttattatcagtctcttccccacaacaatattcatgtgcctagaccaagaagttattatctcgaactgacactgagccacaacccaaacaacccagctctccctaagcttcaaactagactacttctccataatattcatccctgtagcattgttcgttacatggtccatcatagaattctcactgtgatatataaactcagacccaaacattaatcagttcttcaaatatctactcatcttcctaattaccatactaatcttagttaccgctaacaacctattccaactgttcatcggctgagagggcgtaggaattatatccttcttgctcatcagttgatgatacgcccgagcagatgccaacacagcagccattcaagcaatcctatacaaccgtatcggcgatatcggtttcatcctcgccttagcatgatttatcctacactccaactcatgagacccacaacaaatagcccttctaaacgctaatccaagcctcaccccactactaggcctcctcctagcagcagcaggcaaatcagcccaattaggtctccacccctgactcccctcagccatagaaggccccaccccagtctcagccctactccactcaagcactatagttgtagcaggaatcttcttactcatccgcttccaccccctagcagaaaatagcccactaatccaaactctaacactatgcttaggcgctatcaccactctgttcgcagcagtctgcgcccttacacaaaatgacatcaaaaaaatcgtagccttctccacttcaagtcaactaggactcataatagttacaatcggcatcaaccaaccacacctagcattcctgcacatctgtacccacgccttcttcaaagccatactatttatgtgctccgggtccatcatccacaaccttaacaatgaacaagatattcgaaaaataggaggactactcaaaaccatacctctcacttcaacctccctcaccattggcagcctagcattagcaggaatacctttcctcacaggtttctactccaaagaccacatcatcgaaaccgcaaacatatcatacacaaacgcctgagccctatctattactctcatcgctacctccctgacaagcgcctatagcactcgaataattcttctcaccctaacaggtcaacctcgcttccccacccttactaacattaacgaaaataaccccaccctactaaaccccattaaacgcctggcagccggaagcctattcgcaggatttctcattactaacaacatttcccccgcatcccccttccaaacaacaatccccctctacctaaaactcacagccctcgctgtcactttcctaggacttctaacagccctagacctcaactacctaaccaacaaacttaaaataaaatccccactatgcacattttatttctccaacatactcggattctaccctagcatcacacaccgcacaatcccctatctaggccttcttacgagccaaaacctgcccctactcctcctagacctaacctgactagaaaagctattacctaaaacaatttcacagcaccaaatctccacctccatcatcacctcaacccaaaaaggcataattaaactttacttcctctctttcttcttcccactcatcctaaccctactcctaatcacataacctattcccccgagcaatctcaattacaatatatacaccaacaaacaatgttcaaccagtaactactactaatcaacgcccataatcatacaaagcccccgcaccaataggatcctcccgaatcaaccctgacccctctccttcataaattattcagcttcctacactattaaagtttaccacaaccaccaccccatcatactctttcacccacagcaccaatcctacctccatcgctaaccccactaaaacactcaccaagacctcaacccctgacccccatgcctcaggatactcctcaatagccatcgctgtagtatatccaaagacaaccatcattccccctaaataaattaaaaaaactattaaacccatataacctcccccaaaattcagaataataacacacccgaccacaccgctaacaatcaatactaaacccccataaataggagaaggcttagaagaaaaccccacaaaccccattactaaacccacactcaacagaaacaaagcatacatcattattctcgcacggactacaaccacgaccaatgatatgaaaaaccatcgttgtatttcaactacaagaacaccaatgaccccaatacgcaaaactaaccccctaataaaattaattaaccactcattcatcgacctccccaccccatccaacatctccgcatgatgaaacttcggctcactccttggcgcctgcctgatcctccaaatcaccacaggactattcctagccatgcactactcaccagacgcctcaaccgccttttcatcaatcgcccacatcactcgagacgtaaattatggctgaatcatccgctaccttcacgccaatggcgcctcaatattctttatctgcctcttcctacacatcgggcgaggcctatattacggatcatttctctactcagaaacctgaaacatcggcattatcctcctgcttgcaaccatagcaacagccttcataggctatgtcctcccgtgaggccaaatatcattctgaggggccacagtaattacaaacttactatccgccatcccatacattgggacagacctagttcaatgaatctgaggaggctactcagtagacagtcccaccctcacacgattctttacctttcacttcatcttgcccttcattattgcagccctagcagcactccacctcctattcttgcacgaaacgggatcaaacaaccccctaggaatcacctcccattccgataaaatcaccttccacccttactacacaatcaaagacgccctcggcttacttctcttccttctctccttaatgacattaacactattctcaccagacctcctaggcgacccagacaattataccctagccaaccccttaaacacccctccccacatcaagcccgaatgatatttcctattcgcctacacaattctccgatccgtccctaacaaactaggaggcgtccttgccctattactatccatcctcatcctagcaataatccccatcctccatatatccaaacaacaaagcataatatttcgcccactaagccaatcactttattgactcctagccgcagacctcctcattctaacctgaatcggaggacaaccagtaagctacccttttaccatcattggacaagtagcatccgtactatacttcacaacaatcctaatcctaataccaactatctccctaattgaaaacaaaatactcaaatgggcctgtccttgtagtataaactaatacaccagtcttgtaaaccggagatgaaaacctttttccaaggacaaatcagagaaaaagtctttaactccaccattagcacccaaagctaagattctaatttaaactattctctgttctttcatggggaagcagatttgggtaccacccaagtattgactcacccatcaacaaccgctatgtatttcgtacattactgccagccaccatgaatattgtacggtaccataaatacttgaccacctgtagtacataaaaacccaatccacatcaaaaccccctccccatgcttacaagcaagtacagcaatcaaccctcaactatcacacatcaactgcaactccaaagccacccctcacccactaggataccaacaaacctacccacccttaacagtacatagtacataaagccatttaccgtacatagcacattacagtcaaatcccttctcgtccccatggatgacccccctcagataggggtcccttgaccaccatcctccgtgaaatcaatatcccgcacaagagtgctactctcctcgctccgggcccataacacttgggggtagctaaagtgaactgtatccgacatctggttcctacttcagggccataaagcctaaatagcccacacgttccccttaaataagacatcacgatg

SEQ ID NO: 369 - DNA, 16571 bp, Homo sapiens mitochondrial
  3109: "n" refers to a nucleotide at position 3107 of the Cambridge Reference Sequence (CRS, Anderson et al. 1981 Nature 290:457-465), later determined to be absent from the human mtDNA sequence according to the revised CRS (rCRS, Andrews et al. 1999 Nature Genetics 23:147); "n" therefore represents a single nucleotide deletion at a position corresponding to nucleotide 3107 of SEQ ID NO:1 as provided herein.
gatcacaggtctatcaccctattaaccactcacgggagctctccatgcatttggtattttcgtctggggggtgtgcacgcgatagcattgcgagacgctggagccggagcaccctatgtcgcagtatctgtctttgattcctgcctcattccattatttatcgcacctacgttcaatattacaggcgaacatacttactaaagtgtgttaattaattaatgcttgtaggacataataataacaattgaatgtctgcacagccgctttccacacagacatcataacaaaaaattttcaccaaaccccccctcccccccgcttctggccacagcacttaaacacatctctgccaaaccccaaaaacaaagaaccctaacaccagcctaaccagatttcaaattttatcttttggcggtatgcacttttaacagtcaccccccaactaacacattattttcccctcccactcccatactactaatctcatcaacacaacccccgcccatcctacccagcacacacacaccgctgctaaccccataccccgaaccaaccaaaccccaaagacaccccccacagtttatgtagcttacctcctcaaagcaatacactgaaaatgtttagacgggctcacatcaccccataaacaaataggtttggtcctagcctttctattagctcttagtaagattacacatgcaagcatccccgttccagtgagttcaccctctaaatcaccacgatcaaaagggacaagcatcaagcacgcagcaatgcagctcaaaacgcttagcctagccacacccccacgggaaacagcagtgattaacctttagcaataaacgaaagtttaactaagctatactaaccccagggttggtcaatttcgtgccagccaccgcggtcacacgattaacccaagtcaatagaagccggcgtaaagagtgttttagatcaccccctccccaataaagctaaaactcacctgagttgtaaaaaactccagttgacacaaaatagactacgaaagtggctttaacatatctgaacacacaatagctaagacccaaactgggattagataccccactatgcttagccctaaacctcaacagttaaatcaacaaaactgctcgccagaacactacgagccacagcttaaaactcaaaggacctggcggtgcttcatatccctctagaggagcctgttctgtaatcgataaaccccgatcaacctcaccacctcttgctcagcctatataccgccatcttcagcaaaccctgatgaaggctacaaagtaagcgcaagtacccacgtaaagacgttaggtcaaggtgtagcccatgaggtggcaagaaatgggctacattttctaccccagaaaactacgatagcccttatgaaacttaagggtcgaaggtggatttagcagtaaactgagagtagagtgcttagttgaacagggccctgaagcgcgtacacaccgcccgtcaccctcctcaagtatacttcaaaggacatttaactaaaacccctacgcatttatatagaggagacaagtcgtaacatggtaagtgtactggaaagtgcacttggacgaaccagagtgtagcttaacacaaagcacccaacttacacttaggagatttcaacttaacttgaccgctctgagctaaacctagccccaaacccactccaccttactaccagacaaccttagccaaaccatttacccaaataaagtataggcgatagaaattgaaacctggcgcaatagatatagtaccgcaagggaaagatgaaaaattataaccaagcataatatagcaaggactaacccctataccttctgcataatgaattaactagaaataactttgcaaggagagccaaagctaagacccccgaaaccagacgagctacctaagaacagctaaaagagcacacccgtctatgtagcaaaatagtgggaagatttataggtagaggcgacaaacctaccgagcctggtgatagctggttgtccaagatagaatcttagttcaactttaaatttgcccacagaaccctctaaatccccttgtaaatttaactgttagtccaaagaggaacagctctttggacactaggaaaaaaccttgtagagagagtaaaaaatttaacacccatagtaggcctaaaagcagccaccaattaagaaagcgttcaagctcaacacccactacctaaaaaatcccaaacatataactgaactcctcacacccaattggaccaatctatcaccctatagaagaactaatgttagtataagtaacatgaaaacattctcctccgcataagcctgcgtcagattaaaacactgaactgacaattaacagcccaatatctacaatcaaccaacaagccattattaccctcactgtcaacccaacacaggcatgctcataaggaaaggttaaaaaaagtaaaaggaactcggcaaatcttaccccgcctgtttaccaaaaacatcacctctagcatcaccagtattagaggcaccgcctgcccagtgacacatgtttaacggccgcggtaccctaaccgtgcaaaggtagcataatcacttgttccttaaatagggacctgtatgaatggctccacgagggttcagctgtctcttacttttaaccagtgaaattgacctgcccgtgaagaggcgggcatgacacagcaagacgagaagaccctatggagctttaatttattaatgcaaacagtacctaacaaacccacaggtcctaaactaccaaacctgcattaaaaatttcggttggggcgacctcggagcagaacccaacctccgagcagtacatgctaagacttcaccagtcaaagcgaactactatactcaattgatccaataacttgaccaacggaacaagttaccctagggataacagcgcaatcctattctagagtccatatcaacaatagggtttacgacctcgatgttggatcaggacatcccgatggtgcagccgctattaaaggttcgtttgttcaacgattaaagtcctacgtgatctgagttcagaccggagtaatccaggtcggtttctatctacnttcaaattcctccctgtacgaaaggacaagagaaataaggcctacttcacaaagcgccttcccccgtaaatgatatcatctcaacttagtattatacccacacccacccaagaacagggtttgttaagatggcagagcccggtaatcgcataaaacttaaaactttacagtcagaggttcaattcctcttcttaacaacatacccatggccaacctcctactcctcattgtacccattctaatcgcaatggcattcctaatgcttaccgaacgaaaaattctaggctatatacaactacgcaaaggccccaacgttgtaggcccctacgggctactacaacccttcgctgacgccataaaactcttcaccaaagagcccctaaaacccgccacatctaccatcaccctctacatcaccgccccgaccttagctctcaccatcgctcttctactatgaacccccctccccatacccaaccccctggtcaacctcaacctaggcctcctatttattctagccacctctagcctagccgtttactcaatcctctgatcagggtgagcatcaaactcaaactacgccctgatcggcgcactgcgagcagtagcccaaacaatctcatatgaagtcaccctagccatcattctactatcaacattactaataagtggctcctttaacctctccacccttatcacaacacaagaacacctctgattactcctgccatcatgacccttggccataatatgatttatctccacactagcagagaccaaccgaacccccttcgaccttgccgaaggggagtccgaactagtctcaggcttcaacatcgaatacgccgcaggccccttcgccctattcttcatagccgaatacacaaacattattataataaacaccctcaccactacaatcttcctaggaacaacatatgacgcactctcccctgaactctacacaacatattttgtcaccaagaccctacttctaacctccctgttcttatgaattcgaacagcatacccccgattccgctacgaccaactcatacacctcctatgaaaaaacttcctaccactcaccctagcattacttatatgacatgtctccatacccattacaatctccagcattccccctcaaacctaagaaatatgtctgataaaagagttactttgatagagtaaataataggagcttaaacccccttatttctaggactatgagaatcgaacccatccctgagaatccaaaattctccgtgccacctatcacaccccatcctaaagtaaggtcagctaaataagctatcgggcccataccccgaaaatgttggttatacccttcccgtactaattaatcccctggcccaacccgtcatctactctaccatctttgcaggcacactcatcacagcgctaagctcgcactgattttttacctgagtaggcctagaaataaacatgctagcttttattccagttctaaccaaaaaaataaaccctcgttccacagaagctgccatcaagtatttcctcacgcaagcaaccgcatccataatccttctaatagctatcctcttcaacaatatactctccggacaatgaaccataaccaatactaccaatcaatactcatcattaataatcataatggctatagcaataaaactaggaatagccccctttcacttctgagtcccagaggttacccaaggcacccctctgacatccggcctgcttcttctcacatgacaaaaactagcccccatctcaatcatataccaaatctctccctcactaaacgtaagccttctcctcactctctcaatcttatccatcatagcaggcagttgaggtggattaaaccaaacccagctacgcaaaatcttagcatactcctcaattacccacataggatgaataatagcagttctaccgtacaaccctaacataaccattcttaatttaactatttatattatcctaactactaccgcattcctactactcaacttaaactccagcaccacgaccctactactatctcgcacctgaaacaagctaacatgactaacacccttaattccatccaccctcctctccctaggaggcctgcccccgctaaccggctttttgcccaaatgggccattatcgaagaattcacaaaaaacaatagcctcatcatccccaccatcatagccaccatcaccctccttaacctctacttctacctacgcctaatctactccacctcaatcacactactccccatatctaacaacgtaaaaataaaatgacagtttgaacatacaaaacccaccccattcctccccacactcatcgcccttaccacgctactcctacctatctccccttttatactaataatcttatagaaatttaggttaaatacagaccaagagccttcaaagccctcagtaagttgcaatacttaatttctgtaacagctaaggactgcaaaaccccactctgcatcaactgaacgcaaatcagctactttaattaagctaagcccttactagaccaatgggacttaaacccacaaacacttagttaacagctaagcaccctaatcaactggcttcaatctacttctcccgccgccgggaaaaaaggcgggagaagccccggcaggtttgaagctgcttcttcgaatttgcaattcaatatgaaaatcacctcggagctggtaaaaagaggcctaacccctgtctttagatttacagtccaatgcttcactcagccattttacctcacccccactgatgttcgccgaccgttgactattctctacaaaccacaaagacattggaacactatacctattattcggcgcatgagctggagtcctaggcacagctctaagcctccttattcgagccgagctgggccagccaggcaaccttctaggtaacgaccacatctacaacgttatcgtcacagcccatgcatttgtaataatcttcttcatagtaatacccatcataatcggaggctttggcaactgactagttcccctaataatcggtgcccccgatatggcgtttccccgcataaacaacataagcttctgactcttacctccctctctcctactcctgctcgcatctgctatagtggaggccggagcaggaacaggttgaacagtctaccctcccttagcagggaactactcccaccctggagcctccgtagacctaaccatcttctccttacacctagcaggtgtctcctctatcttaggggccatcaatttcatcacaacaattatcaatataaaaccccctgccataacccaataccaaacgcccctcttcgtctgatccgtcctaatcacagcagtcctacttctcctatctctcccagtcctagctgctggcatcactatactactaacagaccgcaacctcaacaccaccttcttcgaccccgccggaggaggagaccccattctataccaacacctattctgatttttcggtcaccctgaagtttatattcttatcctaccaggcttcggaataatctcccatattgtaacttactactccggaaaaaaagaaccatttggatacataggtatggtctgagctatgatatcaattggcttcctagggtttatcgtgtgagcacaccatatatttacagtaggaatagacgtagacacacgagcatatttcacctccgctaccataatcatcgctatccccaccggcgtcaaagtatttagctgactcgccacactccacggaagcaatatgaaatgatctgctgcagtgctctgagccctaggattcatctttcttttcaccgtaggtggccttactggcattgtattagcaaactcatcactagacatcgtactacacgacacgtactacgttgtagctcacttccactatgtcctatcaataggagctgtatttgccatcataggaggcttcattcactgatttcccctattctcaggctacaccctagaccaaacctacgccaaaatccatttcactatcatattcatcggcgtaaatctaactttcttcccacaacactttctcggcctatccggaataccccgacgttactcggactaccccgatgcatacaccacatgaaacatcctatcatctgtaggctcattcatttctctaacagcagtaatattaataattttcatgatttgagaagccttcgcttcgaagcgaaaagtcctaatagtagaagaaccctccataaacctggagtgactatatggatgccccccaccctaccacacattcgaagaacccgtatacataaaatctagacaaaaaaggaaggaatcgaaccccccaaagttggtttcaagccaaccccatggcctccatgactttttcaaaaaggtattagaaaaaccatttcataactttgtcaaagttaaattataggctaaatcctatatatcttaatggcacatgcagcgcaagtaggtctacaagacgctacttcccctatcatagaagagcttatcacctttcatgatcacgccctcataatcattttccttatctgcttcctagtcctgtatgcccttttcctaacactcacaacaaaactaactaatactaacatctcagacgctcaggaaatagaaaccgtctgaactatcctgcccgccatcatcctagtcctcatcgccctcccatccctacgcatcctttacataacagacgaggtcaacgatccctcccttaccatcaaatcaattggccaccaatggtactgaacctacgagtacaccgactacggcggactaatcttcaactcctacatacttcccccattattcctagaaccaggcgacctgcgactccttgacgttgacaatcgagtagtactcccgattgaagcccccattcgtataataattacatcacaagacgtcttgcactcatgagctgtccccacattaggcttaaaaacagatgcaattcccggacgtctaaaccaaaccactttcaccgctacacgaccgggggtatactacggtcaatgctctgaaatctgtggagcaaaccacagtttcatgcccatcgtcctagaattaattcccctaaaaatctttgaaatagggcccgtatttaccctatagcaccccctctaccccctctagagcccactgtaaagctaacttagcattaaccttttaagttaaagattaagagaaccaacacctctttacagtgaaatgccccaactaaatactaccgtatggcccaccataattacccccatactccttacactattcctcatcacccaactaaaaatattaaacacaaactaccacctacctccctcaccaaagcccataaaaataaaaaattataacaaaccctgagaaccaaaatgaacgaaaatctgttcgcttcattcattgcccccacaatcctaggcctacccgccgcagtactgatcattctatttccccctctattgatccccacctccaaatatctcatcaacaaccgactaatcaccacccaacaatgactaatcaaactaacctcaaaacaaatgataaccatacacaacactaaaggacgaacctgatctcttatactagtatccttaatcatttttattgccacaactaacctcctcggactcctgcctcactcatttacaccaaccacccaactatctataaacctagccatggccatccccttatgagcgggcgcagtgattataggctttcgctctaagattaaaaatgccctagcccacttcttaccacaaggcacacctacaccccttatccccatactagttattatcgaaaccatcagcctactcattcaaccaatagccctggccgtacgcctaaccgctaacattactgcaggccacctactcatgcacctaattggaagcgccaccctagcaatatcaaccattaaccttccctctacacttatcatcttcacaattctaattctactgactatcctagaaatcgctgtcgccttaatccaagcctacgttttcacacttctagtaagcctctacctgcacgacaacacataatgacccaccaatcacatgcctatcatatagtaaaacccagcccatgacccctaacaggggccctctcagccctcctaatgacctccggcctagccatgtgatttcacttccactccataacgctcctcatactaggcctactaaccaacacactaaccatataccaatgatggcgcgatgtaacacgagaaagcacataccaaggccaccacacaccacctgtccaaaaaggccttcgatacgggataatcctatttattacctcagaagtttttttcttcgcaggatttttctgagccttttaccactccagcctagcccctaccccccaattaggagggcactggcccccaacaggcatcaccccgctaaatcccctagaagtcccactcctaaacacatccgtattactcgcatcaggagtatcaatcacctgagctcaccatagtctaatagaaaacaaccgaaaccaaataattcaagcactgcttattacaattttactgggtctctattttaccctcctacaagcctcagagtacttcgagtctcccttcaccatttccgacggcatctacggctcaacattttttgtagccacaggcttccacggacttcacgtcattattggctcaactttcctcactatctgcttcatccgccaactaatatttcactttacatccaaacatcactttggcttcgaagccgccgcctgatactggcattttgtagatgtggtttgactatttctgtatgtctccatctattgatgagggtcttactcttttagtataaatagtaccgttaacttccaattaactagttttgacaacattcaaaaaagagtaataaacttcgccttaattttaataatcaacaccctcctagccttactactaataattattacattttgactaccacaactcaacggctacatagaaaaatccaccccttacgaatgcggcttcgaccctatatcccccgcccgcgtccctttctccataaaattcttcttagtagctattaccttcttattatttgatctagaaattgccctccttttacccctaccatgagccctacaaacaactaacctgccactaatagttatgtcatccctcttattaatcatcatcctagccctaagtctggcctatgagtgactacaaaaaggactagactgagccgaattggtatatagtttaaacaaaacgaatgatttcgactcattaaattatgataatcatatttaccaaatgcccctcatttacataaatattatactagcatttaccatctcacttctaggaatactagtatatcgctcacacctcatatcctccctactatgcctagaaggaataatactatcgctgttcattatagctactctcataaccctcaacacccactccctcttagccaatattgtgcctattgccatactagtctttgccgcctgcgaagcagcggtgggcctagccctactagtctcaatctccaacacatatggcctagactacgtacataacctaaacctactccaatgctaaaactaatcgtcccaacaattatattactaccactgacatgactttccaaaaaacacataatttgaatcaacacaaccacccacagcctaattattagcatcatccctctactattttttaaccaaatcaacaacaacctatttagctgttccccaaccttttcctccgaccccctaacaacccccctcctaatactaactacctgactcctacccctcacaatcatggcaagccaacgccacttatccagtgaaccactatcacgaaaaaaactctacctctctatactaatctccctacaaatctccttaattataacattcacagccacagaactaatcatattttatatcttcttcgaaaccacacttatccccaccttggctatcatcacccgatgaggcaaccagccagaacgcctgaacgcaggcacatacttcctattctacaccctagtaggctcccttcccctactcatcgcactgatttacactcacaacaccctaggctcactaaacattctactactcactctcactgcccaagaactatcaaactcctgagccaacaacttaatatgactagcttacacaatagcttttatagtaaagatacctctttacggactccacttatgactccctaaagcccatgtcgaagcccccatcgctgggtcaatagtacttgccgcagtactcttaaaactaggcggctatggtataatacgcctcacactcattctcaaccccctgacaaaacacatagcctaccccttccttgtactatccctatgaggcataattataacaagctccatctgcctacgacaaacagacctaaaatcgctcattgcatactcttcaatcagccacatagccctcgtagtaacagccattctcatccaaaccccctgaagcttcaccggcgcagtcattctcataatcgcccacggacttacatcctcattactattctgcctagcaaactcaaactacgaacgcactcacagtcgcatcataatcctctctcaaggacttcaaactctactcccactaatagctttttgatgacttctagcaagcctcgctaacctcgccttaccccccactattaacctactgggagaactctctgtgctagtaaccacgttctcctgatcaaatatcactctcctacttacaggactcaacatactagtcacagccctatactccctctacatatttaccacaacacaatggggctcactcacccaccacattaacaacataaaaccctcattcacacgagaaaacaccctcatgttcatacacctatcccccattctcctcctatccctcaaccccgacatcattaccgggttttcctcttgtaaatatagtttaaccaaaacatcagattgtgaatctgacaacagaggcttacgaccccttatttaccgagaaagctcacaagaactgctaactcatgcccccatgtctaacaacatggctttctcaacttttaaaggataacagctatccattggtcttaggccccaaaaattttggtgcaactccaaataaaagtaataaccatgcacactactataaccaccctaaccctgacttccctaattccccccatccttaccaccctcgttaaccctaacaaaaaaaactcatacccccattatgtaaaatccattgtcgcatccacctttattatcagtctcttccccacaacaatattcatgtgcctagaccaagaagttattatctcgaactgacactgagccacaacccaaacaacccagctctccctaagcttcaaactagactacttctccataatattcatccctgtggcattgttcgttacatggtccatcatagaattctcactgtgatatataaactcagacccaaacattaatcagttcttcaaatatctactcatcttcctaattaccatactaatcttagttaccgctaacaacctattccaactgttcatcggctgagagggcgtaggaattatatccttcttgctcatcagttgatgatacgcccgagcagatgccaacacagcagccattcaagcaatcctatacaaccgtatcggcgatatcggtttcatcctcgccttagcatgatttatcctacactccaactcatgagacccacaacaaatagcccttctaaacgctaatccaagcctcaccccactactaggcctcctcctagcagcagcaggcaaatcagcccaattaggtctccacccctgactcccctcagccatagaaggccccaccccagtctcagccctactccactcaagcactatagttgtagcaggaatcttcttactcatccgcttccaccccctagcagaaaatagcccactaatccaaactctaacactatgcttaggcgctatcaccactctgttcgcagcagtctgcgcccttacacaaaatgacatcaaaaaaatcgtagccttctccacttcaagtcaactaggactcataatagttacaatcggcatcaaccaaccacacctagcattcctgcacatctgtacccacgccttcttcaaagccatactatttatgtgctccgggtccatcatccacaaccttaacaatgaacaagatattcgaaaaataggaggactactcaaaaccatacctctcacttcaacctccctcaccattggcagcctagcattagcaggaatacctttcctcacaggtttctactccaaagaccacatcatcgaaaccgcaaacatatcatacacaaacgcctgagccctatctattactctcatcgctacctccctgacaagcgcctatagcactcgaataattcttctcaccctaacaggtcaacctcgcttccccacccttactaacattaacgaaaataaccccaccctactaaaccccattaaacgcctgacagccggaagcctattcgcaggatttctcattactaacaacatttcccccgcatcccccttccaaacaacaatccccctctacctaaaactcacagccctcgctgtcactttcctaggacttctaacagccctagacctcaactacctaaccaacaaacttaaaataaaatccccactatgcacattttatttctccaacatactcggattctaccctagcatcacacaccgcacaatcccctatctaggccttcttacgagccaaaacctgcccctactcctcctagacctaacctgactagaaaagctattacctaaaacaatttcacagcaccaaatctccacctccatcatcacctcaacccaaaaaggcataattaaactttacttcctctctttcttcttcccactcatcctaaccctactcctaatcacataacctattcccccgagcaatctcaattacaatatatacaccaacaaacaatgttcaaccagtaactactactaatcaacgcccataatcatacaaagcccccgcaccaataggatcctcccgaatcaaccctgacccctctccttcataaattattcagcttcctacactattaaagtttaccacaaccaccaccccatcatactctttcacccacagcaccaatcctacctccatcgctaaccccactaaaacactcaccaagacctcaacccctgacccccatgcctcaggatactcctcaatagccatcgctgtagtatatccaaagacaaccatcattccccctaaataaattaaaaaaactattaaacccatataacctcccccaaaattcagaataataacacacccgaccacaccgctaacaatcaatactaaacccccataaataggagaaggcttagaagaaaaccccacaaaccccattactaaacccacactcaacagaaacaaagcatacatcattattctcgcacggactacaaccacgaccaatgatatgaaaaaccatcgttgtatttcaactacaagaacaccaatgaccccaatacgcaaaattaaccccctaataaaattaattaaccactcattcatcgacctccccaccccatccaacatctccgcatgatgaaacttcggctcactccttggcgcctgcctgatcctccaaatcaccacaggactattcctagccatgcactactcaccagacgcctcaaccgccttttcatcaatcgcccacatcactcgagacgtaaattatggctgaatcatccgctaccttcacgccaatggcgcctcaatattctttatctgcctcttcctacacatcgggcgaggcctatattacggatcatttctctactcagaaacctgaaacatcggcattatcctcctgcttgcaactatagcaacagccttcataggctatgtcctcccgtgaggccaaatatcattctgaggggccacagtaattacaaacttactatccgccatcccatacattgggacagacctagttcaatgaatctgaggaggctactcagtaaacagtcccaccctcacacgattctttacctttcacttcatcttgcccttcattattgcagccctagcagcactccacctcctattcttgcacgaaacgggatcaaacaaccccctaggaatcacctcccattccgataaaatcaccttccacccttactacacaatcaaagacgccctcggcttacttctcttcattctctccttaatgacattaacactattctcaccagacctcctaggcgacccagacaattataccctagccaaccccttaaacacccctccccacatcaagcccgaatgatatttcctattcgcctacacaattctccgatccgtccctaacaaactaggaggcgtccttgccctattactatccatcctcatcctagcaataatccccatcctccatatatccaaacaacaaagcataatatttcgcccactaagccaatcactttattgactcctagccgcagacctcctcattctaacctgaatcggaggacaaccagtaagctacccttttaccatcattggacaagtagcatccatactatacttcacaacaatcctaatcctaataccaactatctccctaattgaaaacaaaatactcaaatgggcctgtccttgtagtataaactaatacaccagtcttgtaaaccggagatgaaaacctttttccaaggacaaatcagagaaaaagtctttaactccaccattagcacccaaagctaagattctaatttaaactattctctgttctttcatggggaagcagatttgggtaccacccaagtattgacttacccatcaacaaccgctatgtatttcgtacattactgccagccaccatgaatattgcacggtaccataaatacttgaccacctgtagtacataaaaacccaatccacatcaaaaccccctccctatgcttacaagcaagtacagcaatcaaccctcaactatcacacatcaactgcaactccaaagccacccctcacccactaggataccaacaaacctacccacccttaacagtacatagtacataaagccatttaccgtacatagcacattacagtcaaatcccttctcgtccccatggatgacccccctcagataggggtcccttgaccaccatcctccgtgaaatcaatatcccgcacaagagtgctactctcctcgctccgggcccataacacttgggggtagctaaagtgaactgtatccgacatctggttcctacttcagggccataaagcctaaatagcccacacgttccccttaaataagacatcacgatg

SEQ ID NO: 370 - DNA, 16565 bp, Homo sapiens mitochondrial
  3110: "n" refers to a nucleotide at position 3107 of the Cambridge Reference Sequence (CRS, Anderson et al. 1981 Nature 290:457-465), later determined to be absent from the human mtDNA sequence according to the revised CRS (rCRS, Andrews et al. 1999 Nature Genetics 23:147); "n" therefore represents a single nucleotide deletion at a position corresponding to nucleotide 3107 of SEQ ID NO:1 as provided herein.
gatcacaggtctatcaccctattaaccactcacgggagctctccatgcatttggtattttcgtctggggggtgtgcacgcgatagcattgcgagacgctggagccggagcaccctatgtcgcagtatctgtctttgattcctgcctcatcctattattcatcgcacctacgttcaatattacaggcgaacatacttactaaagtgtgttaattaattaatgcttgtaggacataataataacaattgaatgtctgcacagccgctttccacacagacatcataacaaaaaatttccaccaaaccccccctccccccccgcttctggccacagcacttaaacacatctctgccaaaccccaaaaacaaagaaccctaacaccagcctaaccagatttcaaattttatcttttggcggtatgcacttttaacagtcaccccccaactaacacattattttcccctcccactcccatactactaatctcatcaatacaacccccacccatcctacccagcacacacacaccgctgctaaccccataccccgaaccaaccaaaccccaaagacaccccccacagtttatgtagcttacctcctcaaagcaatacactgaaaatgtttagacgggctcacatcaccccataaacaaataggtttggtcctagcctttctattagctcttagtaagattacacatgcaagcatccccgttccagtgagttcaccctctaaatcaccacgatcaaaagggacaagcatcaagcacgcagcaatgcagctcaaaacgcttagcctagccacacccccacgggaaacagcagtgattagcctttagcaataaacgaaagtttaactaagctatactaaccccagggttggtcaatttcgtgccagccaccgcggtcacacgattaacccaagtcaatagaagccggcgtaaagagtgttttagatcaccccctccccaataaagctaaaactcacctgagttgtaaaaaactccagttgacacaaaatagactacgaaagtggctttaacatatctgaacacacaatagctaagacccaaactgggattagataccccactatgcttagccctaaacctcaacagttaaatcaacaaaactgctcgccagaacactacgagccacagcttaaaactcaaaggacctggcggtgcttcatatccctctagaggagcctgttctgtaatcgataaaccccgatcaacctcaccacctcttgctcagcctatataccgccatcttcagcaaaccctgatgaaggctacaaagtaagcgcaagtacccacgtaaagacgttaggtcaaggtgtagcccatgaggtggcaagaaatgggctacattttctaccccagaaaactacgatagcccttatgaaacttaagggtcgaaggtggatttagcagtaaactgagagtagagtgcttagttgaacagggccctgaagcgcgtacacaccgcccgtcaccctcctcaagtatacttcaaaggacatttaactaaaacccctacgcatttatatagaggagacaagtcgtaacatggtaagtgtactggaaagtgcacttggacgaaccagagtgtagcttaacacaaagcacccaacttacacttaggagatttcaacttaacttgaccgctctgagctaaacctagccccaaacccactccaccttactaccagacaaccttagccaaaccatttacccaaataaagtataggcgatagaaattgaaacctggcgcaatagatatagtaccgcaagggaaagatgaaaaattataaccaagcataatatagcaaggactaacccctataccttctgcataatgaattaactagaaataactttgcaaggagagccaaagctaagacccccgaaaccagacgagctacctaagaacagctaaaagagcacacccgtctatgtagcaaaatagtgggaagatttataggtagaggcgacaaacctaccgagcctggtgatagctggttgtccaagatagaatcttagttcaactttaaatttgcccacagaaccctctaaatccccttgtaaatttaactgttagtccaaagaggaacagctctttggacactaggaaaaaaccttgtagagagagtaaaaaatttaacacccatagtaggcctaaaagcagccaccaattaagaaagcgttcaagctcaacacccactacctaaaaaatcccaaacatataactgaactcctcacacccaattggaccaatctatcaccctatagaagaactaatgttagtataagtaacatgaaaacattctcctccgcataagcctgcgtcagattaaaacactgaactgacaattaacagcccaatatctacaatcaaccaacaagtcattattaccctcactgtcaacccaacacaggcatgctcataaggaaaggttaaaaaaagtaaaaggaactcggcaaatcttaccccgcctgtttaccaaaaacatcacctctagcatcaccagtattagaggcaccgcctgcccagtgacacatgtttaacggccgcggtaccctaaccgtgcaaaggtagcataatcacttgttccttaaatagggacctgtatgaatggctccacgagggttcagctgtctcttacttttaaccagtgaaattgacctgcccgtgaagaggcgggcatgacacagcaagacgagaagaccctatggagctttaatttattaatgcaaacagtacctaacaaacccacaggtcctaaactaccaaacctgcattaaaaatttcggttggggcgacctcggagcagaacccaacctccgagcagtacatgctaagacttcaccagtcaaagcgaactactatactcaattgatccaataacttgaccaacggaacaagttaccctagggataacagcgcaatcctattctagagtccatatcaacaatagggtttacgacctcgatgttggatcaggacatcccgatggtgcagccgctattaaaggttcgtttgttcaacgattaaagtcctacgtgatctgagttcagaccggagtaatccaggtcggtttctatctacnttcaaattcctccctgtacgaaaggacaagagaaataaggcctacttcacaaagcgccttcccccgtaaatgatatcatctcaacttagtattatacccacacccacccaagaacagggtttgttaagatggcagagcccggtaatcgcataaaacttaaaactttacagtcagaggttcaattcctcttcttaacaacatacccatggccaacctcctactcctcattgtacccattctaatcgcaatggcattcctaatgcttaccgaacgaaaaattctaggctatatacaactacgcaaaggccccaacgttgtaggcccctacgggctactacaacccttcgctgacgccataaaactcttcaccaaagagcccctaaaacccgccacatctaccatcaccctctacatcaccgccccgaccttagctctcaccgtcgctcttctactatgaacccccctccccatacccaaccccctggtcaacctcaacctaggcctcctatttattctagccacctctagcctagccgtttactcaatcctctgatcagggtgagcatcaaactcaaactacgccctgatcggcgcactgcgagcagtagcccaaacaatctcatatgaagtcaccctagccatcattctactatcaacattactaataagtggctcctttaacctctccacccttatcacaacacaagaacacctctgattactcctgccatcatgacccttggccataatatgatttatctccacactagcagagaccaaccgaacccccttcgaccttgccgaaggggagtccgaactagtctcaggcttcaacatcgaatacgccgcaggccccttcgccctattcttcatagccgaatacacaaacattattataataaacaccctcaccactacaatcttcctaggaacaacatatgacgcactctcccctgaactctacacaacatattttgtcaccaagaccctacttctaacctccctgttcttatgaattcgaacagcatacccccgattccgctacgaccaactcatacacctcctatgaaaaaacttcctaccactcaccctagcattacttatatgatatgtctccatacccattacaatctccagcattccccctcaaacctaagaaatatgtctgataaaagagttactttgatagagtaaataataggagcttaaacccccttatttctaggactatgagaatcgaacccatccctgagaatccaaaattctccgtgccacctatcacaccccatcctaaagtaaggtcagctaaataagctatcgggcccataccccgaaaatgttggttatacccttcccgtactaattaatcccctggcccaacccgtcatctactctaccatctttgcaggcacactcatcacagcgctaagctcgcactgattttttacctgagtaggcctagaaataaacatgctagcttttattccagttctaaccaaaaaaataaaccctcgttccacagaagctgccatcaagtatttcctcacgcaagcaaccgcatccataatccttctaatagctatcctcttcaacaatatactctccggacaatgaaccataaccaatactaccaatcaatactcatcattaataatcataatggctatagcaataaaactaggaatagccccctttcacttctgagtcccagaagttacccaaggcacccctctgacatccggcctgcttcttctcacatgacaaaaactagcccccatctcaatcatataccaaatctctccctcactaaacgtaagccttctcctcactctctcaatcttatccatcatagcaggcagttgaggtggactaaaccaaacccagctacgcaaaatcttagcatactcctcaattacccacataggatgaataatagcagttctaccgtacaaccctaacataaccattcttaatttaactatttatattatcctaactactaccgcattcctactactcaacttaaactccagcaccacgaccctactactatctcgcacctgaaacaagctaacatgactaacacccttaattccatccaccctcctctccctaggaggcctgcccccgctaaccggctttttgcccaaatgggccattatcgaagaattcacaaaaaacaatagcctcatcatccccaccatcatagccaccatcaccctccttaacctctacttctacctacgcctaatctactccacctcaatcacactactccccatatctaacaacgtaaaaataaaatgacagtttgaacatacaaaacccaccccattcctccccacactcatcgcccttaccacgctactcctacctatctccccttttatactaataatcttatagaaatttaggttaaatacagaccaagagccttcaaagccctcagtaagttgcaatacttaatttctgtaacagctaaggactgcaaaaccccactctgcatcaactgaacgcaaatcagccactttaattaagctaagcccttactagaccaatgggacttaaacccacaaacacttagttaacagctaagcaccctaatcaactggcttcaatctacttctcccgccgccgggaaaaaaggcgggagaagccccggcaggtttgaagctgcttcttcgaatttgcaattcaatatgaaaatcacctcggagctggtaaaaagaggcctaacccctgtctttagatttacagtccaatgcttcactcagccattttacctcacccccactgatgttcgccgaccgttgactattctctacaaaccacaaagacattggaacactatacctattattcggcgcatgagctggagtcctaggcacagctctaagcctccttattcgagccgagctgggccagccaggcaaccttctaggtaacgaccacatctacaacgttatcgtcacagcccatgcatttgtaataatcttcttcatagtaatacccatcataatcggaggctttggcaactgactagttcccctaataatcggtgcccccgatatggcgtttccccgcataaacaacataagcttctgactcttacctccctctctcctactcctgctcgcatctgctatagtggaggccggagcaggaacaggttgaacagtctaccctcccttagcagggaactactcccaccctggagcctccgtagacctaaccatcttctccttacacctagcaggtgtctcctctatcttaggggccatcaatttcatcacaacaattatcaatataaaaccccctgccataacccaataccaaacgcccctcttcgtctgatccgtcctaattacagcagtcctacttctcctatctctcccagtcctagctgctggcatcactatactactaacagaccgcaacctcaacaccaccttcttcgaccccgccggaggaggagaccccattctataccaacacctattctgatttttcggtcaccctgaagtttatattcttatcctaccaggcttcggaataatctcccatattgtaacttactactccggaaaaaaagaaccatttggatacataggtatggtctgagctatgatatcaattggcttcctagggtttatcgtgtgagcacaccatatatttacagtaggaatagacgtagacacacgagcatatttcacctccgctaccataatcatcgctatccccaccggcgtcaaagtatttagctgactcgccacactccacggaagcaatatgaaatgatctgctgcagtgctctgagccctaggattcatctttcttttcaccgtaggtggcctgactggcattgtattagcaaactcatcactagacatcgtactacacgacacgtactacgttgtagctcacttccactatgtcctatcaataggagctgtatttgccatcataggaggcttcattcactgatttcccctattctcaggctacaccctagaccaaacctacgccaaaatccatttcactatcatattcatcggcgtaaatctaactttcttcccacaacactttctcggcctatccggaatgccccgacgttactcggactaccccgatgcatacaccacatgaaacatcctatcatctgtaggctcattcatttctctaacagcagtaatattaataattttcatgatttgagaagccttcgcttcgaagcgaaaagtcctaatagtagaagaaccctccataaacctggagtgactatatggatgccccccaccctaccacacattcgaagaacccgtatacataaaatctagacaaaaaaggaaggaatcgaaccccccaaagctggtttcaagccaaccccatggcctccatgactttttcaaaaaggtattagaaaaaccatttcataactttgtcaaagttaaattataggctaaatcctatatatcttaatggcacatgcagcgcaagtaggtctacaagacgctacttcccctatcatagaagagcttatcacctttcatgatcacgccctcataatcattttccttatctgcttcctagtcctgtatgcccttttcctaacactcacaacaaaactaactaatactaacatctcagacgctcaggaaatagaaaccgtctgaactatcctgcccgccatcatcctagtcctcatcgccctcccatccctacgcatcctttacataacagacgaggtcaacgatccctcccttaccatcaaatcaattggccaccaatggtactgaacctacgagtacaccgactacggcggactaatcttcaactcctacatacttcccccattattcctagaaccaggcgacctgcgactccttgacgttgacaatcgagtagtactcccgattgaagcccccattcgtataataattacatcacaagacgtcttgcactcatgagctgtccccacattaggcttaaaaacagatgcaattcccggacgtctaaaccaaaccactttcaccgctacacgaccgggggtatactacggtcaatgctctgaaatctgtggagcaaaccacagtttcatgcccatcgtcctagaattaattcccctaaaaatctttgaaatagggcccgtatttaccctatagcaccccctctagagcccactgtaaagctaacttagcattaaccttttaagttaaagattaagagaaccaacacctctttacagtgaaatgccccaactaaatactaccgtatggcccaccataattacccccatactccttacactattcctcatcacccaactaaaaatattaaacacaaactaccacctacctccctcaccaaagcccataaaaataaaaaattataacaaaccctgagaaccaaaatgaacgaaaatctgttcgcttcattcattgcccccacaatcctaggcctacccgccgcagtactgatcattctatttccccctctattgatccccacctccaaatatctcatcaacaaccgactaatcaccacccaacaatgactaatcaaactaacctcaaaacaaatgataaccatacacaacactaaaggacgaacctgatctcttatactagtatccttaatcatttttattgccacaactaacctcctcggactcctgcctcactcatttacaccaaccacccaactatctataaacctagccatggccatccccttatgagcgggcgcagtgattataggctttcgctctaagattaaaaatgccctagcccacttcttaccacaaggcacacctacaccccttatccccatactagttattatcgaaaccatcagcctactcattcaaccaatagccctggccgtacgcctaaccgctaacattactgcaggccacctactcatgcacctaattggaagcgccaccctagcaatatcaaccattaaccttccctctacacttatcatcttcacaattctaattctactgactatcctagaaatcgctgtcgccttaatccaagcctacgttttcacacttctagtaagcctctacctgcacgacaacacataatgacccaccaatcacatgcctatcatatagtaaaacccagcccatgacccctaacaggggccctctcagccctcctaatgacctccggcctagccatgtgatttcacttccactccataacgctcctcatactaggcctactaaccaacacactaaccatataccaatgatggcgcgatgtaacacgagaaagcacataccaaggccaccacacaccacctgtccaaaaaggccttcgatacgggataatcctatttattacctcagaagtttttttcttcgcaggatttttctgagccttttaccactccagcctagcccctaccccccaattaggagggcactggcccccaacaggcatcaccccgctaaatcccctagaagtcccactcctaaacacatccgtattactcgcatcaggagtatcaatcacctgagctcaccatagtctaatagaaaacaaccgaaaccaaataattcaagcactgcttattacaattttactgggtctctattttaccctcctacaagcctcagagtacttcgagtctcccttcaccatttccgacggcatctacggctcaacattttttgtagccacaggcttccacggacttcacgtcattattggctcaactttcctcactatctgcttcatccgccaactaatatttcactttacatccaaacatcactttggcttcgaagccgccgcctgatactggcattttgtagatgtggtctgactatttctgtatgtctccatctattgatgagggtcttactcttttagtataaatagtaccgttaacttccaattaactagttttgacaacattcaaaaaagagtaataaacttcgccttaattttaataatcaacaccctcctagccttactactaataattattacattttgactaccacaactcaacggctacatagaaaaatccaccccttacgagtgcggcttcgaccctatatcccccgcccgcgtccctttctccataaaattcttcttagtagctattaccttcttattatttgatctagaaattgccctccttttacccctaccatgagccctacaaacaactaacctgccactaatagttatgtcatccctcttattaatcatcatcctagccctaagtctggcctatgagtgactacaaaaaggattagactgaaccgaattggtatatagtttaaacaaaacgaatgatttcgactcattaaattatgataatcatatttaccaaatgcccctcatttacataaatattatactagcatttaccatctcacttctaggaatactagtatatcgctcacacctcatatcctccctactatgcctagaaggaataatactatcgctgttcattatagctactctcataaccctcaacacccactccctcttagccaatattgtgcctattgccatactagtctttgccgcctgcgaagcagcggtgggcctagccctactagtctcaatctccaacacatatggcctagactacgtacataacctaaacctactccaatgctaaaactaatcgtcccaacaattatattactaccactgacatgactttccaaaaaacacataatttgaatcaacacaaccacccacagcctaattattagcatcatccctctactattttttaaccaaatcaacaacaacctatttagctgttccccaaccttttcctccgaccccctaacaacccccctcctaatactaactacctgactcctacccctcacaatcatggcaagccaacgccacttatccagtgaaccactatcacgaaaaaaactctacctctctatactaatctccctacaaatctccttaattataacattcacagccacagaactaatcatattttatatcttcttcgaaaccacacttatccccaccttggctatcatcacccgatgaggcaaccagtcagaacgcctgaacgcaggcacatacttcctattctacaccctagtaggctcccttcccctactcatcgcactaatttacactcacaacaccctaggctcactaaacattctactactcactctcactgcccaagaactatcaaactcctgagccaacaacttaatatgactagcttacacaatagcttttatagtaaagatacctctttacggactccacttatgactccctaaagcccatgtcgaagcccccatcgctgggtcaatagtacttgccgcagtactcttaaaactaggcggctatggtataatacgcctcacactcattctcaaccccctgacaaaacacatagcctaccccttccttgtactatccctatgaggcataattataacaagctccatctgcctacgacaaacagacctaaaatcgctcattgcatactcttcaatcagccacatagccctcgtagtaacagccattctcatccaaaccccctgaagcttcaccggcgcagtcattctcataatcgcccacggacttacatcctcattactattctgcctagcaaactcaaactacgaacgcactcacagtcgcatcataatcctctctcaaggacttcaaactctactcccactaatagctttttgatgacttctagcaagcctcgctaacctcgccttaccccccactattaacctactgggagaactctctgtgctagtaaccacgttctcctgatcaaatatcactctcctacttacaggactcaacatactagtcacagccctatactccctctacatatttaccacaacacaatggggctcactcacccaccacattaacaacataaaaccctcattcacacgagaaaacaccctcatgttcatacacctatcccccattctcctcctatccctcaaccccgacatcattaccgggttttcctcttgtaaatatagtttaaccaaaacatcagattgtgaatctgacaacagaggcttacgaccccttatttaccgagaaagctcacaagaactgctaactcatgcccccatgtctaacaacatggctttctcaacttttaaaggataacagctatccattggtcttaggccccaaaaattttggtgcaactccaaataaaagtaataaccatgcacactactataaccaccctaaccctgacttccctaattccccccatccttaccaccctcgttaaccctaacaaaaaaaactcatacccccattatgtaaaatccattgtcgcatccacctttattatcagtctcttccccacaacaatattcatgtgcctagaccaagaagttattatctcgaactgacactgagccacaacccaaacaacccagctctccctaagcttcaaactagactacttctccataatattcatccctgtagcattgttcgttacatggtccatcatagaattctcactgtgatatataaactcagacccaaacattaatcagttcttcaaatatctactcatcttcctaattaccatactaatcttagttaccgctaacaacctattccaactgttcatcggctgagagggcgtaggaattatatccttcttgctcatcagttgatgatacgcccgagcagatgccaacacagcagccattcaagcaatcctatacaaccgtatcggcgatatcggtttcatcctcgccttagcatgatttatcctacactccaactcatgagacccacaacaaatagcccttctaaacgctaatccaagcctcaccccactactaggcctcctcctagcagcagcaggcaaatcagcccaattaggtctccacccctgactcccctcagccatagaaggccccaccccagtctcagccctactccactcaagcactatagttgtagcaggaatcttcttactcatccgcttccaccccctagcagaaaatagcccactaatccaaactctaacactatgcttaggcgctatcaccactctgttcgcagcagtctgcgcccttacacaaaatgacatcaaaaaaatcgtagccttctccacttcaagtcaactaggactcataatagttacaatcggcatcaaccaaccacacctagcattcctgcacatctgtacccacgccttcttcaaagccatactatttatgtgctccgggtccatcatccacaaccttaacaatgaacaagatattcgaaaaataggaggactactcaaaaccatgcctctcacttcaacctccctcaccattggcagcctagcattagcaggaatacctttcctcacaggtttctactccaaagaccacatcatcgaaaccgcaaacatatcatacacaaacgcctgagccctatctattactctcatcgctacctccctaacaagcgcctatagcactcgaataattcttctcaccctaacaggtcaacctcgcttccccacccttactaacattaacgaaaataaccccaccctactaaaccccattaaacgcctggcagccggaagcctattcgcaggatttctcattactaacaacatttcccccgcatcccccttccaaacaacaatccccctctacctaaaactcacagccctcgctgtcactttcctaggacttctaacagccctagacctcaactacctaaccaacaaacttaaaataaaatccccactatgcacattttatttctccaacatactcggattctaccctagcatcacacaccgcacaatcccctatctaggccttcttacgagccaaaacctgcccctactcctcctagacctaacctgactagaaaagctattacctaaaacaatttcacagcaccaaatctccacctccatcatcacctcaacccaaaaaggcataattaaactttacttcctctctttcttcttcccactcatcctaaccctactcctaatcacataacctattcccccgagcaatctcaattacaatatatacaccaacaaacaatgttcaaccagtaactactactaatcaacgcccataatcatacaaagcccccgcaccaataggatcctcccgaatcaaccctgacccctctccttcataaattattcagcttcctacactattaaagtttaccacaaccaccaccccatcatactctttcacccacagcaccaatcctacctccatcgctaaccccactaaaacactcaccaagacctcaacccctgacccccatgcctcaggatactcctcaatagccatcgctgtagtatatccaaagacaaccatcattccccctaaataaattaaaaaaactattaaacccatataacctcccccaaaattcagaataataacacacccgaccacaccgctaacaatcaatactaaacccccataaataggagaaggcttagaagaaaaccccacaaaccccattactaaacccacactcaacagaaacaaagcatacatcattattctcgcacggactacaaccacgaccaatgatatgaaaaaccatcgttgtatttcaactacaagaacaccaatgaccccaatacgcaaaattaaccccctaataaaattaattaaccactcattcatcgacctccccaccccatccaacatctccgcatgatgaaacttcggctcactccttggcgcctgcctgatcctccaaatcaccacaggactattcctagccatgcactactcaccagacgcctcaaccgccttttcatcaatcgcccacatcactcgagacgtaaattatggctgaatcatccgctaccttcacgccaatggcgcctcaatattctttatctgcctcttcctacacatcgggcgaggcctatattacggatcatttctctactcagaaacctgaaacatcggcattatcctcctgcttgcaactatagcaacagccttcataggctatgtcctcccgtgaggccaaatatcattctgaggggccacagtaattacaaacttactatccgccatcccatacattgggacagacctagttcaatgaatctgaggaggctactcagtagacagtcccaccctcacacgattctttacctttcacttcatcttgcccttcattattgcagccctagcagcactccacctcctattcttgcacgaaacgggatcaaacaaccccctaggaatcacctcccattccgacaaaatcaccttccacccttactacacaatcaaagacgccctcggcttacttctcttccttctctccttaatgacattaacactattctcaccagacctcctaggcgacccagacaattataccctagccaaccccttaaatacccctccccacatcaagcccgaatgatatttcctattcgcctacacaattctccgatccgtccctaacaaactaggaggcgtccttgccctattactatccatcctcatcctagcaataatccccatcctccatatatccaaacaacaaagcataatatttcgcccactaagccaatcactttattgactcctagccgcagacctcctcattctaacctgaatcggaggacaaccagtaagctacccttttaccatcattggacaagtagcatccgtactatacttcacaacaatcctaatcctaataccaactatctccctaattgaaaacaaaatactcaaatgggcctgtccttgtagtataaactaatacaccagtcttgtaaaccggagatgaaaacctttttccaaggacaaatcagagaaaaagtctttaactccaccattagcacccaaagctaagattctaatttaaactattctctgttctttcatggggaagcagatttgggtaccacccaagtattgactcacccatcaacaaccgctatgtatttcgtacattactgccagccaccatgaatattgtacggtaccataaatacttgaccacctgtagtacataaaaacccaatccacatcaaccccccccccccacctgcttacaagcaagtacagcaaccaaccctcaactatcacacattaactgcaactccaaagccacccctcacccactaggataccaacaaacctacccacccttaacagtacatagtacataaagccatttaccgtacatagcacattacagtcaaatccctcctcgtccccatggatgacccccctcagataggggtcccttgaccaccatcctccgtgaaatcaatatcccgcacaagagtgctactctcctcgctccgggcccataacacttgggggtagctaaagtgaactgtatccgacatctggttcctacttcagggccataaagcctaaatagcccacacgttccccttaaataagacatcacgatg

SEQ ID NO: 371 - DNA, 16562 bp, Homo sapiens mitochondrial
  3109: "n" refers to a nucleotide at position 3107 of the Cambridge Reference Sequence (CRS, Anderson et al. 1981 Nature 290:457-465), later determined to be absent from the human mtDNA sequence according to the revised CRS (rCRS, Andrews et al. 1999 Nature Genetics 23:147); "n" therefore represents a single nucleotide deletion at a position corresponding to nucleotide 3107 of SEQ ID NO:1 as provided herein.
gatcacaggtctatcaccctattaaccactcacgggagctctccatgcatttggtattttcgtctggggggtgtgcacgcgatagcattgcgagacgctggagccggagcaccctatgtcgcagtatctgtctttgattcctgcctcattctattatttatcgcacctacgttcaatattacaggcgaacatacctactaaagtgtgttaattaattaatgcttgtaggacatagtaataacaattgaatgtctgcacagccgctttccacacagacatcataacaaaaaattttcaccaaaccccccctcccccccgcttctggccgcagcacttaaacacatctctgccaaaccccaaaaacaaagaaccctaacaccagcctaaccagatttcaaattttatcttttggcggtatgcacttttaacagtcaccccccaactaacacattattttcccctcccactcccatactactaatctcatcaacacaacccccgcccatcctacccagcacacacacaccgctgctaaccccataccccgaaccaaccaaaccccaaagacaccccccacagtttatgtagcttacctcctcaaagcaatacactgaaaatgtttagacgggctcacatcaccccataaacaaataggtttggtcctagcctttctattagctcttagtaagattacacatgcaagcatccccgttccagtgagttcaccctctaaatcaccacgatcaaaagggacaagcatcaagcacgcagcaatgcagctcaaaacgcttagcctagccacacccccacgggaaacagcagtgattaacctttagcaataaacgaaagtttaactaagctatactaaccccagggttggtcaatttcgtgccagccaccgcggtcacacgattaacccaagtcaatagaagccggcgtaaagagtgttttagatcaccccctccccaataaagctaaaactcacctgagttgtaaaaaactccagttgacacaaaatagactacgaaagtggctttaacatatctgaacacacaatagctaagacccaaactgggattagataccccactatgcttagccctaaacctcaacagttaaatcaacaaaactgctcgccagaacactacgagccacagcttaaaactcaaaggacctggcggtgcttcatatccctctagaggagcctgttctgtaatcgataaaccccgatcaacctcaccacctcttgctcagcctatataccgccatcttcagcaaaccctgatgaaggctacaaagtaagcgcaagtacccacgtaaagacgttaggtcaaggtgtagcccatgaggtggcaagaaatgggctacattttctaccccagaaaactacgatagcccttatgaaacttaagggtcgaaggtggatttagcagtaaactgagagtagagtgcttagttgaacagggccctgaagcgcgtacacaccgcccgtcaccctcctcaagtatacttcaaaggacatttaactaaaacccctacgcatttatatagaggagacaagtcgtaacatggtaagtgtactggaaagtgcacttggacgaaccagagtgtagcttaacacaaagcacccaacttacacttaggagatttcaacttaacttgaccgctctgagctaaacctagccccaaacccactccaccttactaccagacaaccttagccaaaccatttacccaaataaagtataggcgatagaaattgaaacctggcgcaatagatatagtaccgcaagggaaagatgaaaaattataaccaagcataatatagcaaggactaacccctataccttctgcataatgaattaactagaaataactttgcaaggagagccaaagctaagacccccgaaaccagacgagctacctaagaacagctaaaagagcacacccgtctatgtagcaaaatagtgggaagatttataggtagaggcgacaaacctaccgagcctggtgatagctggttgtccaagatagaatcttagttcaactttaaatttgcccacagaaccctctaaatccccttgtaaatttaactgttagtccaaagaggaacagctctttggacactaggaaaaaaccttgtagagagagtaaaaaatttaacacccatagtaggcctaaaagcagccaccaattaagaaagcgttcaagctcaacacccactacctaaaaaatcccaaacatataactgaactcctcacacccaattggaccaatctatcaccctatagaagaactaatgttagtataagtaacatgaaaacattctcctccgcataagcctgcgtcagattaaaacactgaactgacaattaacagcccaatatctacaatcaaccaacaagtcattattaccctcactgtcaacccaacacaggcatgctcataaggaaaggttaaaaaaagtaaaaggaactcggcaaatcttaccccgcctgtttaccaaaaacatcacctctagcatcaccagtattagaggcaccgcctgcccagtgacacatgtttaacggccgcggtaccctaaccgtgcaaaggtagcataatcacttgttccttaaatagggacctgtatgaatggctccacgagggttcagctgtctcttacttttaaccagtgaaattgacctgcccgtgaagaggcgggcatgacacagcaagacgagaagaccctatggagctttaatttattaatgcaaacagtacctaacaaacccacaggtcctaaactaccaaacctgcattaaaaatttcggttggggcgacctcggagcagaacccaacctccgagcagtacatgctaagacttcaccagtcaaagcgaactactatactcaattgatccaataacttgaccaacggaacaagttaccctagggataacagcgcaatcctattctagagtccatatcaacaatagggtttacgacctcgatgttggatcaggacatcccgatggtgcagccgctattaaaggttcgtttgttcaacgattaaagtcctacgtgatctgagttcagaccggagtaatccaggtcggtttctatctacnttcaaattcctccctgtacgaaaggacaagagaaataaggcctacttcacaaagcgccttcccccgtaaatgatatcatctcaacttagtattatacccacacccacccaagaacagggtttgttaagatggcagagcccggtaatcgcataaaacttaaaactttacagtcagaggttcaattcctcttcttaacaacatacccatggccaacctcctactcctcattgtacccattctaatcgcaatggcattcctaatgcttaccgaacgaaaaattctaggctatatacaactacgcaaaggccccaacgttgtaggcccctacgggctactacaacccttcgctgacgccataaaactcttcaccaaagagcccctaaaacccgccacatctaccatcaccctctacatcaccgccccgaccttagctctcaccatcgctcttctactatgaacccccctccccatacccaaccccctggtcaacctcaacctaggcctcctatttattctagccacctctagcctagccgtttactcaatcctctgatcagggtgagcatcaaactcaaactacgccctgatcggcgcactgcgagcagtagcccaaacaatctcatatgaagtcaccctagccatcattctactatcaacattactaataagtggctcctttaacctctccacccttatcacaacacaagaacacctctgattactcctgccatcatgacccttggccataatatgatttatctccacactagcagagaccaaccgaacccccttcgaccttgccgaaggggagtccgaactagtctcaggcttcaacatcgaatacgccgcaggccccttcgccctattcttcatagccgaatacacaaacattattataataaacaccctcaccactacaatcttcctaggaacaacatatgacgcactctcccctgaactctacacaacatattttgtcaccaagaccctacttctaacctccctgttcttatgaattcgaacagcatacccccgattccgctacgaccaactcatacacctcctatgaaaaaacttcctaccactcaccctagcattacttatatgacatgtctccatacccattacaatctccagcattccccctcaaacctaagaaatatgtctgataaaagagttactttgatagagtaaataataggagcttaaacccccttatttctaggactatgagaatcgaacccatccctgagaatccaaaattctccgtgccacctatcacaccccatcctaaagtaaggtcagctaaataagctatcgggcccataccccgaaaatgttggttatacccttcccgtactaattaatcccctggcccaacccgtcatctactctaccatctttgcaggcacactcatcacagcgctaagctcgcactgattttttacctgagtaggcctagaaataaacatgctagcttttattccagttctaaccaaaaaaataaaccctcgttccacagaagctgccatcaagtatttcctcacgcaagcaaccgcatccataatccttctaatagctatcctcttcaacaatatactctccggacaatgaaccataaccaatactaccaatcaatactcatcattaataatcataatggctatagcaataaaactaggaatagccccctttcacttctgagtcccagaggttacccaaggcacccctctgacatccggcctgcttcttctcacatgacaaaaactagcccccatctcaatcatataccaaatctctccctcactaaacgtaagccttctcctcactctctcaatcttatccatcatagcaggcagttgaggtggattaaaccaaacccagctacgcaaaatcttagcatactcctcaattacccacataggatgaataatagcagttctaccgtacaaccctaacataaccattcttaatttaactatttatattatcctaactactaccgcattcctactactcaacttaaactccagcaccacgaccctactactatctcgcacctgaaacaagctaacatgactaacacccttaattccatccaccctcctctccctaggaggcctgcccccgctaaccggctttttgcccaaatgggccattatcgaagaattcacaaaaaacaatagcctcatcatccccaccatcatagccaccatcaccctccttaacctctacttctacctacgcctaatctactccacctcaatcacactactccccatatctaacaacgtaaaaataaaatgacagtttgaacatacaaaacccaccccattcctccccacactcatcgcccttaccacgctactcctacctatctccccttttatactaataatcttatagaaatttaggttaaatacagaccaagagccttcaaagccctcagtaagttgcaatacttaatttctgtaacagctaaggactgcaaaaccccactctgcatcaactgaacgcaaatcagccactttaattaagctaagcccttactagaccaatgggacttaaacccacaaacacttagttaacagctaagcaccctaatcaactggcttcaatctacttctcccgccgccgggaaaaaaggcgggagaagccccggcaggtttgaagctgcttcttcgaatttgcaattcaatatgaaaatcacctcggagctggtaaaaagaggcctaacccctgtctttagatttacagtccaatgcttcactcagccattttacctcacccccactgatgttcgccgaccgttgactattctctacaaaccacaaagacattggaacactatacctattattcggcgcatgagctggagtcctaggcacagctctaagcctccttattcgagccgagctgggccagccaggcaaccttctaggtaacgaccacatctacaacgttatcgtcacagcccatgcatttgtaataatcttcttcatagtaatacccatcataatcggaggctttggcaactgactagttcccctaataatcggtgcccccgatatggcgtttccccgcataaacaacataagcttctgactcttacctccctctctcctactcctgctcgcatctgctatagtggaggccggagcaggaacaggttgaacagtctaccctcccttagcagggaactactcccaccctggagcctccgtagacctaaccatcttctccttacacctagcaggtgtctcctctatcttaggggccatcaatttcatcacaacaattatcaatataaaaccccctgccataacccaataccaaacgcccctcttcgtctgatccgtcctaatcacagcagtcctacttctcctatctctcccagtcctagctgctggcatcactatactactaacagaccgcaacctcaacaccaccttcttcgaccccgccggaggaggagaccccattctataccaacacctattctgatttttcggtcaccctgaagtttatattcttatcctaccaggcttcggaataatctcccacattgtaacttactactccggaaaaaaagaaccatttggatacataggtatggtctgagctatgatatcaattggcttcctagggtttatcgtgtgagcacaccatatatttacagtaggaatagacgtagacacacgagcatatttcacctccgctaccataatcatcgctatccccaccggcgtcaaagtatttagctgactcgccacactccacggaagcaatatgaaatgatctgctgcagtgctctgagccctaggattcatctttcttttcaccgtaggtggcctgactggcattgtattagcaaactcatcactagacatcgtactacacgacacgtactacgttgtagctcacttccactatgtcctatcaataggagctgtatttgccatcataggaggcttcattcactgatttcccctattctcaggctacaccctagaccaaacctacgccaaaatccatttcactatcatattcatcggcgtaaatctaactttcttcccacaacactttctcggcctatccggaatgccccgacgttactcggactaccccgatgcatacaccacatgaaacatcctatcatctgtaggctcattcatttctctaacagcagtaatattaataattttcatgatttgagaagccttcgcttcgaagcgaaaagtcctaatagtagaagaaccctccataaacctggagtgactatatggatgccccccaccctaccacacattcgaagaacccgtatacataaaatctagacaaaaaaggaaggaatcgaaccccccaaagttggtttcaagccaaccccatggcctccatgactttttcaaaaaggtattagaaaaaccatttcataactttgtcaaagttaaattataggctaaatcctatatatcttaatggcacatgcagcgcaagtaggtctacaagacgctacttcccctatcatagaagagcttatcacctttcatgatcacgccctcataatcattttccttatctgcttcctagtcctgtatgcccttttcctaacactcacaacaaaactaactaatactaacatctcagacgctcaggaaatagaaaccgtctgaactatcctgcccgccatcatcctagtcctcatcgccctcccatccctacgcatcctttacataacagacgaggtcaacgatccctcccttaccatcaaatcaattggccaccaatggtactgaacctacgagtacaccgactacggcggactaatcttcaactcctacatacttcccccattattcctagaaccaggcgacctgcgactccttgacgttgacaatcgagtagtactcccgattgaagcccccattcgtataataattacatcacaagacgtcttgcactcatgagctgtccccacattaggcttaaaaacagatgcaattcccggacgtctaaaccaaaccactttcaccgctacacgaccgggggtatactacggtcaatgctctgaaatctgtggagcaaaccacagtttcatgcccatcgtcctagaattaattcccctaaaaatctttgaaatagggcccgtatttaccctatagcaccccctctagagcccactgtaaagctaacttagcattaaccttttaagttaaagattaagagaaccaacacctctttacagtgaaatgccccaactaaatactactgtatggcccaccataattacccccatactccttacactattcctcatcacccaactaaaaatattaaacacaaactaccacctacctccctcaccaaagcccataaaaataaaaaattataacaaaccctgagaaccaaaatgaacgaaaatctgttcgcttcattcattgcccccacaatcctaggcctacccgccgcagtactgatcattctatttccccctctattgatccccacctccaaatatctcatcaacaaccgactaatcaccacccaacaatgactaatcaaactaacctcaaaacaaatgataaccatacacaacactaaaggacgaacctgatctcttatactagtatccttaatcatttttattgccacaactaacctcctcggactcctgcctcactcatttacaccaaccacccaactatctataaacctagccatggccatccccttatgagcgggcgcagtgattataggctttcgctctaagattaaaaatgccctagcccacttcttaccacaaggcacacctacaccccttatccccatactagttattatcgaaaccatcagcctactcattcaaccaatagccctggccgtacgcctaaccgctaacattactgcaggccacctactcatgcacctaattggaagcgccaccctagcaatatcaaccattaaccttccctctacacttatcatcttcacaattctaattctactgactatcctagaaatcgctgtcgccttaatccaagcctacgttttcacacttctagtaagcctctacctgcacgacaacacataatgacccaccaatcacatgcctatcatatagtaaaacccagcccatgacccctaacaggggccctctcagccctcctaatgacctccggcctagccatgtgatttcacttccactccataacgctcctcatactaggcctactaaccaacacactaaccatataccaatgatggcgcgatgtaacacgagaaagcacataccaaggccaccacacaccacctgtccaaaaaggccttcgatacgggataatcctatttattacctcagaagtttttttcttcgcaggatttttctgagccttttaccactccagcctagcccctaccccccaattaggagggcactggcccccaacaggcatcaccccgctaaatcccctagaagtcccactcctaaacacatccgtattactcgcatcaggagtatcaatcacctgagctcaccatagtctaatagaaaacaaccgaaaccaaataattcaagcactgcttattacaattttactgggtctctattttaccctcctacaagcctcagagtacttcgagtctcccttcaccatttccgacggcatctacggctcaacattttttgtagccacaggcttccacggacttcacgtcattattggctcaactttcctcactatctgcttcatccgccaactaatatttcactttacatccaaacatcactttggcttcgaagccgccgcctgatactggcattttgtagatgtggtttgactatttctgtatgtctccatctattgatgagggtcttactcttttagtataaatagtaccgttaacttccaattaactagttttgacaacattcaaaaaagagtaataaacttcgccttaattttaataatcaacaccctcctagccttactactaataattattacattttgactaccacaactcaacggctacatagaaaaatccaccccttacgagtgcggcttcgaccctatatcccccgcccgcgtccctttctccataaaattcttcttagtagctattaccttcttattatttgatctagaaattgccctccttttacccctaccatgagccctacaaacaactaacctgccactaatagttatgtcatccctcttattaatcatcatcctagccctaagtctggcctatgagtgactacaaaaaggattagactgagccgaattggtatatagtttaaacaaaacgaatgatttcgactcattaaattatgataatcatatttaccaaatgcccctcatttacataaatattatactggcatttaccatctcacttctaggaatactagtatatcgctcacacctcatatcctccctactatgcctagaaggaataatactatcgctgttcattatagctactctcataaccctcaacacccactccctcttagccaatattgtgcctattgccatactagtctttgccgcctgcgaagcagcggtgggcctagccctactagtctcaatctccaacacatatggcctagactacgtacataacctaaacctactccaatgctaaaactaatcgtcccaacaattatattactaccactgacatgactttccaaaaaacacataatttgaatcaacacaaccacccacagcctaattattagcatcatccctctactattttttaaccaaatcaacaacaacctatttagctgttccccaaccttttcctccgaccccctaacaacccccctcctaatactaactacctgactcctacccctcacaatcatggcaagccagcgccacttatccagtgaaccactatcacgaaaaaaactctacctctctatactaatctccctacaaatctccttaattataacattcacagccacagaactaatcatattttatatcttcttcgaaaccacacttatccccaccttggctatcatcacccgatgaggcaaccagccagaacgcctgaacgcaggcacatacttcctattctacaccctagtaggctcccttcccctactcatcgcactgatttacactcacaacaccctaggctcactaaacattctactactcactctcactgcccaagaactatcaaactcctgagccaacaacttaatatgactagcttacacaatagcttttatagtaaaaatacctctttacggactccacttatgactccctaaagcccatgtcgaagcccccatcgctgggtcaatagtacttgccgcagtactcttaaaactaggcggctatggtataatacgcctcacactcattctcaaccccctgacaaaacacatagcctaccccttccttgtactatccctatgaggcataattataacaagctccatctgcctacgacaaacagacctaaaatcgctcattgcatactcttcaatcagccacatagccctcgtagtaacagccattctcatccaaaccccctgaagcttcaccggcgcagtcattctcataatcgcccacggacttacatcctcattactattctgcctagcaaactcaaactacgaacgcactcacagtcgcatcataatcctctctcaaggacttcaaactctactcccactaatagctttttgatgacttctagcaagcctcgctaacctcgccttaccccccactattaacctactgggagaactctctgtgctagtaaccacgttctcctgatcaaatatcactctcctacttacaggactcaacatactagtcacagccctatactccctctacatatttaccacaacacaatggggctcactcacccaccacattaacaacataaaaccctcattcacacgagaaaacaccctcatgttcatacacctatcccccattctcctcctatccctcaaccccgacatcattaccgggttttcctcttgtaaatatagtttaaccaaaacatcagattgtgaatctgacaacagaggcttacgaccccttatttaccgagaaagctcacaagaactgctaactcatgcccccatgtctaacaacatggctttctcaacttttaaaggataacagctatccattggtcttaggccccaaaaattttggtgcaactccaaataaaagtaataaccatgcacactactataaccaccctaaccctgacttccctaattccccccatccttaccaccctcgttaaccctaacaaaaaaaactcatacccccattatgtaaaatccattgtcgcatccacctttattatcagtctcttccccacaacaatattcatgtgcctagaccaagaagttattatctcgaactgacactgagccacaacccaaacaacccagctctccctgagcttcaaactagactacttctccataatattcatccctgtggcattgttcgttacatggtccatcatagaattctcactgtgatatataaactcagacccaaacattaatcagttcttcaaatatctactcatcttcctaattaccatactaatcttagttaccgctaacaacctattccaactgttcatcggctgagagggcgtaggaattatatccttcttgctcatcagttgatgatacgcccgagcagatgccaacacagcagccattcaagcaatcctatacaaccgtatcggcgatatcggtttcatcctcgccttagcatgatttatcctacactccaactcatgagacccacaacaaatagcccttctaaacgctaatccaagcctcaccccactactaggcctcctcctagcagcagcaggcaaatcagcccaattaggtctccacccctgactcccctcagccatagaaggccccaccccagtctcagccctactccactcaagcactatagttgtagcaggaatcttcttactcatccgcttccaccccctagcagaaaatagcccactaatccaaactctaacactatgcttaggcgctatcaccactctgttcgcagcagtctgcgcccttacacaaaatgacatcaaaaaaatcgtagccttctccacttcaagtcaactaggactcataatagttacaatcggcatcaaccaaccacacctagcattcctgcacatctgtacccacgccttcttcaaagccatactatttatgtgctccgggtccatcatccacaaccttaacaatgaacaagatattcgaaaaataggaggactactcaaaaccatacctctcacttcaacctccctcaccattggcagcctagcattagcaggaatacctttcctcacaggtttctactccaaagaccacatcatcgaaaccgcaaacatatcatacacaaacgcctgagccctatctattactctcatcgctacctccctgacaagcgcctatagcactcgaataattcttctcaccctaacaggtcaacctcgcttccccacccttactaacattaacgaaaataaccccaccctactaaaccccattaaacgcctgacagccggaagcctattcgcaggatttctcattactaacaacatttcccccgcatcccccttccaaacaacaatccccctctacctaaaactcacagccctcgctgtcactttcctaggacttctaacagccctagacctcaactacctaaccaacaaacttaaaataaaatccccactatgcacattttatttctccaacatactcggattctaccctagcatcacacaccgcacaatcccctatctaggccttcttacgagccaaaacctgcccctactcctcctagacctaacctgactagaaaagctattacctaaaacaatttcacagcaccaaatctccacctccatcatcacctcaacccaaaaaggcataattaaactttacttcctctctttcttcttcccactcatcctaaccctactcctaatcacataacctattcccccgagcaatctcaattacaatatatacaccaacaaacaatgttcaaccagtaactactactaatcaacgcccataatcatacaaagcccccgcaccaataggatcctcccgaatcaaccctgacccctctccttcataaattattcagcttcctacactattaaagtttaccacaaccaccaccccatcatactctttcacccacagcaccaatcctacctccatcgctaaccccactaaaacactcaccaagacctcaacccctgacccccatgcctcaggatactcctcaatagccatcgctgtagtatatccaaagacaaccatcattccccctaaataaattaaaaaaactattaaacccatataacctcccccaaaattcagaataataacacacccgaccacaccgctaacaatcaatactaaacccccataaataggagaaggcttagaagaaaaccccacaaaccccattactaaacccacactcaacagaaacaaagcatacatcattattctcgcacggactacaaccacgaccaatgatatgaaaaaccatcgttgtatttcaactacaagaacaccaatgaccccaatacgcaaaattaaccccctaataaaattaattaaccactcattcatcgacctccccaccccatccaacatctccgcatgatgaaacttcggctcactccttggcgcctgcctgatcctccaaatcaccacaggactattcctagccatgcactactcaccagacgcctcaaccgccttttcatcaatcgcccacatcactcgagacgtaaattatggctgaatcatccgctaccttcacgccaatggcgcctcaatattctttatctgcctcttcctacacatcgggcgaggcctatattacggatcatttctctactcagaaacctgaaacatcggcattatcctcctgcttgcaactatagcaacagccttcataggctatgtcctcccgtgaggccaaatatcattctgaggggccacagtaattacaaacttactatccgccatcccatacattgggacagacctagttcaatgaatctgaggaggctactcagtaaacagtcccaccctcacacgattctttacctttcacttcatcttgcccttcattattgcagccctagcagcactccacctcctattcttgcacgaaacgggatcaaacaaccccctaggaatcacctcccattccgataaaatcaccttccacccttactacacaatcaaagacgccctcggcttacttctcttcattctctccttaatgacattaacactattctcaccagacctcctaggcgacccagacaattataccctagccaaccccttaaacacccctccccacatcaagcccgaatgatatttcctattcgcctacacaattctccgatccgtccctaacaaactaggaggcgtccttgccctattactatccatcctcatcctagcaataatccccatcctccatatatccaagcaacaaagcataatatttcgcccactaagccaatcactttattgactcctagccgcagacctcctcattctaacctgaatcggaggacaaccagtaagctacccttttaccatcattggacaagtagcatccgtactatacttcacaacaatcctaatcctaataccaactatctccctaattgaaaacaaaatactcaaatgggcctgtccttgtagtataaactaatacaccagtcttgtaaaccggagatgaaaacctttttccaaggacaaatcagagaaaaagtctttaactccaccattagcacccaaagctaagattctaatttaaactattctctgttctttcatggggaagcagatttgggtaccacccaagtattgacttacccatcaacaaccgctatgtatttcgtacattactgccagccaccatgaatattgcacggtaccataaatacttgaccacctgtagtacataaaaacccaatccacatcaaaaccccctccccatgcttacaagcaagtacagtaatcaaccctcaactatcacacatcaactgcaactccaaagccacccctcacccactaggataccaacaaacctacccacccttaacagtacatagcacataaagccatttaccgtacatagcacattacagtcaaatcccttctcgcccccatggatgacccccctcagataggggtcccttgaccaccatcctccgtgaaatcaatatcccgcacaagagtgctactctcctcgctccgggcccataacacttgggggtagctaaagtgaactgtatccgacatctggttcctacttcagggtcataaagcctaaatagcccacacgttccccttaaataagacatcacgatg

SEQ ID NO: 372 - DNA, 16568 bp, Homo sapiens mitochondrial
  3106: "n" refers to a nucleotide at position 3107 of the Cambridge Reference Sequence (CRS, Anderson et al. 1981 Nature 290:457-465), later determined to be absent from the human mtDNA sequence according to the revised CRS (rCRS, Andrews et al. 1999 Nature Genetics 23:147); "n" therefore represents a single nucleotide deletion at a position corresponding to nucleotide 3107 of SEQ ID NO:1 as provided herein.
gatcacaggtctatcaccctattaaccactcacgggagctctccatgcatttggtattttcgtctggggggtatgcacgcgatagcattgcgagacgctggagccggagcaccctatgtcgcagtatctgtctttgattcctgcctcatcctattatttatcgcacctacgttcaatattacaggcgaacatacttactaaagtgtgttaattaattaatgcttgtaggacataataataacaattgaatgtctgcacagccgctttccacacagacatcataacaaaaaatttccaccaaaccccccctcccccgccttctggccacagcacttaaacacatctctgccaaaccccaaaaacaaagaaccctaacaccagcctaaccagatttcaaattttatcttttggcggtatgcacttttaacagtcaccccccaactaacacattatttttccctcccactcccatactactaatctcatcaatacaacccccgcccatcctacccagcacacacaccgctgctaaccccataccccgaaccaaccaaaccccaaagacaccccccacagtttatgtagcttacctcctcaaagcaatacactgaaaatgtttagacgggctcacatcaccccataaacaaataggtttggtcctagcctttctattagctcttagtaagattacacatgcaagcatccccgttccagtgagttcaccctctaaatcaccacgatcaaaagggacaagcatcaagcacgcagcaatgcagctcaaaacgcttagcctagccacacccccacgggaaacagcagtgattaacctttagcaataaacgaaagtttaactaagctatactaaccccagggttggtcaatttcgtgccagccaccgcggtcacacgattaacccaagtcaatagaagccggcgtaaagagtgttttagatcaccccctccccaataaagctaaaactcacctgagttgtaaaaaactccagttgacacaaaatagactacgaaagtggctttaacatatctgaacacacaatagctaagacccaaactgggattagataccccactatgcttagccctaaacctcaacagttaaatcaacaaaactgctcgccagaacactacgagccacagcttaaaactcaaaggacctggcggtgcttcatatccctctagaggagcctgttctgtaatcgataaaccccgatcaacctcaccacctcttgctcagcctatataccgccatcttcagcaaaccctgatgaaggctacaaagtaagcgcaagtacccacgtaaagacgttaggtcaaggtgtagcccatgaggtggcaagaaatgggctacattttctaccccagaaaactacgatagcccttatgaaacttaagggtcgaaggtggatttagcagtaaactgagagtagagtgcttagttgaacagggccctgaagcgcgtacacaccgcccgtcaccctcctcaagtatacttcaaaggacatttaactaaaacccctacgcatttatatagaggagacaagtcgtaacatggtaagtgtactggaaagtgcacttggacgaaccagagtgtagcttaacacaaagcacccaacttacacttaggagatttcaacttaacttgaccgctctgagctaaacctagccccaaacccactccaccttactaccagacaaccttagccaaaccatttacccaaataaagtataggcgatagaaattgaaacctggcgcaatagatatagtaccgcaagggaaagatgaaaaattataaccaagcataatatagcaaggactaacccctataccttctgcataatgaattaactagaaataactttgcaaggagagccaaagctaagacccccgaaaccagacgagctacctaagaacagctaaaagagcacacccgtctatgtagcaaaatagtgggaagatttataggtagaggcgacaaacctaccgagcctggtgatagctggttgtccaagatagaatcttagttcaactttaaatttgcccacagaaccctctaaatccccttgtaaatttaactgttagtccaaagaggaacagctctttggacactaggaaaaaaccttgtagagagagtaaaaaatttaacacccatagtaggcctaaaagcagccaccaattaagaaagcgttcaagctcaacacccactacctaaaaaatcccaaacatataactgaactcctcacacccaattggaccaatctatcaccctatagaagaactaatgttagtataagtaacatgaaaacattctcctccgcataagcctgcgtcagattaaaacactgaactgacaattaacagcccaatatctacaatcaaccaacaagtcattattaccctcactgtcaacccaacacaggcatgctcataaggaaaggttaaaaaaagtaaaaggaactcggcaaatcttaccccgcctgtttaccaaaaacatcacctctagcatcaccagtattagaggcaccgcctgcccagtgacacatgtttaacggccgcggtaccctaaccgtgcaaaggtagcataatcacttgttccttaaatagggacctgtatgaatggctccacgagggttcagctgtctcttacttttaaccagtgaaattgacctgcccgtgaagaggcgggcataacacagcaagacgagaagaccctatggagctttaatttattaatgcaaacagtacctaacaaacccacaggtcctaaactaccaaacctgcattaaaaatttcggttggggcgacctcggagcagaacccaacctccgagcagtacatgctaagacttcaccagtcaaagcgaactactatactcaattgatccaataacttgaccaacggaacaagttaccctagggataacagcgcaatcctattctagagtccatatcaacaatagggtttacgacctcgatgttggatcaggacatcccgatggtgcagccgctattaaaggttcgtttgttcaacgattaaagtcctacgtgatctgagttcagaccggagtaatccaggtcggtttctatctacnttcaaattcctccctgtacgaaaggacaagagaaataaggcctacttcacaaagcgccttcccccgtaaatgatatcatctcaacttagtattatacccacacccacccaagaacagggtttgttaagatggcagagcccggtaatcgcataaaacttaaaactttacagtcagaggttcaattcctcttcttaacaacatacccatggccaacctcctactcctcattgtacccattctaatcgcaatggcattcctaatgcttaccgaacgaaaaattctaggctatatacaactacgcaaaggccccaacgttgtaggcccctacgggctactacaacccttcgctgacgccataaaactcttcaccaaagagcccctaaaacccgccacatctaccatcaccctctacatcaccgccccgaccttagctctcaccatcgctcttctactatgaacccccctccccatacccaaccccctggtcaacctcaacctaggcctcctatttattctagccacctctagcctagccgtttactcaatcctctgatcagggtgagcatcaaactcaaactacgccctgatcggcgcactgcgagcagtagcccaaacaatctcatatgaagtcaccctagccatcattctactatcaacattactaataagtggctcctttaacctctccacccttatcacaacacaagaacacctctgattactcctgccatcatgacccttggccataatatgatttatctccacactagcagagaccaaccgaacccccttcgaccttgccgaaggggagtccgaactagtctcaggcttcaacatcgaatacgccgcaggccccttcgccctattcttcatagccgaatacacaaacattattataataaacaccctcaccactacaatcttcctaggaacaacatatgacgcactctcccctgaactctacacaacatattttgtcaccaagaccctacttctaacctccctgttcttatgaattcgaacagcatacccccgattccgctacgaccaactcatacacctcctatgaaaaaacttcctaccactcaccctagcattacttatatgatatgtctccatacccattacaatctccagcattccccctcaaacctaagaaatatgtctgataaaagagttactttgatagagtaaataataggagcttaaacccccttatttctaggaccatgagaatcgaacccatccctgagaatccaaaattctccgtgccacctatcacaccccatcctaaagtaaggtcagctaaataagctatcgggcccataccccgaaaatgttggttatacccttcccgtactaattaatcccctggcccaacccgtcatctactctaccatctttgcaggcacactcatcacagcgctaagctcgcactgattttttacctgagtaggcctagaaataaacatgctagcttttattccagttctaaccaaaaaaataaaccctcgttccacagaagctgccatcaagtatttcctcacgcaagcaaccgcatccataatccttctaatagctatcctcttcaacaatatactctccggacaatgaaccataaccaatactaccaatcaatactcatcattaataatcataatggctatagcaataaaactaggaatagccccctttcacttctgagtcccagaggttacccaaggcacccctctgacatccggcctgcttcttctcacatgacaaaaactagcccccatctcaatcatataccaaatctctccctcactaaacgtaagccttctcctcactctctcaatcttatccatcatagcaggcagttgaggtggattaaaccaaacccagctacgcaaaatcttagcatactcctcaattacccacataggatgaataatagcagttctaccgtacaaccctaacataaccattcttaatttaactatttatattatcctaactactaccgcattcctactactcaacttaaactccagcaccacgaccctactactatctcgcacctgaaacaagctaacatgactaacacccttaattccatccaccctcctctccctaggaggcctgcccccgctaaccggctttttgcccaaatgggccattatcgaagaattcacaaaaaacaatagcctcatcatccccaccatcatagccaccatcaccctccttaacctctacttctacctacgcctaatctactccacctcaatcacactactccccatatctaacaacgtaaaaataaaatgacagtttgaacatacaaaacccaccccattcctccccacactcatcgcccttaccacgctactcctacctatctccccttttatactaataatcttatagaaatttaggttaaatacagaccaagagccttcaaagccctcagtaagttgcaatacttaatttctgtaacagctaaggactgcaaaaccccactctgcatcaactgaacgcaaatcagccactttaattaagctaagcccttactagaccaatgggacttaaacccacaaacacttagttaacagctaagcaccctaatcaactggcttcaatctacttctcccgccgccgggaaaaaaggcgggagaagccccggcaggtttgaagctgcttcttcgaatttgcaattcaatatgaaaatcacctcggagctggtaaaaagaggcctaacccctgtctttagatttacagtccaatgcttcactcagccattttacctcacccccactgatgttcgccgaccgttgactattctctacaaaccacaaagacattggaacactatacctattattcggcgcatgagctggagtcctaggcacagctctaagcctccttattcgagccgagctgggccagccaggcaaccttctaggtaacgaccacatctacaacgttatcgtcacagcccatgcatttgtaataatcttcttcatagtaatacccatcataatcggaggctttggcaactgactagttcccctaataatcggtgcccccgatatggcgtttccccgcataaacaacataagcttctgactcttacctccctctctcctactcctgctcgcatctgctatagtggaggccggagcaggaacaggttgaacagtctaccctcccttagcagggaactactcccaccctggagcctccgtagacctaaccatcttctccttacacctagcaggtgtctcctctatcttaggggccatcaatttcatcacaacaattatcaatataaaaccccctgccataacccaataccaaacgcccctcttcgtctgatccgtcctaatcacagcagtcctacttctcctatctctcccagtcctagctgctggcatcactatactactaacagaccgcaacctcaacaccaccttcttcgaccccgccggaggaggagaccccattctataccaacacctattctgatttttcggtcaccctgaagtttatattcttatcctaccaggcttcggaataatctcccatattgtaacttactactccggaaaaaaagaaccatttggatacataggtatggtctgagctatgatatcaattggcttcctagggtttatcgtgtgagcacaccatatatttacagtaggaatagacgtagacacacgagcatatttcacctccgctaccataatcatcgctatccccaccggcgtcaaagtatttagctgactcgccacactccacggaagcaatatgaaatgatctgctgcagtgctctgagccctaggattcatctttcttttcaccgtaggtggcctgactggcattgtattagcaaactcatcactagacatcgtactacacgacacgtactacgttgtagcccacttccactatgtcctatcaataggagctgtatttgccatcataggaggcttcattcactgatttcccctattctcaggctacaccctagaccaaacctacgccaaaatccatttcactatcatattcatcggcgtaaatctaactttcttcccacaacactttctcggcctatccggaatgccccgacgttactcggactaccccgatgcatacaccacatgaaacatcctatcatctgtaggctcattcatttctctaacagcagtaatattaataattttcatgatttgagaagccttcgcttcgaagcgaaaagtcctaatagtagaagaaccctccataaacctggagtgactatatggatgccccccaccctaccacacattcgaagaacccgtatacataaaatctagacaaaaaaggaaggaatcgaaccccccaaagctggtttcaagccaaccccatggcctccatgactttttcaaaaaggtattagaaaaaccatttcataactttgtcaaagttaaattataggctaaatcctatatatcttaatggcacatgcagcgcaagtaggtctacaagacgctacttcccctatcatagaagagcttatcacctttcatgatcacgccctcataatcattttccttatctgcttcctagtcctgtatgcccttttcctaacactcacaacaaaactaactaatactaacatctcagacgctcaggaaatagaaaccgtctgaactatcctgcccgccatcatcctagtcctcatcgccctcccatccctacgcatcctttacataacagacgaggtcaacgatccctcccttaccatcaaatcaattggccaccaatggtactgaacctacgagtacaccgactacggcggactaatcttcaactcctacatacttcccccattattcctagaaccaggcgacctgcgactccttgacgttgacaatcgagtagtactcccgattgaagcccccattcgtataataattacatcacaagacgtcttgcactcatgagctgtccccacattaggcttaaaaacagatgcaattcccggacgtctaaaccaaaccactttcaccgctacacgaccgggggtatactacggtcaatgctctgaaatctgtggagcaaaccacagtttcatgcccatcgtcctagaattaattcccctaaaaatctttgaaatagggcccgtatttaccctatagcaccccctctaccccctctagagcccactgtaaagctaacttagcattaaccttttaagttaaagattaagagaaccaacacctctttacagtgaaatgccccaactaaatactaccgtatggcccaccataattacccccatactccttacactattcctcatcacccaactaaaaatattaaacacaaactaccacctacctccctcaccaaagcccataaaaataaaaaattataacaaaccctgagaaccaaaatgaacgaaaatctgttcgcttcattcattgcccccacaatcctaggcctacccgccgcagtactgatcattctatttccccctctattgatccccacctccaaatatctcatcaacaaccgactaatcaccacccaacaatgactaatcaaactaacctcaaaacaaatgataaccatacacaacactaaaggacgaacctgatctcttatactagtatccttaatcatttttattgccacaactaacctcctcggactcctgcctcactcatttacaccaaccacccaactatctataaacctagccatggccatccccttatgagcgggcgcagtgattataggctttcgctctaagattaaaaatgccctagcccacttcttaccacaaggcacacctacaccccttatccccatactagttattatcgaaaccatcagcctactcattcaaccaatagccctggccgtacgcctaaccgctaacattactgcaggccacctactcatgcacctaattggaagcgccaccctagcaatatcaaccattaaccttccctctacacttatcatcttcacaattctaattctactgactatcctagaaatcgctgtcgccttaatccaagcctacgttttcacacttctagtaagcctctacctgcacgacaacacataatgacccaccaatcacatgcctatcatatagtaaaacccagcccatgacccctaacaggggccctctcagccctcctaatgacctccggcctagccatgtgatttcacttccactccataacgctcctcatactaggcctactaaccaacacactaaccatataccaatgatggcgcgatgtaacacgagaaagcacataccaaggccaccacacaccacctgtccaaaaaggccttcgatacgggataatcctatttattacctcagaagtttttttcttcgcaggatttttctgagccttttaccactccagcctagcccctaccccccaattaggagggcactggcccccaacaggcatcaccccgctaaatcccctagaagtcccactcctaaacacatccgtattactcgcatcaggagtatcaatcacctgagctcaccatagtctaatagaaaacaaccgaaaccaaataattcaagcactgcttattacaattttactgggtctctattttaccctcctacaagcctcagagtacttcgagtctcccttcaccatttccgacggcatctacggctcaacattttttgtagccacaggcttccacggacttcacgtcattattggctcaactttcctcactatctgcttcatccgccaactaatatttcactttacatccaaacatcactttggcttcgaagccgccgcctgatactggcattttgtagatgtggtttgactatttctgtatgtctccatctattgatgagggtcttactcttttagtataaatagtaccgttaacttccaattaactagttttgacaacattcaaaaaagagtaataaacttcgccttaattttaataatcaacaccctcctagccttactactaataattattacattttgactaccacaactcaacggctacatagaaaaatccaccccttacgagtgcggcttcgaccctatatcccccgcccgcgtccctttctccataaaattcttcttagtagctattaccttcttattatttgatctagaaattgccctccttttacccctaccatgagccctacaaacaactaacctgccactaatagttatgtcatccctcttattaatcatcatcctagccctaagtctggcctatgagtgactacaaaaaggattagactgaaccgaattggtatatagtttaaacaaaacgaatgatttcgactcattaaattatgataatcatatttaccaaatgcccctcatttacataaatattatactagcatttaccatctcacttctaggaatactagtatatcgctcacacctcatatcctccctactatgcctagaaggaataatactatcgctgttcattatagctactctcataaccctcaacacccactccctcttagccaatattgtgcctattgccatactagtctttgccgcctgcgaagcagcggtgggcctagccctactagtctcaatctccaacacatatggcctagactacgtacataacctaaacctactccaatgctaaaactaatcgtcccaacaattatattactaccactgacatgactttccaaaaaacacataatttgaatcaacacaaccacccacagcctaattattagcatcatccctctactattttttaaccaaatcaacaacaacctatttagctgttccccaaccttttcctccgaccccctaacaacccccctcctaatactaactacctgactcctacccctcacaatcatggcaagccaacgccacttatccagtgaaccactatcacgaaaaaaactctacctctctatactaatctccctacaaatctccttaattataacattcacagccacagaactaatcatattttatatcttcttcgaaaccacacttatccccaccttggctatcatcacccgatgaggcaaccagccagaacgcctgaacgcaggcacatacttcctattctacaccctagtaggctcccttcccctactcatcgcactaatttacactcacaacaccctaggctcactaaacattctactactcactctcactgcccaagaactatcaaactcctgagccaacaacttaatatgactagcttacacaatagcttttatagtaaagatacctctttacggactccacttatgactccctaaagcccatgtcgaagcccccatcgctgggtcaatagtacttgccgcagtactcttaaaactaggcggctatggtataatacgcctcacactcattctcaaccccctgacaaaacacatagcctaccccttccttgtactatccctatgaggcataattataacaagctccatctgcctacgacaaacagacctaaaatcgctcattgcatactcttcaatcagccacatagccctcgtagtaacagccattctcatccaaaccccctgaagcttcaccggcgcagtcattctcataatcgcccacggacttacatcctcattactattctgcctagcaaactcaaactacgaacgcactcacagtcgcatcataatcctctctcaaggacttcaaactctactcccactaatagctttttgatgacttctagcaagcctcgctaacctcgccttaccccccactattaacctactgggagaactctctgtgctagtaaccacgttctcctgatcaaatatcactctcctacttacaggactcaacatactagtcacagccctatactccctctacatatttaccacaacacaatggggctcactcacccaccacattaacaacataaaaccctcattcacacgagaaaacaccctcatgttcatacacctatcccccattctcctcctatccctcaaccccgacatcattaccgggttttcctcttgtaaatatagtttaaccaaaacatcagattgtgaatctgacaacagaggcttacgaccccttatttaccgagaaagctcacaagaactgctaactcatgcccccatgtctaacaacatggctttctcaacttttaaaggataacagctatccattggtcttaggccccaaaaattttggtgcaactccaaataaaagtaataaccatgcacactactataaccaccctaaccctgacttccctaattccccccatccttaccaccctcgttaaccctaacaaaaaaaactcatacccccattatgtaaaatccattgtcgcatccacctttattatcagtctcttccccacaacaatattcatgtgcctagaccaagaagttattatctcgaactgacactgagccacaacccaaacaacccagctctccctaagcttcaaactagactacttctccataatattcatccctgtagcattgttcgttacatggtccatcatagaattctcactgtgatatataaactcagacccaaacattaatcagttcttcaaatatctactcatcttcctaattaccatactaatcttagttaccgctaacaacctattccaactgttcatcggctgagagggcgtaggaattatatccttcttgctcatcagttgatgatacgcccgagcagatgccaacacagcagccattcaagcaatcctatacaaccgtatcggcgatatcggtttcatcctcgccttagcatgatttatcctacactccaactcatgagacccacaacaaatagcccttctaaacgctaatccaagcctcaccccactactaggcctcctcctagcagcagcaggcaaatcagcccaattaggtctccacccctgactcccctcagccatagaaggccccaccccagtctcagccctactccactcaagcactatagttgtagcaggaatcttcttactcatccgcttccaccccctagcagaaaatagcccactaatccaaactctaacactatgcttaggcgctatcaccactctgttcgcagcagtctgcgcccttacacaaaatgacatcaaaaaaatcgtagccttctccacttcaagtcaactaggactcataatagttacaatcggcatcaaccaaccacacctagcattcctgcacatctgtacccacgccttcttcaaagccatactatttatgtgctccgggtccatcatccacaaccttaacaatgaacaagatattcgaaaaataggaggactactcaaaaccatacctctcacttcaacctccctcaccattggcagcctagcattagcaggaatacctttcctcacaggtttctactccaaagaccacatcatcgaaaccgcaaacatatcatacacaaacgcctgagccctatctattactctcatcgctacctccctgacaagcgcctatagcactcgaataattcttctcaccctaacaggtcaacctcgcttccccacccttactaacattaacgaaaataaccccaccctactaaaccccattaaacgcctggcagccggaagcctattcgcaggatttctcattactaacaacatttcccccgcatcccccttccaaacaacaatccccctctacctaaaactcacagccctcgctgtcactttcctaggacttctaacagccctagacctcaactacctaaccaacaaacttaaaataaaatccccactatgcacattttatttctccaacatactcggattctaccctagcatcacacaccgcacaatcccctatctaggccttcttacgagccaaaacctgcccctactcctcctagacctaacctgactagaaaagctattacctaaaacaatttcacagcaccaaatctccacctccatcatcacctcaacccaaaaaggcataattaaactttacttcctctctttcttcttcccactcatcctaaccctactcctaatcacataacctattcccccgagcaatctcaattacaatatatacaccaacaaacaatgttcaaccagtaactactactaatcaacgcccataatcatacaaagcccccgcaccaataggatcctcccgaatcaaccctgacccctctccttcataaattattcagcttcctacactattaaagtttaccacaaccaccaccccatcatactctttcacccacagcaccaatcctacctccatcgctaaccccactaaaacactcaccaagacctcaacccctgacccccatgcctcaggatactcctcaatagccatcgctgtagtatatccaaagacaaccatcattccccctaaataaattaaaaaaactattaaacccatataacctcccccaaaattcagaataataacacacccgaccacaccgctaacaatcaatactaaacccccataaataggagaaggcttagaagaaaaccccacaaaccccattactaaacccacactcaacagaaacaaagcatacatcattattctcgcacggactacaaccacgaccaatgatatgaaaaaccatcgttgtatttcaactacaagaacaccaatgaccccaatacgcaaaactaaccccctaataaaattaattaaccactcattcatcgacctccccaccccatccaacatctccgcatgatgaaacttcggctcactccttggcgcctgcctgatcctccaaatcaccacaggactattcctagccatgcactactcaccagacgcctcaaccgccttttcatcaatcgcccacatcactcgagacgtaaattatggctgaatcatccgctaccttcacgccaatggcgcctcaatattctttatctgcctcttcctacacatcgggcgaggcctatattacggatcatttctctactcagaaacctgaaacatcggcattatcctcctgcttgcaactatagcaacagccttcataggctatgtcctcccgtgaggccaaatatcattctgaggggccacagtaattacaaacttactatccgccatcccatacattgggacagacctagttcaatgaatctgaggaggctactcagtagacagtcccaccctcacacgattctttacctttcacttcatcttgcccttcattattgcagccctagcagcactccacctcctattcttgcacgaaacgggatcaaacaaccccctaggaatcacctcccattccgataaaatcaccttccacccttactacacaatcaaagacgccctcggcttacttctcttccttctctccttaatgacattaacactattctcaccagacctcctaggcgacccagacaattataccctagccaaccccttaaacacccctccccacatcaagcccgaatgatatttcctattcgcctacacaattctccgatccgtccctaacaaactaggaggcgtccttgccctattactatccatcctcatcctagcaataatccccatcctccatatatccaaacaacaaagcataatatttcgcccactaagccaatcactttattgactcctagccgcagacctcctcattctaacctgaatcggaggacaaccagtaagctacccttttaccatcattggacaagtagcatccgtactatacttcacaacaatcttaatcctaataccaactatctccctaattgaaaacaaaatactcaaatgggcctgtccttgtagtataaactaatacaccagtcttgtaaaccggagatgaaaacctttttccaaggacaaatcagagaaaaagtctttaactccaccattagcacccaaagctaagattctaatttaaactattctctgttctttcatggggaagcagatttgggtaccacccaagtattgactcacccatcaacaaccgctatgtatttcgtacattactgccagccaccatgaatattgtacggtaccataaatacttgaccacctgtagtacataaaaacccaatccacatcaaaaccccctccccatgcttacaagcaagtacagcaatcaaccctcaactatcacacatcaactgcaactccaaagccacccctcacccactaggataccaacaaacctacccacccttaacagcacatagtacataaagccatttaccgtacatagcacattacagtcaaatcccttctcgtccccatggatgacccccctcagataggggtcccttgaccaccatcctccgtgaaatcaatatcccgcacaagagtgctactctcctcgctccgggcccataacacttgggggtagctaaagtgaactgtatccgacatctggttcctacttcagggtcataaagcctaaatagcccacacgttccccttaaataagacatcacgatg

SEQ ID NO: 373 - DNA, 16560 bp, Homo sapiens mitochondrial
  3107: "n" refers to a nucleotide at position 3107 of the Cambridge Reference Sequence (CRS, Anderson et al. 1981 Nature 290:457-465), later determined to be absent from the human mtDNA sequence according to the revised CRS (rCRS, Andrews et al. 1999 Nature Genetics 23:147); "n" therefore represents a single nucleotide deletion at a position corresponding to nucleotide 3107 of SEQ ID NO:1 as provided herein.
gatcacaggtctatcaccctattaaccactcacgggagctctccatgcatttggtattttcgtctggggggtgtgcacgcgatagcattgcgagacgctggagccggagcaccctatgtcgcagtatctgtctttgattcctgcctcatcctattatttatcgcacctacgttcaatattacaggcgaacatacttactaaagtgtattaattaattaatgcttgtaggacataataataacaattgaatgtctgcacagccgctttccacacagacatcataacaaaaaatttccaccaaaccccccctcccccccgcttctggccacagcacttaaacacatctctgccaaaccccaaaaacaaagaaccctaacaccagcctaaccagatttcaaattttatcttttggcggtatgcacttttaacagtcaccccccaactaacacattattttcccctcccactcccatactactaatctcatcaatacaacccccacccatcctacccagcacacacaccgctgctaaccccataccccgaaccaaccaaaccccaaagacaccccccacagtttatgtagcttacctcctcaaagcaatacactgaaaatgtttagacgggctcacatcaccccataaacaaataggtttggtcctagcctttctattagctcttagtaagattacacatgcaagcatccccgttccagtgagttcaccctctaaatcaccacgatcaaaagggacaagcatcaagcacgcagcaatgcagctcaaaacgcttagcctagccacacccccacgggaaacagcagtgattagcctttagcaataaacgaaagtttaactaagctatactaaccccagggttggtcaatttcgtgccagccaccgcggtcacacgattaacccaagtcaatagaagccggcgtaaagagtgttttagatcaccccctccccaataaagctaaaactcacctgagttgtaaaaaactccagttgacacaaaatagactacgaaagtggctttaacatatctgaacacacaatagctaagacccaaactgggattagataccccactatgcttagccctaaacctcaacagttaaatcaacaaaactgctcgccagaacactacgagccacagcttaaaactcaaaggacctggcggtgcttcatatccctctagaggagcctgttctgtaatcgataaaccccgatcaacctcaccacctcttgctcagcctatataccgccatcttcagcaaaccctgatgaaggctacaaagtaagcgcaagtacccacgtaaagacgttaggtcaaggtgtagcccatgaggtggcaagaaatgggctacattttctaccccagaaaactacgatagcccttatgaaacttaagggtcgaaggtggatttagcagtaaactgagagtagagtgcttagttgaacagggccctgaagcgcgtacacaccgcccgtcaccctcctcaagtatacttcaaaggacatttaactaaaacccctacgcatttatatagaggagacaagtcgtaacatggtaagtgtactggaaagtgcacttggacgaaccagagtgtagcttaacacaaagcacccaacttacacttaggagatttcaacttaacttgaccgctctgagctaaacctagccccaaacccactccaccttactaccagacaaccttagccaaaccatttacccaaataaagtataggcgatagaaattgaaacctggcgcaatagatatagtaccgcaagggaaagatgaaaaattataaccaagcataatatagcaaggactaacccctataccttctgcataatgaattaactagaaataactttgcaaggagagccaaagctaagacccccgaaaccagacgagctacctaagaacagctaaaagagcacacccgtctatgtagcaaaatagtgggaagatttataggtagaggcgacaaacctaccgagcctggtgatagctggttgtccaagatagaatcttagttcaactttaaatttgcccacagaaccctctaaatccccttgtaaatttaactgttagtccaaagaggaacagctctttggacactaggaaaaaaccttgtagagagagtaaaaaatttaacacccatagtaggcctaaaagcagccaccaattaagaaagcgttcaagctcaacacccactacctaaaaaatcccaaacatataactgaactcctcacacccaattggaccaatctatcaccctatagaagaactaatgttagtataagtaacatgaaaacattctcctccgcataagcctgcgtcagattaaaacactgaactgacaattaacagcccaatatctacaatcaaccaacaagtcattattaccctcactgtcaacccaacacaggcatgctcataaggaaaggttaaaaaaagtaaaaggaactcggcaaatcttaccccgcctgtttaccaaaaacatcacctctagcatcaccagtattagaggcaccgcctgcccagtgacacatgtttaacggccgcggtaccctaaccgtgcaaaggtagcataatcacttgttccttaaatagggacctgtatgaatggctccacgagggttcagctgtctcttacttttaaccagtgaaattgacctgcccgtgaagaggcgggcatgacacagcaagacgagaagaccctatggagctttaatttattaatgcaaacagtacctaacaaacccacaggtcctaaactaccaaacctgcattaaaaatttcggttggggcgacctcggagcagaacccaacctccgagcagtacatgctaagacttcaccagtcaaagcgaactactatactcaattgatccaataacttgaccaacggaacaagttaccctagggataacagcgcaatcctattctagagtccatatcaacaatagggtttacgacctcgatgttggatcaggacatcccgatggtgcagccgctattaaaggttcgtttgttcaacgattaaagtcctacgtgatctgagttcagaccggagtaatccaggtcggtttctatctacnttcaaattcctccctgtacgaaaggacaagagaaataaggcctacttcacaaagcgccttcccccgtaaatgatatcatctcaacttagtattatacccacacccacccaagaacagggtttgttaagatggcagagcccggtaatcgcataaaacttaaaactttacagtcagaggttcaattcctcttcttaacaacatacccatggccaacctcctactcctcattgtacccattctaatcgcaatggcattcctaatgcttaccgaacgaaaaattctaggctatatacaactacgcaaaggccccaacgttgtaggcccctacgggctactacaacccttcgctgacgccataaaactcttcaccaaagagcccctaaaacccgccacatctaccatcaccctctacatcaccgccccgaccttagctctcaccatcgctcttctactatgaacccccctccccatacccaaccccctggtcaacctcaacctaggcctcctatttattctagccacctctagcctagccgtttactcaatcctctgatcagggtgagcatcaaactcaaactacgccctgatcggcgcactgcgagcagtagcccaaacaatctcatatgaagtcaccctagccatcattctactatcaacattactaataagtggctcctttaacctctccacccttatcacaacacaagaacacctctgattactcctgccatcatgacccttggccataatatgatttatctccacactagcagagaccaaccgaacccccttcgaccttgccgaaggggagtccgaactagtctcaggcttcaacatcgaatacgccgcaggccccttcgccctattcttcatagccgaatacacaaacattattataataaacaccctcaccactacaatcttcctaggaacaacatatgacgcactctcccctgaactctacacaacatattttgtcaccaagaccctacttctaacctccctgttcttatgaattcgaacagcatacccccgattccgctacgaccaactcatacacctcctatgaaaaaacttcctaccactcaccctagcattacttatatgatatgtctccatacccattacaatctccagcattccccctcaaacctaagaaatatgtctgataaaagagttactttgatagagtaaataataggagcttaaacccccttatttctaggactatgagaatcgaacccatccctgagaatccaaaattctccgtgccacctatcacaccccatcctaaagtaaggtcagctaaataagctatcgggcccataccccgaaaatgttggttatacccttcccgtactaattaatcccctggcccaacccgtcatctactctaccatctttgcaggcacactcatcacagcgctaagctcgcactgattttttacctgagtaggcctagaaataaacatgctagcttttattccagttctaaccaaaaaaataaaccctcgttccacagaagctgccatcaagtatttcctcacgcaagcaaccgcatccataatccttctaatagctatcctcttcaacaatatactctccggacaatgaaccataaccaatactaccaatcaatactcatcattaataatcataatggctatagcaataaaactaggaatagccccctttcacttctgagtcccagaagttacccaaggcacccctctgacatccggcctgcttcttctcacatgacaaaaactagcccccatctcaatcatataccaaatctctccctcactaaacgtaagccttctcctcactctctcaatcttatccatcatagcaggcagttgaggtggattaaaccaaacccagctacgcaaaatcttagcatactcctcaattacccacataggatgaataatagcagttctaccgtacaaccctaacataaccattcttaatttaactatttatattatcctaactactaccgcattcctactactcaacttaaactccagcaccacgaccctactactatctcgcacctgaaacaagctaacatgactaacacccttaattccatccaccctcctctccctaggaggcctgcccccgctaaccggctttttgcccaaatgggccattatcgaagaattcacaaaaaacaatagcctcatcatccccaccatcatagccaccatcaccctccttaacctctacttctacctacgcctaatctactccacctcaatcacactactccccatatctaacaacgtaaaaataaaatgacagtttgaacatacaaaacccaccccattcctccccacactcatcgcccttaccacgctactcctacctatctccccttttatactaataatcttatagaaatttaggttaaatacagaccaagagccttcaaagccctcagtaagttgcaatacttaatttctgtaacagctaaggactgcaaaaccccactctgcatcaactgaacgcaaatcagccactttaattaagctaagcccttactagaccaatgggacttaaacccacaaacacttagttaacagctaagcaccctaatcaactggcttcaatctacttctcccgccgccgggaaaaaaggcgggagaagccccggcaggtttgaagctgcttcttcgaatttgcaattcaatatgaaaatcacctcggagctggtaaaaagaggcctaacccctgtctttagatttacagtccaatgcttcactcagccattttacctcacccccactgatgttcgccgaccgttgactattctctacaaaccacaaagacattggaacactatacctattattcggcgcatgagctggagtcctaggcacagctctaagcctccttattcgagccgaactgggccagccaggcaaccttctaggtaacgaccacatctacaacgttatcgtcacagcccatgcatttgtaataatcttcttcatagtaatacccatcataatcggaggctttggcaactgactagttcccctaataatcggtgcccccgatatggcgtttccccgcataaacaacataagcttctgactcctacctccctctctcctactcctgctcgcatctgctatagtggaggccggagcaggaacaggttgaacagtctaccctcccttagcagggaactactcccaccctggagcctccgtagacctaaccatcttctccttacacctagcaggtgtctcctctatcttaggggccatcaatttcatcacaacaattatcaacataaaaccccctgccataacccaataccaaacgcccctcttcgtctgatccgtcctaatcacagcagtcctacttctcctatctctcccagtcctagctgctggcatcactatactactaacagaccgcaacctcaacaccaccttcttcgaccccgccggaggaggagaccccattctataccaacacctattctgatttttcggtcaccctgaagtttatattcttatcctaccaggcttcggaataatctcccatattgtaacttactactccggaaaaaaagaaccatttggatacataggtatggtctgagctatgatatcaattggcttcctagggtttatcgtgtgagcacaccatatatttacagtaggaatagacgtagacacacgagcatatttcacctccgctaccataatcatcgctatccccaccggcgtcaaagtatttagctgactcgccacactccacggaagcaatatgaaatgatctgctgcagtgctctgagccctaggattcatctttcttttcaccgtaggtggcctgactggcattgtattagcaaactcatcactagacatcgtactacacgacacgtactacgttgtagctcacttccactatgtcctatcaataggagctgtatttgccatcataggaggcttcattcactgatttcccctattctcaggctacaccctagaccaaacctacgccaaaatccatttcactatcatattcatcggcgtaaatctaactttcttcccacaacactttctcggcctatccggaatgccccgacgttactcggactaccccgatgcatacaccacatgaaacatcctatcatctgtaggctcattcatttctctaacagcagtaatattaataattttcatgatttgagaagccttcgcttcgaagcgaaaagtcctaatagtagaagaaccctccataaacctggagtgactatatggatgccccccaccctaccacacattcgaagaacccgtatacataaaatctagacaaaaaaggaaggaatcgaaccccccaaagctggtttcaagccaaccccatggcctccatgactttttcaaaaaggtattagaaaaaccatttcataactttgtcaaagttaaattataggctaaatcctatatatcttaatggcacatgcagcgcaagtaggtctacaagacgctacttcccctatcatagaagagcttatcacctttcatgatcacgccctcataatcattttccttatctgcttcctagtcctgtatgcccttttcctaacactcacaacaaaactaactaatactaacatctcagacgctcaggaaatagaaaccgtctgaactatcctgcccgccatcatcctagtcctcatcgccctcccatccctacgcatcctttacataacagacgaggtcaacgatccctcccttaccatcaaatcaattggccaccaatggtactgaacctacgagtacaccgactacggcggactaatcttcaactcctacatacttcccccattattcctagaaccaggcgacctgcgactccttgacgttgacaatcgagtagtactcccgattgaagcccccattcgtataataattacatcacaagacgtcttgcactcatgagctgtccccacattaggcttaaaaacagatgcaattcccggacgtctaaaccaaaccactttcaccgctacacgaccgggggtatactacggtcaatgctctgaaatctgtggagcaaaccacagtttcatgcccatcgtcctagaattaattcccctaaaaatctttgaaatagggcccgtatttaccctatagcaccccctctagagcccactgtaaagctaacttagcattaaccttttaagttaaagattaagagaaccaacacctctttacagtgaaatgccccaactaaatactaccgtatggcccaccataattacccccatactccttacactattcctcatcacccaactaaaaatattaaacacaaactaccacctacctccctcaccaaagcccataaaaataaaaaattataacaaaccctgagaaccaaaatgaacgaaaatctgttcgcttcattcattgcccccacaatcctaggcctacccgccgcagtactgatcattctatttccccctctattgatccccacctccaaatatctcatcaacaaccgactaatcaccacccaacaatgactaatcaaactaacctcaaaacaaatgataaccatacacaacactaaaggacgaacctgatctcttatactagtatccttaatcatttttattgccacaactaacctcctcggactcctgcctcactcatttacaccaaccacccaactatctataaacctagccatggccatccccttatgagcgggcgcagtgattataggctttcgctctaagattaaaaatgccctagcccacttcttaccacaaggcacacctacaccccttatccccatactagttattatcgaaaccatcagcctactcattcaaccaatagccctggccgtacgcctaaccgctaacattactgcaggccacctactcatgcacctaattggaagcgccaccctagcaatatcaaccattaaccttccctctacacttatcatcttcacaattctaattctactgactatcctagaaatcgctgtcgccttaatccaagcctacgttttcacacttctagtaagcctctacctgcacgacaacacataatgacccaccaatcacatgcctatcatatagtaaaacccagcccatgacccctaacaggggccctctcagccctcctaatgacctccggcctagccatgtgatttcacttccactccataacgctcctcatactaggcctactaaccaacacactaaccatataccaatgatggcgcgatgtaacacgagaaagcacataccaaggccaccacacaccacctgtccaaaaaggccttcgatatgggataatcctatttattacctcagaagtttttttcttcgcaggatttttctgagccttttaccactccagcctagcccctaccccccaattaggagggcactggcccccaacaggcatcaccccgctaaatcccctagaagtcccactcctaaacacatccgtattactcgcatcaggagtatcaatcacctgagctcaccatagtctaatagaaaacaaccgaaaccaaataattcaagcactgcttattacaattttactgggtctctattttaccctcctacaagcctcagagtacttcgagtctcccttcaccatttccgacggcatctacggctcaacattttttgtagccacaggcttccacggacttcacgtcattattggctcaactttcctcactatctgcttcatccgccaactaatatttcactttacatccaaacatcactttggcttcgaagccgccgcctgatactggcattttgtagatgtggtttgactatttctgtatgtctccatctattgatgagggtcttactcttttagtataaatagtaccgttaacttccaattaactagttttgacaacattcaaaaaagagtaataaacttcgccttaattttaataatcaacaccctcctagccttactactaataattattacattttgactaccacaactcaacggctacatagaaaaatccaccccttacgagtgcggcttcgaccctatatcccccgcccgcgtccctttctccataaaattcttcttagtagctattaccttcttattatttgatctagaaattgccctccttttacccctaccatgagccctacaaacaactaacctgccactaatagttatgtcatccctcttattaatcatcatcctagccctaagtctggcctatgagtgactacaaaaaggattagactgaaccgaattggtatatagtttaaacaaaacgaatgatttcgactcattaaattatgataatcatatttaccaaatgcccctcatttacataaatattatactagcatttaccatctcacttctaggaatactagtatatcgctcacacctcatatcctccctactatgcctagaaggaataatactatcgctgttcattatagctactctcataaccctcaacacccactccctcttagccaatattgtgcctattgccatactagtctttgccgcctgcgaagcagcggtgggcctagccctactagtctcaatctccaacacatatggcctagactacgtacataacctaaacctactccaatgctaaaactaatcgtcccaacaattatattactaccactgacatgactttccaaaaaacacataatttgaatcaacacaaccacccacagcctaattattagcatcatccctctactattttttaaccaaatcaacaacaacctatttagctgttccccaaccttttcctccgaccccctaacaacccccctcctaatactaactacctgactcctacccctcacaatcatggcaagccaacgccacttatccagtgaaccactatcacgaaaaaaactctacctctctatactaatctccctacaaatctccttaattataacattcacagccacagaactaatcatattttatatcttcttcgaaaccacacttatccccaccttggctatcatcacccgatgaggcaaccagccagaacgcctgaacgcaggcacatacttcctattctacaccctagtaggctcccttcccctactcatcgcactaatttacactcacaacaccctaggctcactaaacattctactactcactctcactgcccaagaactatcaaactcctgagccaacaacttaatatgactagcttacacaatagcttttatagtaaagatacctctttacggactccacttatgactccctaaagcccatgtcgaagcccccatcgctgggtcaatagtacttgccgcagtactcttaaaactaggcggctatggtataatacgcctcacactcattctcaaccccctgacaaaacacatagcctaccccttccttgtactatccctatgaggcataattataacaagctccatctgcctacgacaaacagacctaaaatcgctcattgcatactcttcaatcagccacatagccctcgtagtaacagccattctcatccaaaccccctgaagcttcaccggcgcagtcattctcataatcgcccacggacttacatcctcattactattctgcctagcaaactcaaactacgaacgcactcacagtcgcatcataatcctctctcaaggacttcaaactctactcccactaatagctttttgatgacttctagcaagcctcgctaacctcgccttaccccccactattaacctactgggagaactctctgtgctagtaaccacgttctcctgatcaaatatcactctcctacttacaggactcaacatactagtcacagccctatactccctctacatatttaccacaacacaatggggctcactcacccaccacattaacaacataaaaccctcattcacacgagaaaacaccctcatgttcatacacctatcccccattctcctcctatccctcaaccccgacatcattaccgggttttcctcttgtaaatatagtttaaccaaaacatcagattgtgaatctgacaacagaggcttacgaccccttatttaccgagaaagctcacaagaactgctaactcatgcccccatgtctaacaacatggctttctcaacttttaaaggataacagctatccattggtcttaggccccaaaaattttggtgcaactccaaataaaagtaataaccatgcacactactataaccaccctaaccctgacttccctaattccccccatccttaccaccctcgttaaccctaacaaaaaaaactcatacccccattatgtaaaatccattgtcgcatccacctttattatcagtctcttccccacaacaatattcatgtgcctagaccaagaagttattatctcgaactgacactgagccacaacccaaacaacccagctctccctaagcttcaaactagactacttctccataatattcatccctgtagcattgttcgttacatggtccatcatagaattctcactgtgatatataaactcagacccaaacattaatcagttcttcaaatatctactcatcttcctaattaccatactaatcttagttaccgctaacaacctattccaactgttcatcggctgagagggcgtaggaattatatccttcttgctcatcagttgatgatacgcccgagcagatgccaacacagcagccattcaagcaatcctatacaaccgtatcggcgatatcggtttcatcctcgccttagcatgatttatcctacactccaactcatgagacccacaacaaatagcccttctaaacgctaatccaagcctcaccccactactaggcctcctcctagcagcagcaggcaaatcagcccaattaggtctccacccctgactcccctcagccatagaaggccccaccccagtctcagccctactccactcaagcactatagttgtagcaggaatcttcttactcatccgcttccaccccctagcagaaaatagcccactaatccaaactctaacactatgcttaggcgctatcaccactctgttcgcagcagtctgcgcccttacacaaaatgacatcaaaaaaatcgtagccttctccacttcaagtcaactaggactcataatagttacaatcggcatcaaccaaccacacctagcattcctgcacatctgtacccacgccttcttcaaagccatactatttatgtgctccgggtccatcatccacaaccttaacaatgaacaagatattcgaaaaataggaggactactcaaaaccatacctctcacttcaacctccctcaccattggcagcctagcattagcaggaatacctttcctcacaggtttctactccaaagaccacatcatcgaaaccgcaaacatatcatacacaaacgcctgagccctatctattactctcatcgctacctccctaacaagcgcctatagcactcgaataattcttctcaccctaacaggtcaacctcgcttccccacccttactaacattaacgaaaataaccccaccctactaaaccccattaaacgcctggcagccggaagcctattcgcaggatttctcattactaacaacatttcccccgcatcccccttccaaacaacaatccccctctacctaaaactcacagccctcgctgtcactttcctaggacttctaacagccctagacctcaactacctaaccaacaaacttaaaataaaatccccactatgcacattttatttctccaacatactcggattctaccctagcatcacacaccgcacaatcccctatctaggccttcttacgagccaaaacctgcccctactcctcctagacctaacctgactagaaaagctattacctaaaacaatttcacagcaccaaatctccacctccatcatcacctcaacccaaaaaggcataattaaactttacttcctctctttcttcttcccactcatcctaaccctactcctaatcacataacctattcccccgagcaatctcaattacaatatatacaccaacaaacaatgttcaaccagtaactactactaatcaacgcccataatcatacaaagcccccgcaccaataggatcctcccgaatcaaccctgacccctctccttcataaattattcagcttcctacactattaaagtttaccacaaccaccaccccatcatactctttcacccacagcaccaatcctacctccatcgctaaccccactaaaacactcaccaagacctcaacccctgacccccatgcctcaggatactcctcaatagccatcgctgtagtatatccaaagacaaccatcattccccctaaataaattaaaaaaactattaaacccatataacctcccccaaaattcagaataataacacacccgaccacaccgctaacaatcaatactaaacccccataaataggagaaggcttagaagaaaaccccacaaaccccattactaaacccacactcaacagaaacaaagcatacatcattattctcgcacggactacaaccacgaccaatgatatgaaaaaccatcgttgtatttcaactacaagaacaccaatgaccccaatacgcaaaattaaccccctaataaaattaattaaccactcattcatcgacctccccaccccatccaacatctccgcatgatgaaacttcggctcactccttggcgcctgcctgatcctccaaatcaccacaggactattcctagccatgcactactcaccagacgcctcaaccgccttttcatcaatcgcccacatcactcgagacgtaaattatggctgaatcatccgctaccttcacgccaatggcgcctcaatattctttatctgcctcttcctacacatcgggcgaggcctatattacggatcatttctctactcagaaacctgaaacatcggcattatcctcctgcttgcaactatagcaacagccttcataggctatgtcctcccgtgaggccaaatatcattctgaggggccacagtaattacaaacttactatccgccatcccatacattgggacagacctagttcaatgaatctgaggaggctactcagtagacagtcccaccctcacacgattctttacctttcacttcatcttgcccttcattattgcagccctagcagcactccacctcctattcttgcacgaaacgggatcaaacaaccccctaggaatcacctcccattccgataaaatcaccttccacccttactacacaatcaaagacgccctcggcttacttctcttccttctctccttaatgacattaacactattctcaccagacctcctaggcgacccagacaattataccctagccaaccccttaaatacccctccccacatcaagcccgaatgatatttcctattcgcctacacaattctccgatccgtccctaacaaactaggaggcgtccttgccctattactatccatcctcatcctagcaataatccccatcctccatatatccaaacaacaaagcataatatttcgcccactaagccaatcactttattgactcctagccgcagacctcctcattctaacctgaatcggaggacaaccagtaagctacccttttaccatcattggacaagtagcatccgtactatacttcacaacaatcctaatcctaataccaactatctccctaattgaaaacaaaatactcaaatgggcctgtccttgtagtataaactaatacaccagtcttgtaaaccggagatgaaaacctttttccaaggacaaatcagagaaaaagtctttaactccaccattagcacccaaagctaagattctaatttaaactattctctgttctttcatggggaagcagatttgggtaccacccaagtattgactcacccatcaacaaccgctatgtatttcgtacattactgccagccaccatgaatattgtacggtaccacaaatacttgaccacctgtagtacataaaaacccaatccacatcaaccccccccccccatgcttacaagcaagtacagcaatcaaccctcaactatcacacatcaactgcaactccaaagccacccctcacccactaggataccaacaaacctacccacccttaacagtacatagtacataaagccatttaccgtacatagcacattacagtcaaatcccttctcgtccccatggatgacccccctcagataggggtcccttgaccaccatcctccgtgaaatcaatatcccgcacaagagtgctactctcctcgctccgggcccataacacttgggggtagctaaagtgaactgtatccgacatctggttcctacttcagggccataaagcctaaatagcccacacgttccccttaaataagacatcacgatg

SEQ ID NO: 374 - DNA, 16571 bp, Homo sapiens mitochondrial
  3109: "n" refers to a nucleotide at position 3107 of the Cambridge Reference Sequence (CRS, Anderson et al. 1981 Nature 290:457-465), later determined to be absent from the human mtDNA sequence according to the revised CRS (rCRS, Andrews et al. 1999 Nature Genetics 23:147); "n" therefore represents a single nucleotide deletion at a position corresponding to nucleotide 3107 of SEQ ID NO:1 as provided herein.
gatcacaggtctatcaccctattaaccactcacgggagctctccatgcatttggcgttttcgtttggggggtgtgcacgcgatagcattgcgagacgctggagccggagcaccctatgtcgcagtatctgtctttgattcctgcctcatcctattatttatcgcacctacgttcaatattacaggcgaacatacttactaaagtgtgttaattaattaatgcttgtaggacataataataacaattgaatgtctgcacagccgctttccacacagacatcataacaaaaaatttccaccaaaccccccctcccccccgcttctggccacagcacttaaacacatctctgccaaaccccaaaaacaaagaaccctaacaccagcctaaccagatttcaaattttatcttttggcggtatgcacttttaacagtcaccccccaactaacacattattttcccctcccactcccatactactaatctcatcaacacaacccccgcccatcctacccagcacacacacaccgctgctaaccccataccccgaaccaaccaaaccccaaagacaccccccacagtttatgtagcttacctcctcaaagcaatacactgaaaatgtttagacgggctcacatcaccccataaacaaataggtttggtcctagcctttctattagctcttagtaagattacacatgcaagcatccccgttccagtgagttcaccctctaaatcaccacgatcaaaagggacaagcatcaagcacgcagcaatgcagctcaaaacgcttagcctagccacacccccacgggaaacagcagtgattaacctttagcaataaacgaaagtttaactaagctatactaaccccagggttggtcaatttcgtgccagccaccgcggtcacacgattaacccaagtcaatagaagccggcgtaaagagtgttttagatcaccccctccccaataaagctaaaactcacctgagttgtaaaaaactccagttgacacaaaatagactacgaaagtggctttaacatatctgaacacacaatagctaagacccaaactgggattagataccccactatgcttagccctaaacctcaacagttaaatcaacaaaactgctcgccagaacactacgagccacagcttaaaactcaaaggacctggcggtgcttcatatccctctagaggagcctgttctgtaatcgataaaccccgatcaacctcaccacctcttgctcagcctatataccgccatcttcagcaaaccctgatgaaggctacaaagtaagcgcaagtacccacgtaaagacgttaggtcaaggtgtagcccatgaggtggcaagaaatgggctacattttctaccccagaaaactacgatagcccttatgaaacttaagggtcgaaggtggatttagcagtaaactgagagtagagtgcttagttgaacagggccctgaagcgcgtacacaccgcccgtcaccctcctcaagtatacttcaaaggacatttaactaaaacccctacgcatttatatagaggagacaagtcgtaacatggtaagtgtactggaaagtgcacttggacgaaccagagtgtagcttaacacaaagcacccaacttacacttaggagatttcaacttaacttgaccgctctgagctaaacctagccccaaacccactccaccttactaccagacaaccttagccaaaccatttacccaaataaagtataggcgatagaaattgaaacctggcgcaatagatatagtaccgcaagggaaagatgaaaaattataaccaagcataatatagcaaggactaacccctataccttctgcataatgaattaactagaaataactttgcaaggagagccaaagctaagacccccgaaaccagacgagctacctaagaacagctaaaagagcacacccgtctatgtagcaaaatagtgggaagatttataggtagaggcgacaaacctaccgagcctggtgatagctggttgtccaagatagaatcttagttcaactttaaatttgcccacagaaccctctaaatccccttgtaaatttaattgttagtccaaagaggaacagctctttggacactaggaaaaaaccttgtagagagagtaaaaaatttaacacccatagtaggcctaaaagcagccaccaattaagaaagcgttcaagctcaacacccactacctaaaaaatcccaaacatataactgaactcctcacacccaattggaccaatctatcaccctatagaagaactaatgttagtataagtaacatgaaaacattctcctccgcataagcctgcgtcagattaaaacactgaactgacaattaacagcccaatatctacaatcaaccaacaagtcattattaccctcactgtcaacccaacacaggcatgctcataaggaaaggttaaaaaaagtaaaaggaactcggcaaatcttaccccgcctgtttaccaaaaacatcacctctagcatcaccagtattagaggcaccgcctgcccagtgacacatgtttaacggccgcggtaccctaaccgtgcaaaggtagcataatcacttgttccttaaatagggacctgtatgaatggctccacgagggttcagctgtctcttacttttaaccagtgaaattgacctgcccgtgaagaggcgggcatgacacagcaagacgagaagaccctatggagctttaatttattaatgcaaacagtacctaacaaacccacaggtcctaaactaccaaacctgcattaaaaatttcggttggggcgacctcggagcagaacccaacctccgagcagtacatgctaagacttcaccagtcaaagcgaactactatactcaattgatccaataacttgaccaacggaacaagttaccctagggataacagcgcaatcctattctagagtccatatcaacaatagggtttacgacctcgatgttggatcaggacatcccaatggtgcagccgctattaaaggttcgtttgttcaacgattaaagtcctacgtgatctgagttcagaccggagtaatccaggtcggtttctatctacnttcaaattcctccctgtacgaaaggacaagagaaataaggcctacttcacaaagcgccttcccccgtaaatgatatcatctcaacttagtattatacccacacccacccaagaacagggtttgttaagatggcagagcccggtaatcgcataaaacttaaaactttacagtcagaggttcaattcctcttcttaacaacatacccatggccaacctcctactcctcattgtacccattctaatcgcaatggcattcctaatgcttaccgaacgaaaaattctaggctatatacaactacgcaaaggccccaacgttgtaggcccctacgggctactacaacccttcgctgacgccataaaactcttcaccaaagagcccctaaaacccgccacatctaccatcaccctctacatcaccgccccgaccttagctctcaccatcgctcttctactatgaacccccctccccatacccaaccccctggtcaacctcaacctaggcctcctatttattctagccacctctagcctagccgtttactcaatcctctgatcagggtgagcatcaaactcaaactacgccctgatcggcgcactgcgagcagtagcccaaacaatctcatatgaagtcaccctagccatcattctactatcaacattactaataagtggctcctttaacctctccacccttatcacaacacaagaacacctctgattactcctgccatcatgacccttggccataatatgatttatctccacactagcagagaccaaccgaacccccttcgaccttgccgaaggggagtccgaactagtctcaggcttcaacatcgaatacgccgcaggccccttcgccctattcttcatagccgaatacacaaacattattataataaacaccctcaccactacaatcttcctaggaacaacatatgacgcactctcccctgaactctacacaacatattttgtcaccaagaccctacttctaacctccctgttcttatgaattcgaacagcatacccccgattccgctacgaccaactcatacacctcctatgaaaaaacttcctaccactcaccctagcattacttatatgatatgtctccatacccattacaatctccagcattccccctcaaacctaagaaatatgtctgataaaagagttactttgatagagtaaataataggagcttaaacccccttatttctaggactatgagaatcgaacccatccctgagaatccaaaattctccgtgccacctatcacaccccatcctaaagtaaggtcagctaaataagctatcgggcccataccccgaaaatgttggttatacccttcccgtactaattaatcccctggcccaacccgtcatctactctaccatctttgcaggcacactcatcacagcgctaagctcgcactgattttttacctgagtaggcctagaaataaacatgctagcttttattccagttctaaccaaaaaaataaaccctcgttccacagaagctgccatcaagtatttcctcacgcaagcaaccgcatccataatccttctaatagctatcctcttcaacaatatactctccggacaatgaaccataaccaatactaccaatcaatactcatcattaataatcataatggctatagcaataaaactaggaatagccccctttcacttctgagtcccagaggttacccaaggcacccctctgacatccggcctgcttcttctcacatgacaaaaactagcccctatctcaatcatataccaaatctctccctcactaaacgtaagccttctcctcactctctcaatcttatccatcatagcaggcagttgaggtggattaaaccaaacccagctacgcaaaatcttagcatactcctcaattacccacataggatgaataatagcagttctaccgtacaaccctaacataaccattcttaatttaactatttatattatcctaactactaccgcattcctactactcaacttaaactccagcaccacgaccctactactatctcgcacctgaaacaagataacatgactaacacccttaattccatccaccctcctctccctaggaggcctgcccccgctaaccggctttttgcccaaatgggccattatcgaagaattcacaaaaaacaatagcctcatcatccccaccatcatagccaccatcaccctccttaacctctacttctacctacgcctaatctactccacctcaatcacactactccccatatctaacaacgtaaaaataaaatgacagtttgaacatacaaaacccaccccattcctccccacactcatcgcccttaccacgctactcctacctatctccccttttatactaataatcttatagaaatttaggttaaatacagaccaagagccttcaaagccctcagtaagttgcaatacttaatttctgtaacagctaaggactgcaaaaccccactctgcatcaactgaacgcaaatcagccactttaattaagctaagcccttactagaccaatgggacttaaacccacaaacacttagttaacagctaagcaccctaatcaactggcttcaatctacttctcccgccgccgggaaaaaaggcgggagaagccccggcaggtttgaagctgcttcttcgaatttgcaattcaatatgaaaatcacctcggagctggtaaaaagaggcctaacccctgtctttagatttacagtccaatgcttcactcagccattttacctcacccccactgatgttcgccgaccgttgactattctctacaaaccacaaagacattggaacactatacctattattcggcgcatgagctggagtcctaggcacagctctaagcctccttattcgagccgagctgggccagccaggcaaccttctaggtaacgaccacatctacaacgttatcgtcacagcccatgcatttgtaataatcttcttcatagtaatacccatcataatcggaggctttggcaactgactagttcccctaataatcggtgcccccgatatggcgtttccccgcataaacaacataagcttctgactcttacctccctctctcctactcctgctcgcatctgctatagtggaggccggagcaggaacaggttgaacagtctaccctcccttagcagggaactactcccaccctggagcctccgtagacctaaccatcttctccttacacctagcaggtgtctcctctatcttaggggccatcaatttcatcacaacaattatcaatataaaaccccctgccataacccaataccaaacgcccctcttcgtctgatccgtcctaatcacagcagtcctacttctcctatctctcccagtcctagctgctggcatcactatactactaacagaccgcaacctcaacaccaccttcttcgaccccgccggaggaggagaccccattctataccaacacctattctgatttttcggtcaccctgaagtttatattcttatcctaccaggcttcggaataatctcccatattgtaacttactactccggaaaaaaagaaccatttggatacataggtatggtctgagctatgatatcaattggcttcctagggtttatcgtgtgagcacaccatatatttacagtaggaatagacgtagacacacgagcatatttcacctccgctaccataatcatcgctatccccaccggcgtcaaagtatttagctgactcgccacactccacggaagcaatatgaaatgatctgctgcagtgctctgagccctaggattcatctttcttttcaccgtaggtggcctgactggcattgtattagcaaactcatcactagacatcgtactacacgacacgtactacgttgtagctcacttccactatgtcctatcaataggagctgtatttgccatcataggaggcttcattcactgatttcccctattctcaggctacaccctagaccaaacctacgccaaaatccatttcactatcatattcatcggcgtaaatctaactttcttcccacaacactttctcggcctatccggaatgccccgacgttactcggactaccccgatgcatacaccacatgaaacatcctatcatctgtaggctcattcatttctctaacagcagtaatattaataattttcatgatttgagaagccttcgcttcgaagcgaaaagtcctaatagtagaagaaccctccataaacctggagtgactatatggatgccccccaccctaccacacattcgaagaacccgtatacataaaatctagacaaaaaaggaaggaatcgaaccccccaaagctggtttcaagccaaccccatggcctccatgactttttcaaaaaggtattagaaaaaccatttcataactttgtcaaagttaaattataggctaaatcctatatatcttaatggcacatgcagcgcaagtaggtctacaagacgctacttcccctatcatagaagagcttatcacctttcatgatcacgccctcataatcattttccttatctgcttcctagtcctgtatgcccttttcctaacactcacaacaaaactaactaatactaacatctcagacgctcaggaaatagaaaccgtctgaactatcctgcccgccatcatcctagtcctcatcgccctcccatccctacgcatcctttacataacagacgaggtcaacgatccctcccttaccatcaaatcaattggccaccaatggtactgaacctacgagtacaccgactacggcggactaatcttcaactcctacatacttcccccattattcctagaaccaggcgacctgcgactccttgacgttgacaatcgagtagtactcccgattgaagcccccattcgtataataattacatcacaagacgtcttgcactcatgagctgtccccacattaggcttaaaaacagatgcaattcccggacgtctaaaccaaaccactttcaccgctacacgaccgggggtatactacggtcaatgctctgaaatctgtggagcaaaccacagtttcatgcccatcgtcctagaattaattcccctaaaaatctttgaaatagggcccgtatttaccctatagcaccccctctaccccctctagagcccactgtaaagctaacttagcattaaccttttaagttaaagattaagagaaccaacacctctttacagtgaaatgccccaactaaatactaccgtatggcccaccataattacccccatattccttacactattcctcatcacccaactaaaaatattaaacacaaactaccacctacctccctcaccaaagcccataaaaataaaaaattataacaaaccctgagaaccaaaatgaacgaaaatctgttcgcttcattcattgcccccacaatcctaggcctacccgccgcagtactgatcattctatttccccctctattgatccccacctccaaatatctcatcaacaaccgactaatcaccacccaacaatgactaatcaaactaacctcaaaacaaatgatagccatacacaacactaaaggacgaacctgatctcttatactagtatccttaatcatttttattgccacaactaacctcctcggactcctgcctcactcatttacaccaaccacccaactatctataaacctagccatggccatccccttatgagcgggcgcagtgattataggctttcgctctaagattaaaaatgccctagcccacttcttaccacaaggcacacctacaccccttatccccatactagttattatcgaaaccatcagcctactcattcaaccaatagccctggccgtacgcctaaccgctaacattactgcaggccacctactcatgcacctaattggaagcgccaccctagcaatatcaaccattaaccttccctctacacttatcatcttcacaattctaattctactgactatcctagaaatcgctgtcgccttaatccaagcctacgttttcacacttctagtaagcctctacctgcacgacaacacataatgacccaccaatcacatgcctatcatatagtaaaacccagcccatgacccctaacaggggccctctcagccctcctaatgacctccggcctagccatgtgatttcacttccactccataacgctcctcatactaggcctactaaccaacacactaaccatataccaatgatggcgcgatgtaacacgagaaagcacataccaaggccaccacacaccacctgtccaaaaaggccttcgatacgggataatcctatttattacctcagaagtttttttcttcgcaggatttttctgagccttttaccactccagcctagcccctaccccccaactaggagggcactggcccccaacaggcatcaccccgctaaatcccctagaagtcccactcctaaacacatccgtattactcgcatcaggagtatcaatcacctgagctcaccatagtctaatagaaaacaaccgaaaccaaataattcaagcactgcttattacaattttactgggtctctattttaccctcctacaagcctcagagtacttcgagtctcccttcaccatttccgacggcatctacggctcaacattttttgtagccacaggcttccacggacttcacgtcattattggctcaactttcctcactatctgcttcatccgccaactaatatttcactttacatccaaacatcactttggcttcgaagccgccgcctgatactggcattttgtagatgtggtttgactatttctgtatgtctccatctattgatgagggtcttactcttttagtataaatagtaccgttaacttccaattaactagttttgacaacattcaaaaaagagtaataaacttcgccttaattttaataatcaacaccctcctagccttactactaataattattacattttgactaccacaactcaacggctacatagaaaaatccaccccttacgagtgcggcttcgaccctatatcccccgcccgcgtccctttctccataaaattcttcttagtagctattaccttcttattatttgatctagaaattgccctccttttacccctaccatgagccctacaaacaactaacctgccactaatagttatgtcatccctcttattaatcatcatcctagccctaagtctggcctatgagtgactacaaaaaggattagactgagctgaattggtatatagtttaaacaaaacgaatgatttcgactcattaaattatgataatcatatttaccaaatgcccctcatttacataaatattatactagcatttaccatctcacttctaggaatactagtatatcgctcacacctcatatcctccctactatgcctagaaggaataatactatcgctgttcattatagctactctcataaccctcaacacccactccctcttagccaatattgtgcctattgccatactagtctttgccgcctgcgaagcagcggtgggcctagccctactagtctcaatctccaacacatatggcctagactacgtacataacctaaacctactccaatgctaaaactaatcgtcccaacaattatattactaccactgacatgactttccaaaaaacacataatttgaatcaacacaaccacccacagcctaattattagcatcatccccctactattttttaaccaaatcaacaacaacctatttagctgttccccaaccttttcctccgaccccctaacaacccccctcctaatactaactacctgactcctacccctcacaatcatggcaagccaacgccacttatccagtgaaccactatcacgaaaaaaactctacctctctatactaatctccctacaaatctccttaattataacattcacagccacagaactaatcatattttatatcttcttcgaaaccacacttatccccaccttggctatcatcacccgatgaggcaaccagccagaacgcctgaacgcaggcacatacttcctattctacaccctagtaggctcccttcccctactcatcgcactaatttacactcacaacaccctaggctcactaaacattctactactcactctcactgcccaagaactatcaaactcctgagccaacaacttaatatgactagcttacacaatagcttttatagtaaagatacctctttacggactccacttatgactccctaaagcccatgtcgaagcccccatcgctgggtcaatagtacttgccgcagtactcttaaaactaggcggctatggtataatacgcctcacactcattctcaaccccctgacaaaacacatagcctaccccttccttgtactatccctatgaggcataattataacaagctccatctgcctacgacaaacagacctaaaatcgctcattgcatactcttcaatcagccacatagccctcgtagtaacagccattctcatccaaaccccctgaagcttcaccggcgcagtcattctcataatcgcccacggacttacatcctcattactattctgcctagcaaactcaaactacgaacgcactcacagtcgcatcataatcctctctcaaggacttcaaactctactcccactaatagctttttgatgacttctagcaagcctcgctaacctcgccttaccccccactattaacctactgggagaactctctgtgctagtaaccacgttctcctgatcaaatatcactctcctacttacaggactcaacatactagtcacagccctatactccctctacatatttaccacaacacaatggggctcactcacccaccacattaacaacataaaaccctcattcacacgagaaaacaccctcatgttcatacacctatcccccattctcctcctatccctcaaccccgacatcattaccgggttttcctcttgtaaatatagtttaaccaaaacatcagattgtgaatctgacaacagaggcttacgaccccttatttaccgagaaagctcacaagaactgctaactcatgcccccatgtctaacaacatggctttctcaacttttaaaggataacagctatccattggtcttaggccccaaaaattttggtgcaactccaaataaaagtaataaccatgcacactactataaccaccctaaccctgacttccctaattccccccatccttaccaccctcgttaaccctaacaaaaaaaactcatacccccattatgtaaaatccattgtcgcatccacctttattatcagtctcttccccacaacaatattcatgtgcctagaccaagaagttattatctcgaactgacactgagccacaacccaaacaacccagctctccctaagcttcaaactagactacttctccataatattcatccctgtagcattgttcgttacatggtccatcatagaattctcactgtgatatataaactcagacccaaacattaatcagttcttcaaatatctactcattttcctaattaccatactaatcttagttaccgctaacaacctattccaactgttcatcggctgagagggcgtaggaattatatccttcttgctcatcagttgatgatacgcccgagcagatgccaacacagcagccattcaagcaatcctatacaaccgtatcggcgatatcggtttcatcctcgccttagcatgatttatcctacactccaactcatgagacccacaacaaatagcccttctaaacgctaatccaagcctcaccccactactaggcctcctcctagcagcagcaggcaaatcagcccaattaggtctccacccctgactcccctcagccatagaaggccccaccccagtctcagccctactccactcaagcactatagttgtagcaggaatcttcttactcatccgcttccaccccctagcagaaaatagcccactaatccaaactctaacactatgcttaggcgctatcaccactctgttcgcagcagtctgcgcccttacacaaaatgacatcaaaaaaatcgtagccttctccacttcaagtcaactaggactcataatagttacaatcggcatcaaccaaccacacctagcattcctgcacatctgtacccacgccttcttcaaagccatactatttatgtgctccgggtccatcatccacaaccttaacaatgaacaagatattcgaaaaataggaggactactcaaaaccatacctctcacttcaacctccctcaccattggcagcctagcattagcaggaatacctttcctcacaggtttctactccaaagaccacatcatcgaaaccgcaaacatatcatacacaaacgcctgagccctatctattactctcatcgctacctccctgacaagcgcctatagcactcgaataattcttctcaccctaacaggtcaacctcgcttccccacccttactaacattaacgaaaataaccccaccctactaaaccccattaaacgcctggcagccggaagcctattcgcaggatttctcattactaacaacatttcccccgcatcccccttccaaacaacaatccccctctacctaaaactcacagccctcgctgtcactttcctaggacttctaacagccctagacctcaactacctaaccaacaaacttaaaataaaatccccactatgcacattttatttctccaacatactcggattctaccctagcatcacacaccgcacaatcccctatctaggccttcttacgagccaaaacctgcccctactcctcctagacctaacctgactagaaaagctattacctaaaacaatttcacagcaccaaatctccacctccatcatcacctcaacccaaaaaggcataattaaactttacttcctctctttcttcttcccactcatcctaaccctactcctaatcacataacctattcccccgagcaatctcaattacaatatatacaccaacaaacaatgttcaaccagtaactactactaatcaacgcccataatcatacaaagcccccgcaccaataggatcctcccgaatcaaccctgacccctctccttcataaattattcagcttcctacactattaaagtttaccacaaccaccaccccatcatactctttcacccacagcaccaatcctacctccatcgctaaccccactaaaacactcaccaagacctcaacccctgacccccatgcctcaggatactcctcaatagccatcgctgtagtatatccaaagacaaccatcattccccctaaataaattaaaaaaactattaaacccatataacctcccccaaaattcagaataataacacacccgaccacaccgctaacaatcaatactaaacccccataaataggagaaggcttagaagaaaaccccacaaaccccattactaaacccacactcaacagaaacaaagcatatatcattattctcgcacggactacaaccacgaccaatgatatgaaaaaccatcgttgtatttcaactacaagaacaccaatgaccccaatacgcaaaattaaccccctaataaaactaattaaccactcattcatcgacctccccaccccatccaacatctccgcatgatgaaacttcggctcactccttggcgcctgcctgatcctccaaatcaccacaggactattcctagccatgcactactcaccagacgcctcaaccgccttttcatcaatcgcccacatcactcgagacgtaaattatggctgaatcatccgctaccttcacgccaatggcgcctcaatattctttatctgcctcttcctacacatcggacgaggcctatattacggatcatttctctactcagaaacctgaaacatcggcattatcctcctgcttgcaactatagcaacagccttcataggctatgtcctcccgtgaggccaaatatcattctgaggggccacagtaattacaaacttactatccgccatcccatacattgggacagacctagttcaatgaatctgaggaggctactcagtagacagtcccaccctcacacgattctttacctttcacttcatcttacccttcattattgcagccctagcagcactccacctcctattcttgcacgaaacgggatcaaacaaccccctaggaatcacctcccattccgataaaatcaccttccacccttactacacaatcaaagacgccctcggcttacttctcttccttctctccttaatgacattaacactattctcaccagacctcctaggcgacccagacaattataccctagccaaccccttaaacacccctccccacatcaagcccgaatgatatttcctattcgcctacacaattctccgatccgtccctaacaaactaggaggcgtccttgccctattactatccatcctcatcctagcaataatccccatcctccatatatccaaacaacaaagcataatatttcgcccactaagccaatcactttattgactcctagccgcagacctcctcattctaacctgaatcggaggacaaccagtaagctacccttttaccatcattggacaagtagcatccgtactatacttcacaacaatcctaatcctaataccaactatctccctaattgaaaacaaaatactcaaatgggcctgtccttgtagtataaactaatacaccagtcttgtaaaccggagatgaaaacctttttccaaggacaaatcagagaaaaagtctttaactccaccattagcacccaaagctaagattctaatttaaactattctctgttctttcatggggaagcagatttgggtaccacccaagtattgactcacccatcaacaaccgctatgtatttcgtacattactgccagccaccatgaatattgtacggtaccataaatacttgaccacctgtagtacataaaaacccaatccacatcaaaaccccctccccatgcttacaagcaagtacagcaatcaaccttcaactatcacacatcaactgcaactccaaagccacccctcacccactaggataccaacaaacctacccacccttaacagtacatagtacataaagccattcaccgtacatagcacattacagtcaaatcccttctcgcccccatggatgacccccctcagataggagtcccttgaccaccatcctccgtgaaatcaatatcccgcacaagagtgctactctcctcgctccgggcccataacacttgggggtagctaaagtgaactgtatccgacatctggttcctacttcagggtcataaagcctaaatagcccacacgttccccttaaataagacatcacgatg

SEQ ID NO: 375 - DNA, 16568 bp, Homo sapiens mitochondrial
  3106: "n" refers to a nucleotide at position 3107 of the Cambridge Reference Sequence (CRS, Anderson et al. 1981 Nature 290:457-465), later determined to be absent from the human mtDNA sequence according to the revised CRS (rCRS, Andrews et al. 1999 Nature Genetics 23:147); "n" therefore represents a single nucleotide deletion at a position corresponding to nucleotide 3107 of SEQ ID NO:1 as provided herein.
gatcacaggtctatcaccctattaaccactcacgggagctctccatgcatttggtattttcgtttggggggtgtgcacgcgatagcattgcgagacgctggagccggagcaccctatgtcgcagtatctgtctttgattcctgccccatcctattatttatcgcacctacgttcaatattacaggcgaacatacttactaaagtgtgttaattaattaatgcttgtaggacatagtaataacaattgaatgtctgcacagccgctttccacacagacatcataacaaaaaatttccaccaaaccccccctcccccgccttctggccacagcacttaaacacatctctgccaaaccccaaaaacaaagaaccctaacaccagcctaaccagatttcaaattttatcttttggcggtatgcacttttaacagtcaccccccaactaacacattattttcccctcccactcccatactactaatctcatcaatacaacccccgcccatcctacccagcacacacaccgctgctaaccccataccccgaaccaaccaaaccccaaagacaccccccacagtttatgtagcttacctcctcaaagcaatacactgaaaatgtttagacgggctcacatcaccccataaacaaataggtttggtcctggcctttctattagctcttagtaagattacacatgcaagcatccccgttccagtgagttcaccctctaaatcaccacgatcaaaagggacaagcatcaagcacgcagcaatgcagctcaaaacgcttagcctagccacacccccacgggaaacagcagtgattaacctttagcaataaacgaaagtttaactaagctatactaaccccagggttggtcaatttcgtgccagccaccgcggtcacacgattaacccaagtcaatagaagccggcgtaaagagtgttttagatcaccccctccccaataaagctaaaactcacctgagttgtaaaaaactccagttgacacaaaatagactacgaaagtggctttaacatatctgaacacacaatagctaagacccaaactgggattagataccccactatgcttagccctaaacctcaacagttaaatcaacaaaactgctcgccagaacactacgagccacagcttaaaactcaaaggacctggcggtgcttcatatccctctagaggagcctgttctgtaatcgataaaccccgatcaacctcaccacctcttgctcagcctatataccgccatcttcagcaaaccctgatgaaggctacaaagtaagcgcaagtacccacgtaaagacgttaggtcaaggtgtagcccatgaggtggcaagaaatgggctacattttctaccccagaaaactacgatagcccttatgaaacttaagggtcgaaggtggatttagcagtaaactgagagtagagtgcttagttgaacagggccctgaagcgcgtacacaccgcccgtcaccctcctcaagtatacttcaaaggacatttaactaaaacccctacgcatttatatagaggagacaagtcgtaacatggtaagtgtactggaaagtgcacttggacgaaccagagtgtagcttaacacaaagcacccaacttacacttaggagatttcaacttaacttgaccgctctgagctaaacctagccccaaacccactccaccttactaccagacaaccttagccaaaccatttacccagataaagtataggcgatagaaattgaaacctggcgcaatagatatagtaccgcaagggaaagatgaaaaattataaccaagcataatatagcaaggactaacccctataccttctgcataatgaattaactagaaataactttgcaaggagagccaaagctaagacccccgaaaccagacgagctacctaagaacagctaaaagagcacacccgtctatgtagcaaaatagtgggaagatttataggtagaggcgacaaacctaccgagcctggtgatagctggttgtccaagatagaatcttagttcaactttaaatttgcccacagaaccctctaaatccccttgtaaatttaactgttagtccaaagaggaacagctctttggacactaggaaaaaaccttgtagagagagtaaaaaatttaacacccatagtaggcctaaaagcagccaccaattaagaaagcgttcaagctcaacacccactacctaaaaaatcccaaacatataactgaactcctcacacccaattggaccaatctatcaccctatagaagaactaatgttagtataagtaacatgaaaacattctcctccgcataagcctgcgtcagattaaaacactgaactgacaattaacagcccaatatctacaatcaaccaacaagtcattattaccctcactgtcaacccaacacaggcatgctcataaggaaaggttaaaaaaagtaaaaggaactcggcaaatcttaccccgcctgtttaccaaaaacatcacctctagcatcaccagtattagaggcaccgcctgcccagtgacacatgtttaacggccgcggtaccctaaccgtgcaaaggtagcataatcacttgttccttaaatagggacctgtatgaatggctccacgagggttcagctgtctcttacttttaaccagtgaaattgacctgcccgtgaagaggcgggcatgacacagcaagacgagaagaccctatggagctttaatttattaatgcaaacagtacctaacaaacccacaggtcctaaactaccaaacctgcattaaaaatttcggttggggcgacctcggagcagaacccaacctccgagcagtacatgctaagacttcaccagtcaaagcgaactactatactcaattgatccaataacttgaccaacggaacaagttaccctagggataacagcgcaatcctattctagagtccatatcaacaatagggtttacgacctcgatgttggatcaggacatcccgatggtgcagccgctattaaaggttcgtttgttcaacgattaaagtcctacgtgatctgagttcagaccggagtaatccaggtcggtttctatctacnttcaaattcctccctgtacgaaaggacaagagaaataaggcctacttcacaaagcgccttcccccgtaaatgatatcatctcaacttagtattatacccacacccacccaagaacagggtttgttaagatggcagagcccggtaatcgcataaaacttaaaactttacagtcagaggttcaattcctcttcttaacaacatacccatggccaacctcctactcctcattgtacccattctaatcgcaatggcattcctaatgcttaccgaacgaaaaattctaggctatatacaactacgcaaaggccccaacgttgtaggcccctacgggctactacaacccttcgctgacgccataaaactcttcaccaaagagcccctaaaacccgccacatctaccatcaccctctacatcaccgccccgaccttagctctcaccatcgctcttctactatgaacccccctccccatacccaaccccctggtcaacctcaacctaggcctcctatttattctagccacctctagcctagccgtttactcaatcctctgatcagggtgagcatcaaactcaaactacgccctgatcggcgcactgcgagcagtagcccaaacaatctcatatgaagtcaccctagccatcattctactatcaacattactaataagtggctcctttaacctctccacccttatcacaacacaagaacacctctgattactcctgccatcatgacccttggccataatatgatttatctccacactagcagagaccaaccgaacccccttcgaccttgccgaaggggagtccgaactagtctcaggcttcaacatcgaatacgccgcaggccccttcgccctattcttcatagccgaatacacaaacattattataataaacaccctcaccactacaatcttcctaggaacaacatatgacgcactctcccctgaactctacacaacatattttgtcaccaagaccctacttctaacctccctgttcttatgaattcgaacagcatacccccgattccgctacgaccaactcatacacctcctatgaaaaaacttcctaccactcaccctagcattacttatatgatatgtctccatacccattacaatctccagcatcccccctcaaacctaagaaatatgtctgataaaagagttactttgatagagtaaataataggagcttaaacccccttatttctaggactatgagaatcgaacccatccctgagaatccaaaattctccgtgccacctatcacaccccatcctaaagtaaggtcagctaaataagctatcgggcccataccccgaaaatgttggttatacccttcccgtactaattaatcccctggcccaacccgtcatctactctaccatctttgcaggcacactcatcacagcgctaagctcgcactgattttttacctgagtaggcctagaaataaacatgctagcttttattccagttctaaccaaaaaaataaaccctcgttccacagaagctgccatcaagtatttcctcacgcaagcaaccgcatccataatccttctaatagctatcctcttcaacaatatactctccggacaatgaaccataaccaatactaccaatcaatactcatcattaataatcataatggctatagcaataaaactaggaatagccccctttcacttctgagtcccagaggttgcccaaggcacccctctgacatccggcctgcttcttctcacatgacaaaaactagcccccatctcaatcatataccaaatctctccctcactaaacgtaagccttctcctcactctctcaatcttatccatcatagcaggcagttgaggtggattaaaccaaacccagctacgcaaaatcttagcatactcctcaattacccacataggatgaataatagcagttctaccgtacaaccctaacataaccattcttaatttaactatttatattatcctaactactaccgcattcctactactcaacttaaactccagcaccacgaccctactactatctcgcacctgaaacaagctaacatgactaacacccttaattccatccaccctcctctccctaggaggcctgcccccgctaaccggctttttgcccaaatgggccattatcgaagaattcacaaaaaacaatagcctcatcatccccaccatcatagccaccatcaccctccttaacctctacttctacctacgcctaatctactccacctcaatcacactactccccatatctaacaacgtaaaaataaaatgacagtttgaacatacaaaacccaccccattcctccccacactcatcgcccttaccacgctactcctacctatctccccttttatactaataatcttatagaaatttaggttaaatacagaccaagagccttcaaagccctcagtaagttgcaatacttaatttctgtaacagctaaggactgcaaaaccccactctgcatcaactgaacgcaaatcagccactttaattaagctaagcccttactagaccaatgggacttaaacccacaaacacttagttaacagctaagcaccctaatcaactggcttcaatctacttctcccgccgccgggaaaaaaggcgggagaagccccggcaggtttgaagctgcttcttcgaatttgcaattcaatatgaaaatcacctcggagctggtaaaaagaggcctaacccctgtctttagatttacagtccaatgcttcactcagccattttacctcacccccactgatgttcgccgaccgttgactattctctacaaaccacaaagacattggaacactatacctattattcggcgcatgagctggagtcctaggcacagctctaagcctccttattcgagccgagctgggccagccaggcaaccttctaggtaacgaccacatctacaacgttatcgtcacagcccatgcatttgtaataatcttcttcatagtaatacccatcataatcggaggctttggcaactgactagttcccctaataatcggtgcccccgatatggcgtttccccgcataaacaacataagcttctgactcttacctccctctctcctactcctgctcgcatctgctatagtggaggccggagcaggaacaggttgaacagtctaccctcccttagcagggaactactcccaccctggagcctccgtagacctaaccatcttctccttacacctagcaggtgtctcctctatcttaggggccatcaatttcatcacaacaattatcaatataaaaccccctgccataacccaataccaaacgcccctcttcgtctgatccgtcctaatcacagcagtcctacttctcctatctctcccagtcctagctgctggcatcactatactactaacagaccgcaacctcaacaccaccttcttcgaccccgccggaggaggagaccccattctataccaacacctattctgatttttcggtcaccctgaagtttatattcttatcctaccaggcttcggaataatctcccatattgtaacttactactccggaaaaaaagaaccatttggatacataggtatggtctgagctatgatatcaattggcttcctagggtttatcgtgtgagcacaccatatatttacagtaggaatagacgtagacacacgagcatatttcacctccgctaccataatcatcgctatccccaccggcgtcaaagtatttagctgactcgccacactccacggaagcaatatgaaatgatctgctgcagtgctctgagccctaggattcatctttcttttcaccgtaggtggcctgactggcattgtattagcaaactcatcactagacatcgtactacacgacacgtactacgttgtagctcacttccactatgtcctatcaataggagctgtatttgccatcataggaggcttcattcactgatttcccctattctcaggctataccctagaccaaacctacgccaaaatccatttcactatcatattcatcggcgtaaatctaactttcttcccacaacactttctcggcctatccggaatgccccgacgttactcggactaccccgatgcatacaccacatgaaacatcctatcatctgtaggctcattcatttctctaacagcagtaatattaataattttcatgatttgagaagccttcgcttcgaagcgaaaagtcctaatagtagaagaaccctccataaacctggagtgactatatggatgccccccaccctaccacacattcgaagaacccgtatacataaaatctagacaaaaaaggaaggaatcgaaccccccaaagctggtttcaagccaaccccatggcctccatgactttttcaaaaaggtattagaaaaaccatttcataactttgtcaaagttaaattataggctaaatcctatatatcttaatggcacatgcagcgcaagtaggtctacaagacgctacttcccctatcatagaagagcttatcacctttcatgatcacgccctcataatcattttccttatctgcttcctagtcctgtatgcccttttcctaacactcacaacaaaactaactaatactaacatctcagacgctcaggaaatagaaaccgtctgaactatcctgcccgccatcatcctagtcctcatcgccctcccatccctacgcatcctttacataacagacgaggtcaacgatccctcccttaccatcaaatcaattggccaccaatggtactgaacctacgagtacaccgactacggcggactaatcttcaactcctacatacttcccccattattcctagaaccaggcgacctgcgactccttgacgttgacaatcgagtagtactcccgattgaaacccctattcgtataataattacatcacaagacgtcttgcactcatgagctgtccccacattaggcttaaaaacagatgcaattcccggacgtctaaaccaaaccactttcaccgctacacgaccgggggtatactacggtcaatgctctgaaatctgtggagcaaaccacagtttcatgcccatcgtcctagaattaattcccctaaaaatctttgaaatagggcccgtatttaccctatagcaccccctctaccccctctagagcccactgtaaagctaacttagcattaaccttttaagttaaagattaagagaaccaacacctctttacagtgaaatgccccaactaaatactaccgtatggcccaccataattacccccatactccttacactattcctcatcacccaactaaaaatattaaacacaaactaccacctacctccctcaccaaagcccataaaaataaaaaattataacaaaccctgagaaccaaaatgaacgaaaatctgttcgcttcattcattgcccccacaatcctaggcctacccgccgcagtactgatcattctatttccccctctattgatccccacctccaaatatctcatcaacaaccgactaatcaccacccaacaatgactaatcaaactaacctcaaaacaaatgataaccatacacaacactaaaggacgaacctgatctcttatactagtatccttaatcatttttattgccacaactaacctcctcggactcctgccttactcatttacaccaaccacccaactatctataaacctagccatggccatccccttatgagcgggcgcagtgattataggctttcgctctaagattaaaaatgccctagcccacttcttaccacaaggcacacctacaccccttatccccatactagttattatcgaaaccatcagcctactcattcaaccaatagccctggccgtacgcctaaccgctaacattactgcaggccacctactcatgcacctaattggaagcgccaccctagcaatatcaaccattaaccttccctctacacttatcatcttcacaattctaattctactgactatcctagaaatcgctgtcgccttaatccaagcctacgttttcacacttctagtaagcctctacctgcacgacaacacataatgacccaccaatcacatgcctatcatatagtaaaacccagcccatgacccctaacaggggccctctcagccctcctaatgacctccggcctagccatgtgatttcacttccactccataacgctcctcatactaggcctactaaccaacacactaaccatataccaatgatggcgcgatgtaacacgagaaagcacataccaaggccaccacacaccacctgtccaaaaaggccttcgatacgggataatcctatttattacctcagaagtttttttcttcgcaggatttttctgagccttttaccactccagcctagcccctaccccccaattaggagggcactggcccccaacaggcatcaccccgctaaatcccctagaagtcccactcctaaacacatccgtattactcgcatcaggagtatcaatcacctgagctcaccatagtctaatagaaaacaaccgaaaccaaataattcaagcactgcttattacaattttactgggtctctattttaccctcctacaagcctcagagtacttcgagtctcccttcaccatttccgacggcatctacggctcaacattttttgtagccacaggcttccacggacttcacgtcattatcggctcaactttcctcactatctgcttcatccgccaactaatatttcactttacatccaaacatcactttggcttcgaagccgccgcctgatactggcattttgtagatgtggtttgactatttctgtatgtctccatctattgatgagggtcttactcttttagtataaatagtaccgttaacttccaattaactagttttgacaacattcaaaaaagagtaataaacttcgccttaattttaataatcaacaccctcctagccttactactaataattattacattttgactaccacaactcaacggctacatagaaaaatccaccccttacgagtgcggcttcgaccctatatcccccgcccgcgtccctttctccataaaattcttcttagtagctattaccttcttattatttgatctagaaattgccctccttttacccctaccatgagccctacaaacaactaacctgccactaatagttatgtcatccctcttattaatcatcatcctagccctaagtctggcctatgagtgactacaaaaaggattagactgaaccgaattggtatatagtttaaacaaaacgaatgatttcgactcattaaattatgataatcatatttaccaaatgcccctcatttacataaatattatactagcatttaccatctcacttctaggaatactagtatatcgctcacacctcatatcctccctactatgcctagaaggaataatactatcgctgttcattatagctactctcataaccctcaacacccactccctcttagccaatattgtgcctattgccatactagtctttgccgcctgcgaagcagcggtgggcctagccctactagtctcaatctccaacacatatggcctagactacgtacataacctaaacctactccaatgctaaaactaatcgtcccaacaattatattactaccactgacatgactttccaaaaaacacataatttgaatcaacacaaccacccacagcctaattattagcatcatccctctactattttttaaccaaatcaacaacaacctatttagctgttccccaaccttttcctccgaccccctaacaacccccctcctaatactaactacctgactcctacccctcacaatcatggcaagccaacgccacttatccagtgaaccactatcacgaaaaaaactctacctctctatactaatctccctacaaatctccttaattataacattcacagccacagaactaatcatattttatatcttcttcgaaaccacacttatccccaccttggctatcatcacccgatgaggcaaccagccagaacgcctgaacgcaggcacatacttcctattctacaccctagtaggctcccttcccctactcatcgcactaatttacactcacaacaccctaggctcactaaacattctactactcactctcactgcccaagaactatcaaactcctgagccaacaacttaatatgactagcttacacaatagcttttatagtaaagatacctctttacggactccacttatgactccctaaagcccatgtcgaagcccccatcgctgggtcaatagtacttgccgcagtactcttaaaactaggcggctatggtataatacgcctcacactcattctcaaccccctgacaaaacacatagcctaccccttccttgtactatccctatgaggcataattataacaagctccatctgcctacgacaaacagacctaaaatcgctcattgcatactcttcaatcagccacatagccctcgtagtaacagccattctcatccaaaccccctgaagcttcaccggcgcagtcattctcataatcgcccacggacttacatcctcattactattctgcctagcaaactcaaactacgaacgcactcacagtcgcatcataatcctctctcaaggacttcaaactctactcccactaatagctttttgatgacttctagcaagcctcgctaacctcgccttaccccccactattaacctactgggagaactctctgtgctagtaaccacgttctcctgatcaaatatcactctcctacttacaggactcaacatactagtcacagccctatactccctctacatatttaccacaacacaatgaggctcactcacccaccacattaacaacataaaaccctcattcacacgagaaaacaccctcatgttcatacacctatcccccattctcctcctatccctcaaccccgacatcattaccgggttttcctcttgtaaatatagtttaaccaaaacatcagattgtgaatctgacaacagaggcttacgaccccttatttaccgagaaagctcacaagaactgctaactcatgcccccatgtctaacaacatggctttctcaacttttaaaggataacagctatccattggtcttaggccccaaaaattttggtgcaactccaaataaaagtaataaccatgcacactactataaccaccctaaccctgacttccctaattccccccatccttaccaccctcgttaaccctaacaaaaaaaactcatacccccattatgtaaaatccattgtcgcatccacctttattatcagtctcttccccacaacaatattcatgtgcctagaccaagaagttattatctcgaactgacactgagccacaacccaaacaacccagctctccctaagcttcaaactagactacttctccataatattcatccctgtagcattgttcgttacatggtccatcatagaattctcactgtgatatataaactcagacccaaacattaatcagttcttcaaatatctactcattttcctaattaccatactaatcttagttaccgctaacaacctattccaactgttcatcggctgagagggcgtaggaattatatccttcttgctcatcagttgatgatacgcccgagcagatgccaacacagcagccattcaagcaatcctatacaaccgtatcggcgatatcggtttcatcctcgccttagcatgatttatcctacactccaactcatgagacccacaacaaatagcccttctaaacgctaatccaagcctcaccccactactaggcctcctcctagcagcagcaggcaaatcagcccaattaggtctccacccctgactcccctcagccatagaaggccccaccccagtctcagccctactccactcaagcactatagttgtagcaggaatcttcttactcatccgcttccaccccctagcagaaaatagcccactaatccaaactctaacactatgcttaggcgctatcaccactctgttcgcagcagtctgcgcccttacacaaaatgacatcaaaaaaatcgtagccttctccacttcaagtcaactaggactcataatagttacaatcggcatcaaccaaccacacctagcattcctgcacatctgtacccacgccttcttcaaagccatactatttatgtgctccgggtccatcatccacaaccttaacaatgaacaagatattcgaaaaataggaggactactcaaaaccatacctctcacttcaacctccctcaccattggcagcctagcattagcaggaatacctttcctcacaggtttctactccaaagaccacatcatcgaaaccgcaaacatatcatacacaaacgcctgagccctatctattactctcatcgctacctccctgacaagcgcctatagcactcgaataattcttctcaccctaacaggtcaacctcgcttccccacccttactaacattaacgaaaataaccccaccctactaaaccccattaaacgcctgacagccggaagcctattcgcaggatttctcattactaacaacatttcccccgcatcccccttccaaacaacaatccccctctacctaaaactcacagccctcgctgtcactttcctaggacttctaacagccctagacctcaactacctaaccaacaaacttaaaataaaatccccactatgcacattttatttctccaacatactcggattctaccctagcatcacacaccgcacaatcccctatctaggccttcttacgagccaaaacctgcccctactcctcctagacctaacctgactagaaaagctattacctaaaacaatttcacagcaccaaatctccacctccatcatcacctcaacccaaaaaggcataattaaactttacttcctctctttcttcttcccactcatcctaaccctactcctaatcacataacctattcccccgagcaatctcaattacaatatatacaccaacaaacaatgttcaaccagtaactactactaatcaacgcccataatcatacaaagcccccgcaccaataggatcctcccgaatcaaccctgacccctctccttcataaattattcagcttcctacactattaaagtttaccacaaccaccaccccatcatactctttcacccacagcaccaatcctacctccatcgctaaccccactaaaacactcaccaagacctcaacccctgacccccatgcctcaggatactcctcaatagccatcgctgtagtatatccaaagacaaccatcattccccctaaataaattaaaaaaactattaaacccatataacctcccccaaaattcagaataataacacacccgaccacaccgctaacaatcaatactaaacccccataaataggagaaggcttagaagaaaaccccacaaaccccattactaaacccacactcaacagaaacaaagcatacatcattattctcgcacggactacaaccacgaccaatgatatgaaaaaccatcgttgtatttcaactacaagaacaccaatgaccccaatacgcaaaattaaccccctaataaaattaattaaccactcattcatcgacctccccaccccatccaacatctccgcatgatgaaacttcggctcactccttggcgcctgcctgatcctccaaatcaccacaggactattcctagccatgcactactcaccagacgcctcaaccgccttttcatcaatcgcccacatcactcgagacgtaaattatggctgaatcatccgctaccttcacgccaatggcgcctcaatattctttatctgcctcttcctacacatcgggcgaggcctatattacggatcatttctctactcagaaacctgaaacatcggcattatcctcctgcttgcaactatagcaacagccttcataggctatgtcctcccgtgaggccaaatatcattctgaggggccacagtaattacaaacttactatccgccatcccatacattgggacagacctagttcaatgaatctgaggaggctactcagtagacagtcccaccctcacacgattctttacctttcacttcatcttgcccttcattattgcagccctagcagcactccacctcctattcttgcacgaaacgggatcaaacaaccccctaggaatcacctcccattccgataaaatcaccttccacccttactacacaatcaaagacgccctcggcttacttctcttccttctctccttaatgacattaacactattctcaccagacctcctaggcgacccagacaattataccctagccaaccccttaaacacccctccccacatcaagcccgaatgatatttcctattcgcctacacaattctccgatccgtccctaacaaactaggaggcgtccttgccctattactatccatcctcatcctagcaataatccccatcctccatatatccaaacaacaaagcataatatttcgcccactaagccaatcactttattgactcctagccgcagacctcctcattctaacctgaatcggaggacaaccagtaagctacccttttaccatcattggacaagtagcatccgtactatacttcacaacaatcctaatcctaataccaactatctccctaattgaaaacaaaatactcaaatgggcctgtccttgtagtataaactaatacaccagtcttgtaaaccggagatgaaaacctttttccaaggacaaatcagagaaaaagtctttaactccaccattagcacccaaagctaagattctaatttaaactattctctgttctttcatggggaagcagatttgggtaccacccaagtattgactcacccatcaacaaccgctatgtatttcgtacattactgccagtcaccatgaatattgtacggtaccataaatacttgaccacctgtagtacataaaaacccaatccacatcaaacccccccccccatgcttacaagcaagtacagcaatcaaccttcaactatcacacatcaactgcaactccaaagccacccctcacccactaggataccaacaaacctatccacccttaacagtacatagtacataaaaccatttaccgtacataacacattacagtcaaatcccttctcgcccccatggatgacccccctcagataggggtcccttgaccaccatcctccgtgaaatcaatatcccgcacaagagtgctactctcctcgctccgggcccataacacttgggggtagctaaagtgaactgtatccgacatctggttcctacttcagggccataaagcctaaatagcccacacgttccccttaaataagacatcacgatg

SEQ ID NO: 376 - DNA, 16565 bp, Homo sapiens mitochondrial
  3110: "n" refers to a nucleotide at position 3107 of the Cambridge Reference Sequence (CRS, Anderson et al. 1981 Nature 290:457-465), later determined to be absent from the human mtDNA sequence according to the revised CRS (rCRS, Andrews et al. 1999 Nature Genetics 23:147); "n" therefore represents a single nucleotide deletion at a position corresponding to nucleotide 3107 of SEQ ID NO:1 as provided herein.
gatcacaggtctatcaccctattaaccactcacgggagctctccatgcatttggtattttcgtctggggggtgtgcacgcgatagcattgcgagacgctggagccggagcaccctatgtcgcagtatctgtctttgattcctgcctcatcctattatttatcgcacctacgttcaatattacaggcgaacatacttactaaagtgtgttaattaattaatgcttgtaggacataataataacaattgaatgtctgcacagccgctttccacacagacatcataacaaaaaatttccaccaaaccccccctccccccccgcttctggccacagcacttaaacacatctctgccaaaccccaaaaacaaagaaccctaacaccagcctaaccagatttcaaattttatcttttggcggtatgcacttttaacagtcaccccccaactaacacattattttcccctcccactcccatactactaatctcatcaatacaacccccacccatcctacccagcacacacacaccgctgctaaccccataccccgaaccaaccaaaccccaaagacaccccccacagtttatgtagcttacctcctcaaagcaatacactgaaaatgtttagacgggctcacatcaccccataaacaaataggtttggtcctagcctttctattagctcttagtaagattacacatgcaagcatccccgttccagtgagttcaccctctaaatcaccacgatcaaaagggacaagcatcaagcacgcagcaatgcagctcaaaacgcttagcctagccacacccccacgggaaacagcagtgattagcctttagcaataaacgaaagtttaactaagctatactaaccccagggttggtcaatttcgtgccagccaccgcggtcacacgattaacccaagtcaatagaagccggcgtaaagagtgttttagatcaccccctccccaataaagctaaaactcacctgagttgtaaaaaactccagttgacacaaaatagactacgaaagtggctttaacatatctgaacacacaatagctaagacccaaactgggattagataccccactatgcttagccctaaacctcaacagttaaatcaacaaaactgctcgccagaacactacgagccacagcttaaaactcaaaggacctggcggtgcttcatatccctctagaggagcctgttctgtaatcgataaaccccgatcaacctcaccacctcttgctcagcctatataccgccatcttcagcaaaccctgatgaaggctacaaagtaagcgcaagtacccacgtaaagacgttaggtcaaggtgtagcccatgaggtggcaagaaatgggctacattttctaccccagaaaactacgatagcccttatgaaacttaagggtcgaaggtggatttagcagtaaactgagagtagagtgcttagttgaacagggccctgaagcgcgtacacaccgcccgtcaccctcctcaagtatacttcaaaggacatttaactaaaacccctacgcatttatatagaggagacaagtcgtaacatggtaagtgtactggaaagtgcacttggacgaaccagagtgtagcttaacacaaagcacccaacttacacttaggagatttcaacttaacttgaccgctctgagctaaacctagccccaaacccactccaccttactaccagacaaccttagccaaaccatttacccaaataaagtataggcgatagaaattgaaacctggcgcaatagatatagtaccgcaagggaaagatgaaaaattataaccaagcataatatagcaaggactaacccctataccttctgcataatgaattaactagaaataactttgcaaggagagccaaagctaagacccccgaaaccagacgagctacctaagaacagctaaaagagcacacccgtctatgtagcaaaatagtgggaagatttataggtagaggcgacaaacctaccgagcctggtgatagctggttgtccaagatagaatcttagttcaactttaaatttgcccacagaaccctctaaatccccttgtaaatttaactgttagtccaaagaggaacagctctttggacactaggaaaaaaccttgtagagagagtaaaaaatttaacacccatagtaggcctaaaagcagccaccaattaagaaagcgttcaagctcaacacccactacctaaaaaatcccaaacatataactgaactcctcacacccaattggaccaatctatcaccctatagaagaactaatgttagtataagtaacatgaaaacattctcctccgcataagcctgcgtcagattaaaacactgaactgacaattaacagcccaatatctacaatcaaccaacaagtcattattaccctcactgtcaacccaacacaggcatgctcataaggaaaggttaaaaaaagtaaaaggaactcggcaaatcttaccccgcctgtttaccaaaaacatcacctctagcatcaccagtattagaggcaccgcctgcccagtgacacatgtttaacggccgcggtaccctaaccgtgcaaaggtagcataatcacttgttccttaaatagggacctgtatgaatggctccacgagggttcagctgtctcttacttttaaccagtgaaattgacctgcccgtgaagaggcgggcatgacacagcaagacgagaagaccctatggagctttaatttattaatgcaaacagtacctaacaaacccacaggtcctaaactaccaaacctgcattaaaaatttcggttggggcgacctcggagcagaacccaacctccgagcagtacatgctaagacttcaccagtcaaagcgaactactatactcaattgatccaataacttgaccaacggaacaagttaccctagggataacagcgcaatcctattctagagtccatatcaacaatagggtttacgacctcgatgttggatcaggacatcccgatggtgcagccgctattaaaggttcgtttgttcaacgattaaagtcctacgtgatctgagttcagaccggagtaatccaggtcggtttctatctacnttcaaattcctccctgtacgaaaggacaagagaaataaggcctacttcacaaagcgccttcccccgtaaatgatatcatctcaacttagtattatacccacacccacccaagaacagggtttgttaagatggcagagcccggtaatcgcataaaacttaaaactttacagtcagaggttcaattcctcttcttaacaacatacccatggccaacctcctactcctcattgtacccattctaatcgcaatggcattcctaatgcttaccgaacgaaaaattctaggctatatacaactacgcaaaggccccaacgttgtaggcccctacgggctactacaacccttcgctgacgccataaaactcttcaccaaagagcccctaaaacccgccacatctaccatcaccctctacatcaccgccccgaccttagctctcaccgtcgctcttctactatgaacccccctccccatacccaaccccctggtcaacctcaacctaggcctcctatttattctagccacctctagcctagccgtttactcaatcctctgatcagggtgagcatcaaactcaaactacgccctgatcggcgcactgcgagcagtagcccaaacaatctcatatgaagtcaccctagccatcattctactatcaacattactaataagtggctcctttaacctctccacccttatcacaacacaagaacacctctgattactcctgccatcatgacccttggccataatatgatttatctccacactagcagagaccaaccgaacccccttcgaccttgccgaaggggagtccgaactagtctcaggcttcaacatcgaatacgccgcaggccccttcgccctattcttcatagccgaatacacaaacattattataataaacaccctcaccactacaatcttcctaggaacaacatatgacgcactctcccctgaactctacacaacatattttgtcaccaagaccctacttctaacctccctgttcttatgaattcgaacagcatacccccgattccgctacgaccaactcatacacctcctatgaaaaaacttcctaccactcaccctagcattacttatatgatatgtctccatacccattacaatctccagcattccccctcaaacctaagaaatatgtctgataaaagagttactttgatagagtaaataataggagcttaaacccccttatttctaggactatgagaatcgaacccatccctgagaatccaaaattctccgtgccacctatcacaccccatcctaaagtaaggtcagctaaataagctatcgggcccataccccgaaaatgttggttatacccttcccgtactaattaatcccctggcccaacccgtcatctactctaccatctttgcaggcacactcatcacagcgctaagctcgcactgattttttacctgagtaggcctagaaataaacatgctagcttttattccagttctaaccaaaaaaataaaccctcgttccacagaagctgccatcaagtatttcctcacgcaagcaaccgcatccataatccttctaatagctatcctcttcaacaatatactctccggacaatgaaccataaccaatactaccaatcaatactcatcattaataatcataatggctatagcaataaaactaggaatagccccctttcacttctgagtcccagaagttacccaaggcacccctctgacatccggcctgcttcttctcacatgacaaaaactagcccccatctcaatcatataccaaatctctccctcactaaacgtaagccttctcctcactctctcaatcttatccatcatagcaggcagttgaggtggactaaaccaaacccagctacgcaaaatcttagcatactcctcaattacccacataggatgaataatagcagttctaccgtacaaccctaacataaccattcttaatttaactatttatattatcctaactactaccgcattcctactactcaacttaaactccagcaccacgaccctactactatctcgcacctgaaacaagctaacatgactaacacccttaattccatccaccctcctctccctaggaggcctgcccccgctaaccggctttttgcccaaatgggccattatcgaagaattcacaaaaaacaatagcctcatcatccccaccatcatagccaccatcaccctccttaacctctacttctacctacgcctaatctactccacctcaatcacactactccccatatctaacaacgtaaaaataaaatgacagtttgaacatacaaaacccaccccattcctccccacactcatcgcccttaccacgctactcctacctatctccccttttatactaataatcttatagaaatttaggttaaatacagaccaagagccttcaaagccctcagtaagttgcaatacttaatttctgtaacagctaaggactgcaaaaccccactctgcatcaactgaacgcaaatcagccactttaattaagctaagcccttactagaccaatgggacttaaacccacaaacacttagttaacagctaagcaccctaatcaactggcttcaatctacttctcccgccgccgggaaaaaaggcgggagaagccccggcaggtttgaagctgcttcttcgaatttgcaattcaatatgaaaatcacctcggagctggtaaaaagaggcctaacccctgtctttagatttacagtccaatgcttcactcagccattttacctcacccccactgatgttcgccgaccgttgactattctctacaaaccacaaagacattggaacactatacctattattcggcgcatgagctggagtcctaggcacagctctaagcctccttattcgagccgagctgggccagccaggcaaccttctaggtaacgaccacatctacaacgttatcgtcacagcccatgcatttgtaataatcttcttcatagtaatacccatcataatcggaggctttggcaactgactagttcccctaataatcggtgcccccgatatggcgtttccccgcataaacaacataagcttctgactcttacctccctctctcctactcctgctcgcatctgctatagtggaggccggagcaggaacaggttgaacagtctaccctcccttagcagggaactactcccaccctggagcctccgtagacctaaccatcttctccttacacctagcaggtgtctcctctatcttaggggccatcaatttcatcacaacaattatcaatataaaaccccctgccataacccaataccaaacgcccctcttcgtctgatccgtcctaattacagcagtcctacttctcctatctctcccagtcctagctgctggcatcactatactactaacagaccgcaacctcaacaccaccttcttcgaccccgccggaggaggagaccccattctataccaacacctattctgatttttcggtcaccctgaagtttatattcttatcctaccaggcttcggaataatctcccatattgtaacttactactccggaaaaaaagaaccatttggatacataggtatggtctgagctatgatatcaattggcttcctagggtttatcgtgtgagcacaccatatatttacagtaggaatagacgtagacacacgagcatatttcacctccgctaccataatcatcgctatccccaccggcgtcaaagtatttagctgactcgccacactccacggaagcaatatgaaatgatctgctgcagtgctctgagccctaggattcatctttcttttcaccgtaggtggcctgactggcattgtattagcaaactcatcactagacatcgtactacacgacacgtactacgttgtagctcacttccactatgtcctatcaataggagctgtatttgccatcataggaggcttcattcactgatttcccctattctcaggctacaccctagaccaaacctacgccaaaatccatttcactatcatattcatcggcgtaaatctaactttcttcccacaacactttctcggcctatccggaatgccccgacgttactcggactaccccgatgcatacaccacatgaaacatcctatcatctgtaggctcattcatttctctaacagcagtaatattaataattttcatgatttgagaagccttcgcttcgaagcgaaaagtcctaatagtagaagaaccctccataaacctggagtgactatatggatgccccccaccctaccacacattcgaagaacccgtatacataaaatctagacaaaaaaggaaggaatcgaaccccccaaagctggtttcaagccaaccccatggcctccatgactttttcaaaaaggtattagaaaaaccatttcataactttgtcaaagttaaattataggctaaatcctatatatcttaatggcacatgcagcgcaagtaggtctacaagacgctacttcccctatcatagaagagcttatcacctttcatgatcacgccctcataatcattttccttatctgcttcctagtcctgtatgcccttttcctaacactcacaacaaaactaactaatactaacatctcagacgctcaggaaatagaaaccgtctgaactatcctgcccgccatcatcctagtcctcatcgccctcccatccctacgcatcctttacataacagacgaggtcaacgatccctcccttaccatcaaatcaattggccaccaatggtactgaacctacgagtacaccgactacggcggactaatcttcaactcctacatacttcccccattattcctagaaccaggcgacctgcgactccttgacgttgacaatcgagtagtactcccgattgaagcccccattcgtataataattacatcacaagacgtcttgcactcatgagctgtccccacattaggcttaaaaacagatgcaattcccggacgtctaaaccaaaccactttcaccgctacacgaccgggggtatactacggtcaatgctctgaaatctgtggagcaaaccacagtttcatgcccatcgtcctagaattaattcccctaaaaatctttgaaatagggcccgtatttaccctatagcaccccactctagagcccactgtaaagctaacttagcattaaccttttaagttaaagattaagagaaccaacacctctttacagtgaaatgccccaactaaatactaccgtatggcccaccataattacccccatactccttacactattcctcatcacccaactaaaaatattaaacacaaactaccacctacctccctcaccaaagcccataaaaataaaaaattataacaaaccctgagaaccaaaatgaacgaaaatctgttcgcttcattcattgcccccacaatcctaggcctacccgccgcagtactgatcattctatttccccctctattgatccccacctccaaatatctcatcaacaaccgactaatcaccacccaacaatgactaatcaaactaacctcaaaacaaatgataaccatacacaacactaaaggacgaacctgatctcttatactagtatccttaatcatttttattgccacaactaacctcctcggactcctgcctcactcatttacaccaaccacccaactatctataaacctagccatggccatccccttatgagcgggcgcagtgattataggctttcgctctaagattaaaaatgccctagcccacttcttaccacaaggcacacctacaccccttatccccatactagttattatcgaaaccatcagcctactcattcaaccaatagccctggccgtacgcctaaccgctaacattactgcaggccacctactcatgcacctaattggaagcgccaccctagcaatatcaaccattaaccttccctctacacttatcatcttcacaattctaattctactgactatcctagaaatcgctgtcgccttaatccaagcctacgttttcacacttctagtaagcctctacctgcacgacaacacataatgacccaccaatcacatgcctatcatatagtaaaacccagcccatgacccctaacaggggccctctcagccctcctaatgacctccggcctagccatgtgatttcacttccactccataacgctcctcatactaggcctactaaccaacacactaaccatataccaatgatggcgcgatgtaacacgagaaagcacataccaaggccaccacacaccacctgtccaaaaaggccttcgatacgggataatcctatttattacctcagaagtttttttcttcgcaggatttttctgagccttttaccactccagcctagcccctaccccccaattaggagggcactggcccccaacaggcatcaccccgctaaatcccctagaagtcccactcctaaacacatccgtattactcgcatcaggagtatcaatcacctgagctcaccatagtctaatagaaaacaaccgaaaccaaataattcaagcactgcttattacaattttactgggtctctattttaccctcctacaagcctcagagtacttcgagtctcccttcaccatttccgacggcatctacggctcaacattttttgtagccacaggcttccacggacttcacgtcattattggctcaactttcctcactatctgcttcatccgccaactaatatttcactttacatccaaacatcactttggcttcgaagccgccgcctgatactggcattttgtagatgtggtctgactatttctgtatgtctccatctattgatgagggtcttactcttttagtataaatagtaccgttaacttccaattaactagttttgacaacattcaaaaaagagtaataaacttcgccttaattttaataatcaacaccctcctagccttactactaataattattacattttgactaccacaactcaacggctacatagaaaaatccaccccttacgagtgcggcttcgaccctatatcccccgcccgcgtccctttctccataaaattcttcttagtagctattaccttcttattatttgatctagaaattgccctccttttacccctaccatgagccctacaaacaactaacctgccactaatagttatgtcatccctcttattaatcatcatcctagccctaagtctggcctatgagtgactacaaaaaggattagactgaaccgaattggtatatagtttaaacaaaacgaatgatttcgactcattaaattatgataatcatatttaccaaatgcccctcatttacataaatattatactagcatttaccatctcacttctaggaatactagtatatcgctcacacctcatatcctccctactatgcctagaaggaataatactatcgctgttcattatagctactctcataaccctcaacacccactccctcttagccaatattgtgcctattgccatactagtctttgccgcctgcgaagcagcggtgggcctagccctactagtctcaatctccaacacatatggcctagactacgtacataacctaaacctactccaatgctaaaactaatcgtcccaacaattatattactaccactgacatgactttccaaaaaacacataatttgaatcaacacaaccacccacagcctaattattagcatcatccctctactattttttaaccaaatcgacaacaacctatttagctgttccccaaccttttcctccgaccccctaacaacccccctcctaatactaactacctgactcctacccctcacaatcatggcaagccaacgccacttatccagtgaaccactatcacgaaaaaaactctacctctctatactaatctccctacaaatctccttaattataacattcacagccacagaactaatcatattttatatcttcttcgaaaccacacttatccccaccttggctatcatcacccgatgaggcaaccagtcagaacgcctgaacgcaggcacatacttcctattctacaccctagtaggctcccttcccctactcatcgcactaatttacactcacaacaccctaggctcactaaacattctactactcactctcactgcccaagaactatcaaactcctgagccaacaacttaatatgactagcttacacaatagcttttatagtaaagatacctctttacggactccacttatgactccctaaagcccatgtcgaagcccccatcgctgggtcaatagtacttgccgcagtactcttaaaactaggcggctatggtataatacgcctcacactcattctcaaccccctgacaaaacacatagcctaccccttccttgtactatccctatgaggcataattataacaagctccatctgcctacgacaaacagacctaaaatcgctcattgcatactcttcaatcagccacatagccctcgtagtaacagccattctcatccaaaccccctgaagcttcaccggcgcagtcattctcataatcgcccacggacttacatcctcattactattctgcctagcaaactcaaactacgaacgcactcacagtcgcatcataatcctctctcaaggacttcaaactctactcccactaatagctttttgatgacttctagcaagcctcgctaacctcgccttaccccccactattaacctactgggagaactctctgtgctagtaaccacgttctcctgatcaaatatcactctcctacttacaggactcaacatactagtcacagccctatactccctctacatatttaccacaacacaatggggctcactcacccaccacattaacaacataaaaccctcattcacacgagaaaacaccctcatgttcatacacctatcccccattctcctcctatccctcaaccccgacatcattaccgggttttcctcttgtaaatatagtttaaccaaaacatcagattgtgaatctgacaacagaggcttacgaccccttatttaccgagaaagctcacaagaactgctaactcatgcccccatgtctaacaacatggctttctcaacttttaaaggataacagctatccattggtcttaggccccaaaaattttggtgcaactccaaataaaagtaataaccatgcacactactataaccaccctaaccctgacttccctaattccccccatccttaccaccctcgttaaccctaacaaaaaaaactcatacccccattatgtaaaatccattgtcgcatccacctttattatcagtctcttccccacaacaatattcatgtgcctagaccaagaagttattatctcgaactgacactgagccacaacccaaacaacccagctctccctaagcttcaaactagactacttctccataatattcatccctgtagcattgttcgttacatggtccatcatagaattctcactgtgatatataaactcagacccaaacattaatcagttcttcaaatatctactcatcttcctaattaccatactaatcttggttaccgctaacaacctattccaactgttcatcggctgagagggcgtaggaattatatccttcttgctcatcagttgatgatacgcccgagcagatgccaacacagcagccattcaagcaatcctatacaaccgtatcggcgatatcggtttcatcctcgccttagcatgatttatcctacactccaactcatgagacccacaacaaatagcccttctaaacgctaatccaagcctcaccccactactaggcctcctcctagcagcagcaggcaaatcagcccaattaggtctccacccctgactcccctcagccatagaaggccccaccccagtctcagccctactccactcaagcactatagttgtagcaggaatcttcttactcatccgcttccaccccctagcagaaaatagcccactaatccaaactctaacactatgcttaggcgctatcaccactctgttcgcagcagtctgcgcccttacacaaaatgacatcaaaaaaatcgtagccttctccacttcaagtcaactaggactcataatagttacaatcggcatcaaccaaccacacctagcattcctgcacatctgtacccacgccttcttcaaagccatactatttatgtgctccgggtccatcatccacaaccttaacaatgaacaagatattcgaaaaataggaggactactcaaaaccatacctctcacttcaacctccctcaccattggcagcctagcattagcaggaatacctttcctcacaggtttctactccaaagaccacatcatcgaaaccgcaaacatatcatacacaaacgcctgagccctatctattactctcatcgctacctccctaacaagcgcctatagcactcgaataattcttctcaccctaacaggtcaacctcgcttccccacccttactaacattaacgaaaataaccccaccctactaaaccccattaaacgcctggcagccggaagcctattcgcaggatttctcattactaacaacatttcccccgcatcccccttccaaacaacaatccccctctacctaaaactcacagccctcgctgtcactttcctaggacttctaacagccctagacctcaactacctaaccaacaaacttaaaataaaatccccactatgcacattttatttctccaacatactcggattctaccctagcatcacacaccgcacaatcccctatctaggccttcttacgagccaaaacctgcccctactcctcctagacctaacctgactagaaaagctattacctaaaacaatttcacagcaccaaatctccacctccatcatcacctcaacccaaaaaggcataattaaactttacttcctctctttcttcttcccactcatcctaaccctactcctaatcacataacctattcccccgagcaatctcaattacaatatatacaccaacaaacaatgttcaaccagtaactactactaatcaacgcccataatcatacaaagcccccgcaccaataggatcctcccgaatcaaccctgacccctctccttcataaattattcagcttcctacactattaaagtttaccacaaccaccaccccatcatactctttcacccacagcaccaatcctacctccatcgctaaccccactaaaacactcaccaagacctcaacccctgacccccatgcctcaggatactcctcaatagccatcgctgtagtatatccaaagacaaccatcattccccctaaataaattaaaaaaactattaaacccatataacctcccccaaaattcagaataataacacacccgaccacaccgctaacaatcaatactaaacccccataaataggagaaggcttagaagaaaaccccacaaaccccattactaaacccacactcaacagaaacaaagcatacatcattattctcgcacggactacaaccacgaccaatgatatgaaaaaccatcgttgtatttcaactacaagaacaccaatgaccccaatacgcaaaactaaccccctaataaaattaattaaccactcattcatcgacctccccaccccatccaacatctccgcatgatgaaacttcggctcactccttggcgcctgcctgatcctccaaatcaccacaggactattcctagccatgcactactcaccagacgcctcaaccgccttttcatcaatcgcccacatcactcgagacgtaaattatggctgaatcatccgctaccttcacgccaatggcgcctcaatattctttatctgcctcttcctacacatcgggcgaggcctatattacggatcatttctctactcagaaacctgaaacatcggcattatcctcctgcttgcaactatagcaacagccttcataggctatgtcctcccgtgaggccaaatatcattctgaggggccacagtaattacaaacttactatccgccatcccatacattgggacagacctagttcaatgaatctgaggaggctactcagtagacagtcccaccctcacacgattctttacctttcacttcatcttgcccttcattattgcagccctagcagcactccacctcctattcttgcacgaaacgggatcaaacaaccccctaggaatcacctcccattccgataaaatcaccttccacccttactacacaatcaaagacgccctcggcttacttctcttccttctctccttaatgacattaacactattctcaccagacctcctaggcgacccagacaattataccctagccaaccccttaaatacccctccccacatcaagcccgaatgatatttcctattcgcctacacaattctccgatccgtccctaacaaactaggaggcgtccttgccctattactatccatcctcatcctagcaataatccccatcctccatatatccaaacaacaaagcataatatttcgcccactaagccaatcactttattgactcctagccgcagacctcctcattctaacctgaatcggaggacaaccagtaagctacccttttaccatcattggacaagtagcatccgtactatacttcacaacaatcctaatcctaataccaactatctccctaattgaaaacaaaatactcaaatgggcctgtccttgtagtataaactaatacaccagtcttgtaaaccggagatgaaaacctttttccaaggacaaatcagagaaaaagtctttaactccaccattagcacccaaagctaagattctaatttaaactattctctgttctttcatggggaagcagatttgggtaccacccaagtattgactcacccatcaacaaccgctatgtatttcgtacattactgccagtcaccatgaatattgtacggtaccataaatacttgaccacctgtagtacataaaaacccaatccacatcaaacccccccccccactgcttacaagcaagtacagcaaccaaccctcaactatcacacatcaactgcaactccaaagccacccctcacccactaggataccaacaaacctacccacccttaacagtacatagtacataaagccatttaccgtacatagcacattacagtcaaatcccttctcgtccccatggatgacccccctcagataggggtcccttgaccaccatcctccgtgaaatcaatatcccgcacaagagtgctactctcctcgctccgggcccataacacttgggggtagctaaaatgaactgtatccgacatctggttcctacttcagggccataaagcctaaatagcccacacgttccccttaaataagacatcacgatg

SEQ ID NO: 377 - DNA, 16572 bp, Homo sapiens mitochondrial
  3110: "n" refers to a nucleotide at position 3107 of the Cambridge Reference Sequence (CRS, Anderson et al. 1981 Nature 290:457-465), later determined to be absent from the human mtDNA sequence according to the revised CRS (rCRS, Andrews et al. 1999 Nature Genetics 23:147); "n" therefore represents a single nucleotide deletion at a position corresponding to nucleotide 3107 of SEQ ID NO:1 as provided herein.
gatcacaggtctatcaccctattaaccactcacgggagctctccatgcatttggtattttcgtttggggggtgtgcacgcgatagcattgcgagacgctggagccggagcaccctatgtcgcagtatctgtctttgattcctgccccatcctgttatttatcgcacctacgttcaatattacaggcgaacatacttactaaagtgtgttaattaattaatgcttgtaggacatagtaataacaattgaatgtctgcacagccgctttccacacagacatcataacaaaaaatttccaccaaaccccccctccccccccgcttctggccacagcacttaaacacatctctgccaaaccccaaaaacaaaagaaccctaacaccagcctaaccagatttcaaattttatcttttggcggtatgcacttttaacagtcaccccccaactaacacattattttcccctcccactcccatactactaatctcatcaatacaacccccgcccatcctacccagcacacacaccgctgctaaccccataccccgaaccaaccaaaccccaaagacaccccccacagtttatgtagcttacctcctcaaagcaatacactgaaaatgtttagacgggctcacatcaccccataaacaaataggtttggtcctggcctttctattagctcttagtaagattacacatgcaagcatccccgttccagtgagttcaccctctaaatcaccacgatcaaaagggacaagcatcaagcacgcagcaatgcagctcaaaacgcttagcctagccacacccccacgggaaacagcagtgattaacctttagcaataaacgaaagtttaactaagctatactaaccccagggttggtcaatttcgtgccagccaccgcggtcacacgattaacccaagtcaatagaagccggcgtaaagagtgttttagatcaccccccccccacataaagctaaaactcacctgagttgtaaaaaactccagttgacacaaaatagactacgaaagtggctttaacatatctgaacacacaatagctaagacccaaactgggattagataccccactatgcttagccctaaacctcaacagttaaatcaacaaaactgctcgccagaacactacgagccacagcttaaaactcaaaggacctggcggtgcttcatatccctctagaggagcctgttctgtaatcgataaaccccgatcaacctcaccacctcttgctcagcctatataccgccatcttcagcaaaccctgatgaaggctacaaagtaagcgcaagtacccacgtaaagacgttaggtcaaggtgtagcccatgaggtggcaagaaatgggctacattttctaccccagaaaactacgatagcccttatgaaacttaagggtcgaaggtggatttagcagtaaactgagagtagagtgcttagttgaacagggccctgaagcgcgtacacaccgcccgtcaccctcctcaagtatacttcaaaggacatttaactaaaacccctacgcatttatatagaggagacaagtcgtaacatggtaagtgtactggaaagtgcacttggacgaaccagagtgtagcttaacacaaagcacccaacttacacttaggagatttcaacttaacttgaccgctctgagctaaacctagccccaaacccactccaccttactaccagacaaccttagccaaaccatttacccagataaagtataggcgatagaaattgaaacctggcgcaatagatatagtaccgcaagggaaagatgaaaaattataaccaagcataatatagcaaggactaacccctataccttctgcataatgaattaactagaaataactttgcaaggagagccaaagctaagacccccgaaaccagacgagctacctaagaacagctaaaagagcacacccgtctatgtagcaaaatagtgggaagatttataggtagaggcgacaaacctaccgagcctggtgatagctggttgtccaagatagaatcttagttcaactttaaatttgcccacagaaccctctaaatccccttgtaaatttaactgttagtccaaagaggaacagctctttggacactaggaaaaaaccttgtagagagagtaaaaaatttaacacccatagtaggcctaaaagcagccaccaattaagaaagcgttcaagctcaacacccactacctaaaaaatcccaaacatataactgaactcctcacacccaattggaccaatctatcaccctatagaagaactaatgttagtataagtaacatgaaaacattctcctccgcataagcctgcgtcagattaaaacactgaactgacaattaacagcccaatatctacaatcaaccaacaagtcattattaccctcactgtcaacccaacacaggcatgctcataaggaaaggttaaaaaaagtaaaaggaactcggcaaatcttaccccgcctgtttaccaaaaacatcacctctagcatcaccagtattagaggcaccgcctgcccagtgacacatgtttaacggccgcggtaccctaaccgtgcaaaggtagcataatcacttgttccttaaatagggacctgtatgaatggctccacgagggttcagctgtctcttacttttaaccagtgaaattgacctgcccgtgaagaggcgggcatgacacagcaagacgagaagaccctatggagctttaatttattaatgcaaacagtacctaacaaacccacaggtcctaaactaccaaacctgcattaaaaatttcggttggggcgacctcggagcagaacccaacctccgagcagtacatgctaagacttcaccagtcaaagcgaactactatactcaattgatccaataacttgaccaacggaacaagttaccctagggataacagcgcaatcctattctagagtccatatcaacaatagggtttacgacctcgatgttggatcaggacatcccgatggtgcagccgctattaaaggttcgtttgttcaacgattaaagtcctacgtgatctgagttcagaccggagtaatccaggtcggtttctatctacnttcaaattcctccctgtacgaaaggacaagagaaataaggcctacttcacaaagcgccttcccccgtaaatgatatcatctcaacttagtattatacccacacccacccaagaacagggtttgttaagatggcagagcccggtaatcgcataaaacttaaaactttacagtcagaggttcaattcctcttcttaacaacatacccatggccaacctcctactcctcattgtacccattctaatcgcaatggcattcctaatgcttaccgaacgaaaaattctaggctatatacaactacgcaaaggccccaacgttgtaggcccctacgggctactacaacccttcgctgacgccataaaactcttcaccaaagagcccctaaaacccgccacatctaccatcaccctctacatcaccgccccgaccttagctctcaccatcgctcttctactatgaacccccctccccatacccaaccccctggtcaacctcaacctaggcctcctatttattctagccacctctagcctagccgtttactcaatcctctgatcagggtgagcatcaaactcaaactacgccctgatcggcgcactgcgagcagtagcccaaacaatctcatatgaagtcaccctagccatcattctactatcaacattactaataagtggctcctttaacctctccacccttatcacaacacaagaacacctctgattactcctgccatcatgacccttggccataatatgatttatctccacactagcagagaccaaccgaacccccttcgaccttgccgaaggggagtccgaactagtctcaggcttcaacatcgaatacgccgcaggccccttcgccctattcttcatagccgaatacacaaacattattataataaacaccctcaccactacaatcttcctaggaacaacatatgacgcactctcccctgaactctacacaacatattttgtcaccaagaccctacttctaacctccctgttcttatgaattcgaacagcatacccccgattccgctacgaccaactcatacacctcctatgaaaaaacttcctaccactcaccctagcattacttatatgatatgtctccatacccattacaatctccagcatcccccctcaaacctaagaaatatgtctgataaaagagttactttgatagagtaaataataggagcttaaacccccttatttctaggactatgagaatcgaacccatccctgagaatccaaaattctccgtgccacctatcacaccccatcctaaagtaaggtcagctaaataagctatcgggcccataccccgaaaatgttggttatacccttcccgtactaattaatcccctggcccaacccgtcatctactctaccatctttgcaggcacactcatcacagcgctaagctcgcactgattttttacctgagtaggcctagaaataaacatgctagcttttattccagttctaaccaaaaaaataaaccctcgttccacagaagctgccatcaagtatttcctcacgcaagcaaccgcatccataatccttctaatagctatcctcttcaacaatatactctccggacaatgaaccataaccaatactaccaatcaatactcatcattaataatcataatggctatagcaataaaactaggaatagccccctttcacttctgagtcccagaggttgcccaaggcacccctctgacatccggcctgcttcttctcacatgacaaaaactagcccccatctcaatcatataccaaatctctccctcactaaacgtaagccttctcctcactctctcaatcttatccatcatagcaggcagttgaggtggattaaaccaaacccagctacgcaaaatcttagcatactcctcaattacccacataggatgaataatagcagttctaccgtacaaccctaacataaccattcttaatttaactatttatattatcctaactactaccgcattcctactactcaacttaaactccagcaccacgaccctactactatctcgcacctgaaacaagctaacatgactaacacccttaattccatccaccctcctctccctaggaggcctgcccccgctaaccggctttttgcccaaatgggccattatcgaagaattcacaaaaaacaatagcctcatcatccccaccatcatagccaccatcaccctccttaacctctacttctacctacgcctaatctactccacctcaatcacactactccccatatctaacaacgtaaaaataaaatgacagtttgaacatacaaaacccaccccattcctccccacactcatcgcccttaccacgctactcctacctatctccccttttatactaataatcttatagaaatttaggttaaatacagaccaagagccttcaaagccctcagtaagttgcaatacttaatttctgtaacagctaaggactgcaaaaccccactctgcatcaactgaacgcaaatcagccactttaattaagctaagcccttactagaccaatgggacttaaacccacaaacacttagttaacagctaagcaccctaatcaactggcttcaatctacttctcccgccgccgggaaaaaaggcgggagaagccccggcaggtttgaagctgcttcttcgaatttgcaattcaatatgaaaatcacctcggagctggtaaaaagaggcctaacccctgtctttagatttacagtccaatgcttcactcagccattttacctcacccccactgatgttcgccgaccgttgactattctctacaaaccacaaagacattggaacactatacctattattcggcgcatgagctggagtcctaggcacagctctaagcctccttattcgagccgagctgggccagccaggcaaccttctaggtaacgaccacatctacaacgttatcgtcacagcccatgcatttgtaataatcttcttcatagtaatacccatcataatcggaggctttggcaactgactagttcccctaataatcggtgcccccgatatggcgtttccccgcataaacaacataagcttctgactcttacctccctctctcctactcctgctcgcatctgctatagtggaggccggagcaggaacaggttgaacagtctaccctcccttagcagggaattactcccaccctggagcctccgtagacctaaccatcttctccttacacctagcaggtgtctcctctatcttaggggccatcaatttcatcacaacaattatcaatataaaaccccctgccataacccaataccaaacgcccctcttcgtctgatccgtcctaatcacagcagtcctacttctcctatctctcccagtcctagctgctggcatcactatactactaacagaccgcaacctcaacaccaccttcttcgaccccgccggaggaggagaccccattctataccaacacctattctgatttttcggtcaccctgaagtttatattcttatcctaccaggcttcggaataatctcccatattgtaacttactactccggaaaaaaagaaccatttggatacataggtatggtctgagctatgatatcaattggcttcctagggtttatcgtgtgagcacaccatatatttacagtaggaatagacgtagacacacgagcatatttcacctccgctaccataatcatcgctatccccaccggcgtcaaagtatttagctgactcgccacactccacggaagcaatatgaaatgatctgctgcagtgctctgagccctaggattcatctttcttttcaccgtaggtggcctgactggcattgtattagcaaactcatcactagacatcgtactacacgacacgtactacgttgtagctcacttccactatgtcctatcaataggagctgtatttgccatcataggaggcttcattcactgatttcccctattctcaggctacaccctagaccaaacctacgccaaaatccatttcactatcatattcatcggcgtaaatctaactttcttcccacaacactttctcggcctatccggaatgccccgacgttactcggactaccccgatgcatacaccacatgaaacatcctatcatctgtaggctcattcatttctctaacagcagtaatattaataattttcatgatttgagaagccttcgcttcgaagcgaaaagtcctaatagtagaagaaccctccataaacctggagtgactatatggatgccccccaccctaccacacattcgaagaacccgtatacataaaatctagacaaaaaaggaaggaatcgaaccccccaaagctggtttcaagccaaccccatggcctccatgactttttcaaaaaggtattagaaaaaccatttcataactttgtcaaagttaaattataggctaaatcctatatatcttaatggcacatgcagcgcaagtaggtctacaagacgctacttcccctatcatagaagagcttatcacctttcatgatcacgccctcataatcattttccttatctgcttcctagtcctgtatgcccttttcctaacactcacaacaaaactaactaatactaacatctcagacgctcaggaaatagaaaccgtctgaactatcctgcccgccatcatcctagtcctcatcgccctcccatccctacgcatcctttacataacagacgaggtcaacgatccctcccttaccatcaaatcaattggccaccaatggtactgaacctacgagtacaccgactacggcggactaatcttcaactcctacatacttcccccattattcctagaaccaggcgacctgcgactccttgacgttgacaatcgagtagtactcccgattgaaacccccattcgtataataattacatcacaagacgtcttgcactcatgagctgtccccacattaggcttaaaaacagatgcaattcccggacgtctaaaccaaaccactttcaccgctacacgaccgggggtatactacggtcaatgctctgaaatctgtggagcaaaccacagtttcatgcccatcgtcctagaattaattcccctaaaaatctttgaaatagggcccgtatttaccctatagcaccccctctaccccctctagagcccactgtaaagctaacttagcattaaccttttaagttaaagattaagagaaccaacacctctttacagtgaaatgccccaactaaatactaccgtatggcccaccataattacccccatactccttacactattcctcatcacccaactaaaaatattaaacacaaactaccacctacctccctcaccaaagcccataaaaataaaaaattataacaaaccctgagaaccaaaatgaacgaaaatctgttcgcttcattcattacccccacaatcctaggcctacccgccgcagtactgatcattctatttccccctctattgatccccacctccaaatatctcatcaacaaccgactaatcaccacccaacaatgactaatcaaactaacctcaaaacaaatgataaccatacacaacactaaaggacgaacctgatctcttatactagtatccttaatcatttttattgccacaactaacctcctcggactcctgccttactcatttacaccaaccacccaactatctataaacctagccatggccatccccttatgagcgggcgcagtgattataggctttcgctctaagattaaaaatgccctagcccacttcttaccacaaggcacacctacaccccttatccccatactagttattatcgaaaccatcagcctactcattcaaccaatagccctggccgtacgcctaaccgctaacattactgcaggccacctactcatgcacctaattggaagcgccaccctagcaatatcaaccattaaccttccctctacacttatcatcttcacaattctaattctactgactatcctagaaatcgctgtcgccttaatccaagcctacgttttcacacttctagtaagcctctacctgcacgacaacacataatgacccaccaatcacatgcctatcatatagtaaaacccagcccatgacccctaacaggggccctctcagccctcctaatgacctccggcctagccatgtgatttcacttccactccataacgctcctcatactaggcctactaaccaacacactaaccatataccaatgatggcgcgatgtaacacgagaaagcacataccaaggccaccacacaccacctgtccaaaaaggccttcgatacgggataatcctatttattacctcagaagtttttttcttcgcaggatttttctgagccttttaccactccagcctagcccctaccccccaattaggagggcactggcccccaacaggcatcaccccgctaaatcccctagaagtcccactcctaaacacatccgtattactcgcatcaggagtatcaatcacctgagctcaccatagtctaatagaaaacaaccgaaaccaaataattcaagcactgcttattacaattttactgggtctctattttaccctcctacaagcctcagagtacttcgagtctcccttcaccatttccgacggcatctacggctcaacattttttgtagccacaggcttccacggacttcacgtcattattggctcaactttcctcactatctgcttcatccgccaactaatatttcactttacatccaaacatcactttggcttcgaagccgccgcctgatactggcattttgtagatgtggtttgactatttctgtatgtctccatctattgatgagggtcttactcttttagtataaatagtaccgttaacttccaattaactagttttgacaacattcaaaaaagagtaataaacttcgccttaattttaataatcaacaccctcctagccttactactaataattattacattttgactaccacaactcaacggctacatagaaaaatccaccccttacgagtgcggcttcgaccctatatcccccgcccgcgtccctttctccataaaattcttcttagtagctattaccttcttattatttgatctagaaattgccctccttttacccctaccatgagccctacaaacaactaacctgccactaatagttatgtcatccctcttattaatcatcatcctagccctaagtctggcctatgagtgactacaaaaaggattagactgaaccgaattggtatatagtttaaacaaaacgaatgatttcgactcattaaattatgataatcatatttaccaaatgcccctcatttacataaatattatactagcatttaccatctcacttctaggaatactagtatatcgctcacacctcatatcctccctactatgcctagaaggaataatactatcgctgttcattatagctactctcataaccctcaacacccactccctcttagccaatattgtgcctattgccatactagtctttgccgcctgcgaagcagcggtgggcctagccctactagtctcaatctccaacacatatggcctagactacgtacataacctaaacctactccaatgctaaaactaatcgtcccaacaattatattactaccactgacatgactttccaaaaaacacataatttgaatcaacacaaccacccacagcctaattattagcatcatccctctactattttttaaccaaatcaacaacaacctatttagctgttccccaaccttttcctccgaccccctaacaacccccctcctaatactaactacctgactcctacccctcacaatcatggcaagccaacgccacttatccagtgaaccactatcacgaaaaaaactctacctctctatactaatctccctacaaatctccttaattataacattcacagccacagaactaatcatattttatatcttcttcgaaaccacacttatccccaccttggctatcatcacccgatgaggcaaccagccagaacgcctgaacgcaggcacatacttcctattctacaccctagtaggctcccttcccctactcatcgcactaatttacactcacaacaccctaggctcactaaacattctactactcactctcactgcccaagaactatcaaactcctgagccaacaacttaatatgactagcttacacaatagcttttatagtaaagatacctctttacggactccacttatgactccctaaagcccatgtcgaagcccccatcgctgggtcaatagtacttgccgcagtactcttaaaactaggcggctatggtataatacgcctcacactcattctcaaccccctgacaaaacacatagcctaccccttccttgtactatccctatgaggcataattataacaagctccatctgcctacgacaaacagacctaaaatcgctcattgcatactcttcaatcagccacatagccctcgtagtaacagccattctcatccaaaccccctgaagcttcaccggcgcagtcattctcataatcgcccacggacttacatcctcattactattctgcctagcaaactcaaactacgaacgcactcacagtcgcatcataatcctctctcaaggacttcaaactctactcccactaatagctttttgatgacttctagcaagcctcgctaacctcgccttaccccccactattaacctactgggagaactctctgtgctagtaaccacgttctcctgatcaaatatcactctcctacttacaggactcaacatactagtcacagccctatactccctctacatatttaccacaacacaatgaggctcactcacccaccacattaacaacataaaaccctcattcacacgagaaaacaccctcatgttcatacacctatcccccattctcctcctatccctcaaccccgacatcattaccgggttttcctcttgtaaatatagtttaaccaaaacatcagattgtgaatctgacaacagaggcttacgaccccttatttaccgagaaagctcacaagaactgctaactcatgcccccatgtctaacaacatggctttctcaacttttaaaggataacagctatccattggtcttaggccccaaaaattttggtgcaactccaaataaaagtaataaccatgcacactactataaccaccctaaccctgacttccctaattccccccatccttaccaccctcgttaaccctaacaaaaaaaactcatacccccattatgtaaaatccattgtcgcatccacctttattatcagtctcttccccacaacaatattcatgtgcctagaccaagaagttattatctcgaactgacactgagccacaacccaaacaacccagctctccctaagcttcaaactagactacttctccataatattcatccctgtagcattgttcgttacatggtccatcatagaattctcactgtgatatataaactcagacccaaacattaatcagttcttcaaatatctactcattttcctaattaccatactaatcttagttaccgctaacaacctattccaactgttcatcggctgagagggcgtaggaattatatccttcttgctcatcagttgatgatacgcccgagcagatgccaacacagcagccattcaagcaatcctatacaaccgtatcggcgatatcggtttcatcctcgccttagcatgatttatcctacactccaactcatgagacccacaacaaatagcccttctaaacgctaatccaagcctcaccccactactaggcctcctcctagcagcagcaggcaaatcagcccaattaggtctccacccctgactcccctcagccatagaaggccccaccccagtctcagccctactccactcaagcactatagttgtagcaggaatcttcttactcatccgcttccaccccctagcagaaaatagcccactaatccaaactctaacactatgcttaggcgctatcaccactctgttcgcagcagtctgcgcccttacacaaaatgacatcaaaaaaatcgtagccttctccacttcaagtcaactaggactcataatagttacaatcggcatcaaccaaccacacctagcattcctgcacatctgtacccacgccttcttcaaagccatactatttatgtgctccgggtccatcatccacaaccttaacaatgaacaagatattcgaaaaataggaggactactcaaaaccatacctctcacttcaacctccctcaccattggcagcctagcattagcaggaatacctttcctcacaggtttctactccaaagaccacatcatcgaaaccgcaaacatatcatacacaaacgcctgagccctatctattactctcatcgctacctccctgacaagcgcctatagcactcgaataattcttctcaccctaacaggtcaacctcgcttccccacccttactaacattaacgaaaataaccccaccctactaaaccccattaaacgcctggcagccggaagcctattcgcaggatttctcattactaacaacatttcccccgcatcccccttccaaacaacaatccccctctacctaaaactcacagccctcgctgtcactttcctaggacttctaacagccctagacctcaactacctaaccaacaaacttaaaataaaatccccactatgcacattttatttctccaacatactcggattctaccctagcatcacacaccgcacaatcccctatctaggccttcttacgagccaaaacctgcccctactcctcctagacctaacctgactagaaaagctattacctaaaacaatttcacagcaccaaatctccacctccatcatcacctcaacccaaaaaggcataattaaactttacttcctctctttcttcttcccactcatcctaaccctactcctaatcacataacctattcccccgagcaatctcaattacaatatatacaccaacaaacaatgttcaaccagtaactactactaatcaacgcccataatcatacaaagcccccgcaccaataggatcctcccgaatcaaccctgacccctctccttcataaattattcagcttcctacactattaaagtttaccacaaccaccaccccatcatactctttcacccacagcaccaatcctacctccatcgctaaccccactaaaacactcaccaagacctcaacccctgacccccatgcctcaggatactcctcaatagccatcgctgtagtatatccaaagacaaccatcattccccctaaataaattaaaaaaactattaaacccatataacctcccccaaaattcagaataataacacacccgaccacaccgctaacaatcaatactaaacccccataaataggagaaggcttagaagaaaaccccacaaaccccattactaaacccacactcaacagaaacaaagcatacatcattattctcgcacggactacaaccacgaccaatgatatgaaaaaccatcgttgtatttcaactacaagaacaccaatgaccccaatacgcaaaattaaccccctaataaaattaattaaccactcattcatcgacctccccaccccatccaacatctccgcatgatgaaacttcggctcactccttggcgcctgcctgatcctccaaatcaccacaggactattcctagccatgcactactcaccagacgcctcaaccgccttttcatcaatcgcccacatcactcgagacgtaaattatggctgaatcatccgctaccttcacgccaatggcgcctcaatattctttatctgcctcttcctacacatcgggcgaggcctatattacggatcatttctctactcagaaacctgaaacatcggcattatcctcctgcttgcaactatagcaacagccttcataggctatgtcctcccgtgaggccaaatatcattctgaggggccacagtaattacaaacttactatccgccatcccatacattgggacagacctagttcaatgaatctgaggaggctactcagtagacagtcccaccctcacacgattctttacctttcacttcatcttgcccttcattattgcagccctagcagcactccacctcctattcttgcacgaaacgggatcaaacaaccccctaggaatcacctcccattccgataaaatcaccttccacccttactacacaatcaaagacgccctcggcttacttctcttccttctctccttaatgacattaacactattctcaccagacctcctaggcgacccagacaattataccctagccaaccccttaaacacccctccccacatcaagcccgaatgatatttcctattcgcctacacaattctccgatccgtccctaacaaactaggaggcgtccttgccctattactatccatcctcatcctagcaataatccccatcctccatatatccaaacaacaaagcataatatttcgcccactaagccaatcactttattgactcctagccgcagacctcctcattctaacctgaatcggaggacaaccagtaagctacccttttaccatcattggacaagtagcatccgtactatacttcacaacaatcctaatcctaataccaactatctccctaattgaaaacaaaatactcaaatgggcctgtccttgtagtataaactaatacaccagtcttgtaaaccggagatgaaaacctttttccaaggacaaatcagagaaaaagtctttaactccaccattagcacccaaagctaagattctaatttaaactattctctgttctttcatggggaagcagatttgggtaccacccaagtattgactcacccatcaacaaccgctatgtatttcgtacattactgccagtcaccatgaatattgtacggtaccataaatacttgaccacctgtagtacataaaaacccaatccacatcaaaaccccctccccatgcttacaagcaagtacagcaatcaaccttcaactatcacacatcaactgcaactccaaagccacccctcacccactaggataccaacaaacctatccacccttaacagtacatagtacataaaaccatttaccgtacatagcacattacagtcaaatcccttctcgcccccatggatgacccccctcagataggggtcccttgaccaccatcctccgtgaaatcaatatcccgcacaagagtgctactctcctcgctccgggcccataacacctgggggtagctaaagtgaactgtatccgacatctggttcctacttcagggtcataaagcctaaatagcccacacgttccccttaaataagacatcacgatg

SEQ ID NO: 378 - DNA, 16571 bp, Homo sapiens mitochondrial
  3109: "n" refers to a nucleotide at position 3107 of the Cambridge Reference Sequence (CRS, Anderson et al. 1981 Nature 290:457-465), later determined to be absent from the human mtDNA sequence according to the revised CRS (rCRS, Andrews et al. 1999 Nature Genetics 23:147); "n" therefore represents a single nucleotide deletion at a position corresponding to nucleotide 3107 of SEQ ID NO:1 as provided herein.
gatcacaggtctatcaccctattaaccactcacgggagctctccatgcatttggtattttcgtctggggggtgtgcacgcgatagcattgcgagacgctggagccggagcaccctatgtcgcagtatctgtctttgattcctgcctcatcctattatttatcgcacctacgttcaatattacaggcgaacatacttactaaagtgtgttaattaattaatgcttgtaggacataataataacaattgaatgtctgcacagccgcttcccacacagacatcataacaaaaaatttccaccaaaccccccctcccccccgcttctggccacagcacttaaacacatctctgccaaaccccaaaaacaaagaaccctaacaccagcctaaccagatttcaaattttatcttttggcggtatgcacttttaacagtcaccccccaactaacacattattttcccctcccactcccatactactaatctcatcaacacaacccccgcccatcctacccagcacacacacaccgctgctaaccccataccccgaaccaaccaaaccccaaagacaccccccacagtttatgtagcttacctcctcaaagcaatacactgaaaatgtttagacgggctcacatcaccccataaacaaataggtttggtcctagcctttctattagctcttagtaagattacacatgcaagcatccccgttccagtgagttcaccctctaaatcaccacgatcaaaagggacaagcatcaagcacgcagcaatgcagctcaaaacgcttagcctagccacacccccacgggaaacagcagtgattaacctttagcaataaacgaaagtttaactaagctatactaaccccagggttggtcaatttcgtgccagccaccgcggtcacacgattaacccaagtcaatagaagccggcgtaaagagtgttttagatcaccccctccccaataaagctaaaactcacctgagttgtaaaaaactccagttgacacaaaatagactacgaaagtggctttaacatatctgaacacacaatagctaagacccaaactgggattagataccccactatgcttagccctaaacctcaacagttaaatcaacaaaactgctcgccagaacactacgagccacagcttaaaactcaaaggacctggcggtgcttcatatccctctagaggagcctgttctgtaatcgataaaccccgatcaacctcaccacctcttgctcagcctatataccgccatcttcagcaaaccctgatgaaggctacaaagtaagcgcaagtacccacgtaaagacgttaggtcaaggtgtagcccatgaggtggcaagaaatgggctacattttctaccccagaaaactacgatagcccttatgaaacttaagggtcgaaggtggatttagcagtaaactgagagtagagtgcttagttgaacagggccctgaagcgcgtacacaccgcccgtcaccctcctcaagtatacttcaaaggacatttaactaaaacccctacgcatttatatagaggagacaagtcgtaacatggtaagtgtactggaaagtgcacttggacgaaccagagtgtagcttaacacaaagcacccaacttacacttaggagatttcaacttaacttgaccgctctgagctaaacctagccccaaacccactccaccttactaccagacaaccttagccaaaccatttacccaaataaagtataggcgatagaaattgaaacctggcgcaatagatatagtaccgcaagggaaagatgaaaaattataaccaagcataatatagcaaggactaacccctataccttctgcataatgaattaactagaaataactttgcaaggagagccaaagctaagacccccgaaaccagacgagctacctaagaacagctaaaagagcacacccgtctatgtagcaaaatagtgggaagatttataggtagaggcgacaaacctaccgagcctggtgatagctggttgtccaagatagaatcttagttcaactttaaatttgcccacagaaccctctaaatccccttgtaaatttaattgttagtccaaagaggaacagctctttggacactaggaaaaaaccttgtagagagagtaaaaaatttaacacccatagtaggcctaaaagcagccaccaattaagaaagcgttcaagctcaacacccactacctaaaaaatcccaaacatataactgaactcctcacacccaattggaccaatctatcaccctatagaagaactaatgttagtataagtaacatgaaaacattctcctccgcataagcctgcgtcagattaaaacactgaactgacaattaacagcccaatatctacaatcaaccaacaagtcattattaccctcactgtcaacccaacacaggcatgctcataaggaaaggttaaaaaaagtaaaaggaactcggcaaatcttaccccgcctgtttaccaaaaacatcacctctagcatcaccagtattagaggcaccgcctgcccagtgacacatgtttaacggccgcggtaccctaaccgtgcaaaggtagcataatcacttgttccttaaatagggacctgtatgaatggctccacgagggttcagctgtctcttacttttaaccagtgaaattgacctgcccgtgaagaggcgggcatgacacagcaagacgagaagaccctatggagctttaatttattaatgcaaacagtacctaacaaacccacaggtcctaaactaccaaacctgcattaaaaatttcggttggggcgacctcggagcagaacccaacctccgagcagtacatgctaagacttcaccagtcaaagcgaactactatactcaattgatccaataacttgaccaacggaacaagttaccctagggataacagcgcaatcctattctagagtccatatcaacaatagggtttacgacctcgatgttggatcaggacatcccaatggtgcagccgctattaaaggttcgtttgttcaacgattaaagtcctacgtgatctgagttcagaccggagtaatccaggtcggtttctatctacnttcaaattcctccctgtacgaaaggacaagagaaataaggcctacttcacaaagcgccttcccccgtaaatgatatcatctcaacttagtattatacccacacccacccaagaacagggtttgttaagatggcagagcccggtaatcgcataaaacttaaaactttacagtcagaggttcaattcctcttcttaacaacatacccatggccaacctcctactcctcattgtacccattctaatcgcaatggcattcctaatgcttaccgaacgaaaaattctaggctatatacaactacgcaaaggccccaacgttgtaggcccctacgggctactacaacccttcgctgacgccataaaactcttcaccaaagagcccctaaaacccgccacatctaccatcaccctctacatcaccgccccgaccttagctctcaccatcgctcttctactatgaacccccctccccatacccaaccccctggtcaacctcaacctaggcctcctatttattctagccacctctagcctagccgtttactcaatcctctgatcagggtgagcatcaaactcaaactacgccctgatcggcgcactgcgagcagtagcccaaacaatctcatatgaagtcaccctagccatcattctactatcaacattactaataagtggctcctttaacctctccacccttatcacaacacaagaacacctctgattactcctgccatcatgacccttggccataatatgatttatctccacactagcagagaccaaccgaacccccttcgaccttgccgaaggggagtccgaactagtctcaggcttcaacatcgaatacgccgcaggccccttcgccctattcttcatagccgaatacacaaacattattataataaacaccctcaccactacaatcttcctaggaacaacatatgacgcactctcccctgaactctacacaacatattttgtcaccaagaccctacttctaacctccctgttcttatgaattcgaacagcatacccccgattccgctacgaccaactcatacacctcctatgaaaaaacttcctaccactcaccctagcattacttatatgatatgtctccatacccattacaatctccagcattccccctcaaacctaagaaatatgtctgataaaagagttactttgatagagtaaataataggagcttaaacccccttatttctaggactatgagaatcgaacccatccctgagaatccaaaattctccgtgccacctatcacaccccatcctaaagtaaggtcagctaaataagctatcgggcccataccccgaaaatgttggttatacccttcccgtactaattaatcccctggcccaacccgtcatctactctaccatctttgcaggcacactcatcacagcgctaagctcgcactgattttttacctgagtaggcctagaaataaacatgctagcttttattccagttctaaccaaaaaaataaaccctcgttccacagaagctgccatcaagtatttcctcacgcaagcaaccgcatccataatccttctaatagctatcctcttcaacaatatactctccggacaatgaaccataaccaatactaccaatcaatactcatcattaataatcataatggctatagcaataaaactaggaatagccccctttcacttctgagtcccagaggttacccaaggcacccctctgacatccggcctgcttcttctcacatgacaaaaactagcccctatctcaatcatataccaaatctctccctcactaaacgtaagccttctcctcactctctcaatcttatccatcatagcaggcagttgaggtggattaaaccaaacccagctacgcaaaatcttagcatactcctcaattacccacataggatgaataatagcagttctaccgtacaaccctaacataaccattcttaatttaactatttatattatcctaactactaccgcattcctactactcaacttaaactccagcaccacgaccctactactatctcgcacctgaaacaagataacatgactaacacccttaattccatccaccctcctctccctaggaggcctgcccccgctaaccggctttttgcccaaatgggccattatcgaagaattcacaaaaaacaatagcctcatcatccccaccatcatagccaccatcaccctccttaacctctacttctacctacgcctaatctactccacctcaatcacactactccccatatctaacaacgtaaaaataaaatgacagtttgaacatacaaaacccaccccattcctccccacactcatcgcccttaccacgctactcctacctatctccccttttatactaataatcttatagaaatttaggttaaatacagaccaagagccttcaaagccctcagtaagttgcaatacttaatttctgtaacagctaaggactgcaaaaccccactctgcatcaactgaacgcaaatcagccactttaattaagctaagcccttactagaccaatgggacttaaacccacaaacacttagttaacagctaagcaccctaatcaactggcttcaatctacttctcccgccgccgggaaaaaaggcgggagaagccccggcaggtttgaagctgcttcttcgaatttgcaattcaatatgaaaatcacctcggagctggtaaaaagaggcctaacccctgtctttagatttacagtccaatgcttcactcagccattttacctcacccccactgatgttcgccgaccgttgactattctctacaaaccacaaagacattggaacactatacctattattcggcgcatgagctggagtcctaggcacagctctaagcctccttattcgagccgagctgggccagccaggcaaccttctaggtaacgaccacatctacaacgttatcgtcacagcccatgcatttgtaataatcttcttcatagtaatacccatcataatcggaggctttggcaactgactagttcccctaataatcggtgcccccgatatggcgtttccccgcataaacaacataagcttctgactcttacctccctctctcctactcctgctcgcatctgctatagtggaagccggagcaggaacaggttgaacagtctaccctcccttagcagggaactactcccaccctggagcctccgtagacctaaccatcttctccttacacctagcaggtgtctcctctatcttaggggccatcaatttcatcacaacaattatcaatataaaaccccctgccataacccaataccaaacgcccctcttcgtctgatccgtcctaatcacagcagtcctacttctcctatctctcccagtcctagctgctggcatcactatactactaacagaccgcaacctcaacaccaccttcttcgaccccgccggaggaggagaccccattctataccaacacctattctgatttttcggtcaccctgaagtttatattcttatcctaccaggcttcggaataatctcccatattgtaacttactactccggaaaaaaagaaccatttggatacataggtatggtctgagctatgatatcaattggcttcctagggtttatcgtgtgagcacaccatatatttacagtaggaatagacgtagacacacgagcatatttcacctccgctaccataatcatcgctatccccaccggcgtcaaagtatttagctgactcgccacactccacggaagcaatatgaaatgatctgctgcagtgctctgagccctaggattcatctttcttttcaccgtaggtggcctgactggcattgtattagcaaactcatcactagacatcgtactacacgacacgtactacgttgtagctcacttccactatgtcctatcaataggagctgtatttgccatcataggaggcttcattcactgatttcccctattctcaggctacaccctagaccaaacctacgccaaaatccatttcactatcatattcatcggcgtaaatctaactttcttcccacaacactttctcggcctatccggaatgccccgacgttactcggactaccccgatgcatacaccacatgaaacatcctatcatctgtaggctcattcatttctctaacagcagtaatattaataattttcatgatttgagaagccttcgcttcgaagcgaaaagtcctaatagtagaagaaccctccataaacctggagtgactatatggatgccccccaccctaccacacattcgaagaacccgtatacataaaatctagacaaaaaaggaaggaatcgaaccccccaaagctggtttcaagccaaccccatggcctccatgactttttcaaaaaggtattagaaaaaccatttcataactttgtcaaagttaaattataggctaaatcctatatatcttaatggcacatgcagcgcaagtaggtctacaagacgctacttcccctatcatagaagagcttatcacctttcatgatcacgccctcataatcattttccttatctgcttcctagtcctgtatgcccttttcctaacactcacaacaaaactaactaatactaacatctcagacgctcaggaaatagaaaccgtctgaactatcctgcccgccatcatcctagtcctcatcgccctcccatccctacgcatcctttacataacagacgaggtcaacgatccctcccttaccatcaaatcaattggccaccaatggtactgaacctacgagtacaccgactacggcggactaatcttcaactcctacatacttcccccattattcctagaaccaggcgacctgcgactccttgacgttgacaatcgagtagtactcccgattgaagcccccattcgtataataattacatcacaagacgtcttgcactcatgagctgtccccacattaggcttaaaaacagatgcaattcccggacgtctaaaccaaaccactttcaccgctacacgaccgggggtatactacggtcaatgctctgaaatctgtggagcaaaccacagtttcatgcccatcgtcctagaattaattcccctaaaaatctttgaaatagggcccgtatttaccctatagcaccccctctaccccctctagagcccactgtaaagctaacttagcattaaccttttaagttaaagattaagagaaccaacacctctttacagtgaaatgccccaactaaatactaccgtatggcccaccataattacccccatattccttacactattcctcatcacccaactaaaaatattaaacacaaactaccacctacctccctcaccaaagcccataaaaataaaaaattataacaaaccctgagaaccaaaatgaacgaaaatctgttcgcttcattcattgcccccacaatcctaggcctacccgccgcagtactgatcattctatttccccctctattgatccccacctccaaatatctcatcaacaaccgactaatcaccacccaacaatgactaatcaaactaacctcaaaacaaatgatagccatacacaacactaaaggacgaacctgatctcttatactagtatccttaatcatttttattgccacaactaacctcctcggactcctgcctcactcatttacaccaaccacccaactatctataaacctagccatggccatccccttatgagcgggcgcagtgattataggctttcgctctaagattaaaaatgccctagcccacttcttaccacaaggcacacctacaccccttatccccatactagttattatcgaaaccatcagcctactcattcaaccaatagccctggccgtacgcctaaccgctaacattactgcaggccacctactcatgcacctaattggaagcgccaccctagcaatatcaaccattaaccttccctctacacttatcatcttcacaattctaattctactgactatcctagaaatcgctgtcgccttaatccaagcctacgttttcacacttctagtaagcctctacctgcacgacaacacataatgacccaccaatcacatgcctatcatatagtaaaacccagcccatgacccctaacaggggccctctcagccctcctaatgacctccggcctagccatgtgatttcacttccactccataacgctcctcatactaggcctactaaccaacacactaaccatataccaatgatggcgcgatgtaacacgagaaagcacataccaaggccaccacacaccacctgtccaaaaaggccttcgatacgggataatcctatttattacctcagaagtttttttcttcgcaggatttttctgagccttttaccactccagcctagcccctaccccccaactaggagggcactggcccccaacaggcatcaccccgctaaatcccctagaagtcccactcctaaacacatccgtattactcgcatcaggagtatcaatcacctgagctcaccatagtctaatagaaaacaaccgaaaccaaataattcaagcactgcttattacaattttactgggtctctattttaccctcctacaagcctcagagtacttcgagtctcccttcaccatttccgacggcatctacggctcaacattttttgtagccacaggcttccacggacttcacgtcattattggctcaactttcctcactatctgcttcatccgccaactaatatttcactttacatccaaacatcactttggcttcgaagccgccgcctgatactggcattttgtagatgtggtttgactatttctgtatgtctccatctattgatgagggtcttactcttttagtataaatagtaccgttaacttccaattaactagttttgacaacattcaaaaaagagtaataaacttcgccttaattttaataatcaacaccctcctagccttactactaataattattacattttgactaccacaactcaacggctacatagaaaaatccaccccttacgagtgcggcttcgaccctatatcccccgcccgcgtccctttctccataaaattcttcttagtagctattaccttcttattatttgatctagaaattgccctccttttacccctaccatgagccctacaaacaactaacctgccactaatagttatgtcatccctcttattaatcatcatcctagccctaagtctggcctatgagtgactacaaaaaggattagactgagctgaattggtatatagtttaaacaaaacgaatgatttcgactcattaaattatgataatcatatttaccaaatgcccctcatttacataaatattatactagcatttaccatctcacttctaggaatactagtatatcgctcacacctcatatcctccctactatgcctagaaggaataatactatcgctgttcattatagctactctcataaccctcaacacccactccctcttagccaatattgtgcctattgccatactagtctttgccgcctgcgaagcagcggtgggcctagccctactagtctcaatctccaacacatatggcctagactacgtacataacctaaacctactccaatgctaaaactaatcgtcccaacaattatattactaccactgacatgactttccaaaaaacacataatttgaatcaacacaaccacccacagcctaattattagcatcatccccctactattttttaaccaaatcaacaacaacctatttagctgttccccaaccttttcctccgaccccctaacaacccccctcctaatactaactacctgactcctacccctcacaatcatggcaagccaacgccacttatccagtgaaccactatcacgaaaaaaactctacctctctatactaatctccctacaaatctccttaattataacattcacagccacagaactaatcatattttatatcttcttcgaaaccacacttatccccaccttggctatcatcacccgatgaggcaaccagccagaacgcctgaacgcaggcacatacttcctattctacaccctagtagggttccttcccctactcatcgcactaatttacactcacaacaccctaggctcactaaacattctactactcactctcactgcccaagaactatcaaactcctgagccaacaacttaatatgactagcttacacaatagcttttatagtaaagatacctctttacggactccacttatgactccctaaagcccatgtcgaagcccccatcgctgggtcaatagtacttgccgcagtactcttaaaactaggcggctatggtataatacgcctcacactcattctcaaccccctgacaaaacacatagcctaccccttccttgtactatccctatgaggcataattataacaagctccatctgcctacgtcaaacagacctaaaatcgctcattgcatactcttcaatcagccacatagccctcgtagtaacagccattctcatccaaaccccctgaagcttcaccggcgcagtcattctcataatcgcccacggacttacatcctcattactattctgcctagcaaactcaaactacgaacgcactcacagtcgcatcataatcctctctcaaggacttcaaactctactcccactaatagctttttgatgacttctagcaagcctcgctaacctcgccttaccccccactattaacctactgggagaactctctgtgctagtaaccacgttctcctgatcaaatatcactctcctacttacaggactcaacatactagtcacagccctatactccctctacatatttaccacaacacaatggggctcactcacccaccacattaacaacataaaaccctcattcacacgagaaaacaccctcatgttcatacacctatcccccattctcctcctatccctcaaccccgacatcattaccgggttttcctcttgtaaatatagtttaaccaaaacatcagattgtgaatctgacaacagaggcttacgaccccttatttaccgagaaagctcacaagaactgctaactcatgcccccatgtctaacaacatggctttctcaacttttaaaggataacagctatccattggtcttaggccccaaaaattttggtgcaactccaaataaaagtaataaccatgcacactactataaccaccctaaccctgacttccctaattccccccatccttaccaccctcgttaaccctaacaaaaaaaactcatacccccattatgtaaaatccattgtcgcatccacctttattatcagtctcttccccacaacaatattcatgtgcctagaccaagaagttattatctcgaactgacactgagccacaacccaaacaacccagctctccctaagcttcaaactagactacttctccataatattcatccctgtagcattgttcgttacatggtccatcatagaattctcactgtgatatataaactcagacccaaacattaatcagttcttcaaatatctactcattttcctaattaccatactaatcttagttaccgctaacaacctattccaactgttcatcggctgagagggcgtaggaattatatccttcttgctcatcagttgatgatacgcccgagcagatgccaacacagcagccattcaagcaatcctatacaaccgtatcggcgatatcggtttcatcctcgccttagcatgatttatcctacactccaactcatgagacccacaacaaatagcccttctaaacgctaatccaagcctcaccccactactaggcctcctcctagcagcagcaggcaaatcagcccaattaggtctccacccctgactcccctcagccatagaaggccccaccccagtctcagccctactccactcaagcactatagttgtagcaggaatcttcttactcatccgcttccaccccctagcagaaaatagcccactaatccaaactctaacactatgcttaggcgctatcaccactctgttcgcagcagtctgcgcccttacacaaaatgacatcaaaaaaatcgtagccttctccacttcaagtcaactaggactcataatagttacaatcggcatcaaccaaccacacctagcattcctgcacatctgtacccacgccttcttcaaagccatactatttatgtgctccgggtccatcatccacaaccttaacaatgaacaagatattcgaaaaataggaggactactcaaaaccatacctctcacttcaacctccctcaccattggcagcctagcattagcaggaatacctttcctcacaggtttctactccaaagaccacatcatcgaaaccgcaaacatatcatacacaaacgcctgagccctatctattactctcatcgctacctccctgacaagcgcctatagcactcgaataattcttctcaccctaacaggtcaacctcgcttccccacccttactaacattaacgaaaataaccccaccctactaaaccccattaaacgcctggcagccggaagcctattcgcaggatttctcattactaacaacatttcccccgcatcccccttccaaacaacaatccccctctacctaaaactcacagccctcgctgtcactttcctaggacttctaacagccctagacctcaactacctaaccaacaaacttaaaataaaatccccactatgcacattttatttctccaacatactcggattctaccctagcatcacacaccgcacaatcccctatctaggccttcttacgagccaaaacctgcccctactcctcctagacctaacctgactagaaaagctattacctaaaacaatttcacagcaccaaatctccacctccatcatcacctcaacccaaaaaggcataattaaactttacttcctctctttcttcttcccactcatcctaaccctactcctaatcacataacctattcccccgagcaatctcaattacaatatatacaccaacaaacaatgttcaaccagtaactactactaatcaacgcccataatcatacaaagcccccgcaccaataggatcctcccgaatcaaccctgacccctctccttcataaattattcagcttcctacactattaaagtttaccacaaccaccaccccatcatactctttcacccacagcaccaatcctacctccatcgctaaccccactaaaacactcaccaagacctcaacccctgacccccatgcctcaggatactcctcaatagccatcgctgtagtatatccaaagacaaccatcattccccctaaataaattaaaaaaactattaaacccatataacctcccccaaaattcagaataataacacacccgaccacaccgctaacaatcaatactaaacccccataaataggagaaggcttagaagaaaaccccacaaaccccattactaaacccacactcaacagaaacaaagcatatatcattattctcgcacggactacaaccacgaccaatgatatgaaaaaccatcgttgtatttcaactacaagaacaccaatgaccccaatacgcaaaattaaccccctaataaaactaattaaccactcattcatcgacctccccaccccatccaacatctccgcatgatgaaacttcggctcactccttggcgcctgcctgatcctccaaatcaccacaggactattcctagccatgcactactcaccagacgcctcaaccgccttttcatcaatcgcccacatcactcgagacgtaaattatggctgaatcatccgctaccttcacgccaatggcgcctcaatattctttatctgcctcttcctacacatcggacgaggcctatattacggatcatttctctactcagaaacctgaaacatcggcattatcctcctgcttgcaactatagcaacagccttcataggctatgtcctcccgtgaggccaaatatcattctgaggggccacagtaattacaaacttactatccgccatcccatacattgggacagacctagttcaatgaatctgaggaggctactcagtagacagtcccaccctcacacgattctttacctttcacttcatcttacccttcattattgcagccctagcagcactccacctcctattcttgcacgaaacgggatcaaacaaccccctaggaatcacctcccattccgataaaatcaccttccacccttactacacaatcaaagacgccctcggcttacttctcttccttctctccttaatgacattaacactattctcaccagacctcctaggcgacccagacaattataccctagccaaccccttaaacacccctccccacatcaagcccgaatgatatttcctattcgcctacacaattctccgatccgtccctaacaaactaggaggcgtccttgccctattactatccatcctcatcctagcaataatccccatcctccatatatccaaacaacaaagcataatatttcgcccactaagccaatcactttattgactcctagccgcagacctcctcattctaacctgaatcggaggacaaccagtaagctacccttttaccatcattggacaagtagcatccgtactatacttcacaacaatcctaatcctaataccaactatctccctaattgaaaacaaaatactcaaatgggcctgtccttgtagtataaactaatacaccagtcttgtaaaccggagatgaaaacctttttccaaggacaaatcagagaaaaagtctttaactccaccattagcacccaaagctaagattctaatttaaactattctctgttctttcatggggaagcagatttgggtaccacccaagtattgactcacccatcaacaaccgctatgtatttcgtacattactgccagccaccatgaatattgtacggtaccataaatacttgaccacctgtagtacataaaaacccaatccacatcaaaaccccctccccatgcttacaagcaagtacagcaatcaaccttcaactatcacacatcaactgcaactccaaagccacccctcacccactagaataccaacaaacctacccacccttaacagtacatagtacataaagccattcaccgtacatagcacattacagtcaaatcccttctcgcccccatggatgacccccctcagataggggtcccttgaccaccatcctccgtgaaatcaatatcccgcacaagagtgctactctcctcgctccgggcccataacacttgggggtagctaaagtgaactgtatccgacatctggttcctacttcagggtcataaagcctaaatagcccacacgttccccttaaataagacatcacgatg

SEQ ID NO: 379 - DNA, 16568 bp, Homo sapiens mitochondrial
  3106: "n" refers to a nucleotide at position 3107 of the Cambridge Reference Sequence (CRS, Anderson et al. 1981 Nature 290:457-465), later determined to be absent from the human mtDNA sequence according to the revised CRS (rCRS, Andrews et al. 1999 Nature Genetics 23:147); "n" therefore represents a single nucleotide deletion at a position corresponding to nucleotide 3107 of SEQ ID NO:1 as provided herein.
gatcacaggtctatcaccctattaaccactcacgggagctctccatgcatttggtattttcgtctggggggtatgcacgcgatagcattgcgagacgctggagccggagcaccctatgtcgcagtatctgtctttgattcctgcctcatcctattatttatcgcacctacgttcaatattacaggcgaacatacttactaaagtgtgttaattaattaatgcttgtaggacataataataacaattgaatgtctgcacagccgctttccacacagacatcataacaaaaaatttccaccaaaccccccctcccccgccttctggccacagcacttaaacacatctctgccaaaccccaaaaacaaagaaccctaacaccagcctaaccagatttcaaattttatcttttggcggtatgcacttttaacagtcaccccccaactaacacattattttcccctcccactcccatactactaatctcatcaatacaacccccgcccatcctacccagcacacacaccgctgctaaccccataccccgaaccaaccaaaccccaaagacaccccccacagtttatgtagcttacctcctcaaagcaatacactgaaaatgtttagacgggctcacatcaccccataaacaaataggtttggtcctagcctttctattagctcttagtaagattacacatgcaagcatccccgttccagtgagttcaccctctaaatcaccacgatcaaaagggacaagcatcaagcacgcagcaatgcagctcaaaacgcttagcctagccacacccccacgggaaacagcagtgattaacctttagcaataaacgaaagtttaactaagctatactaaccccagggttggtcaatttcgtgccagccaccgcggtcacacgattaacccaagtcaatagaagccggcgtaaagagtgttttagatcaccccctccccaataaagctaaaactcacctgagttgtaaaaaactccagttgacacaaaatagactacgaaagtggctttaacatatctgaacacacaatagctaagacccaaactgggattagataccccactatgcttagccctaaacctcaacagttaaatcaacaaaactgctcgccagaacactacgagccacagcttaaaactcaaaggacctggcggtgcttcatatccctctagaggagcctgttctgtaatcgataaaccccgatcaacctcaccacctcttgctcagcctatataccgccatcttcagcaaaccctgatgaaggctacaaagtaagcgcaagtacccacgtaaagacgttaggtcaaggtgtagcccatgaggtggcaagaaatgggctacattttctaccccagaaaactacgatagcccttatgaaacttaagggtcgaaggtggatttagcagtaaactgagagtagagtgcttagttgaacagggccctgaagcgcgtacacaccgcccgtcaccctcctcaagtatacttcaaaggacatttaactaaaacccctacgcatttatatagaggagacaagtcgtaacatggtaagtgtactggaaagtgcacttggacgaaccagagtgtagcttaacacaaagcacccaacttacacttaggagatttcaacttaacttgaccgctctgagctaaacctagccccaaacccactccaccttactaccagacaaccttagccaaaccatttacccaaataaagtataggcgatagaaattgaaacctggcgcaatagatatagtaccgcaagggaaagatgaaaaattataaccaagcataatatagcaaggactaacccctataccttctgcataatgaattaactagaaataactttgcaaggagagccaaagctaagacccccgaaaccagacgagctacctaagaacagctaaaagagcacacccgtctatgtagcaaaatagtgggaagatttataggtagaggcgacaaacctaccgagcctggtgatagctggttgtccaagatagaatcttagttcaactttaaatttgcccacagaaccctctaaatccccttgtaaatttaactgttagtccaaagaggaacagctctttggacactaggaaaaaaccttgtagaaagagtaaaaaatttaacacccatagtaggcctaaaagcagccaccaattaagaaagcgttcaagctcaacacccactacctaaaaaatcccaaacatataactgaactcctcacacccaattggaccaatctatcaccctatagaagaactaatgttagtataagtaacatgaaaacattctcctccgcataagcctgcgtcagattaaaacactgaactgacaattaacagcccaatatctacaatcaaccaacaagtcattattaccctcactgtcaacccaacacaggcatgctcataaggaaaggttaaaaaaagtaaaaggaactcggcaaatcttaccccgcctgtttaccaaaaacatcacctctagcatcaccagtattagaggcaccgcctgcccagtgacacatgtttaacggccgcggtaccctaaccgtgcaaaggtagcataatcacttgttccttaaatagggacctgtatgaatggctccacgagggttcagctgtctcttacttttaaccagtgaaattgacctgcccgtgaagaggcgggcataacacagcaagacgagaagaccctatggagctttaatttattaatgcaaacagtacctaacaaacccacaggtcctaaactaccaaacctgcattaaaaatttcggttggggcgacctcggagcagaacccaacctccgagcagtacatgctaagacttcaccagtcaaagcgaactactatactcaattgatccaataacttgaccaacggaacaagttaccctagggataacagcgcaatcctattctagagtccatatcaacaatagggtttacgacctcgatgttggatcaggacatcccaatggtgcagccgctattaaaggttcgtttgttcaacgattaaagtcctacgtgatctgagttcagaccggagtaatccaggtcggtttctatctacnttcaaattcctccctgtacgaaaggacaagagaaataaggcctacttcacaaagcgccttcccccgtaaatgatatcatctcaacttagtattatacccacacccacccaagaacagggtttgttaagatggcagagcccggtaatcgcataaaacttaaaactttacagtcagaggttcaattcctcttcttaacaacatacccatggccaacctcctactcctcattgtacccattctaatcgcaatggcattcctaatgcttaccgaacgaaaaattctaggctatatacaactacgcaaaggccccaacgttgtaggcccctacgggctactacaacccttcgctgacgccataaaactcttcaccaaagagcccctaaaacccgccacatctaccatcaccctctacatcaccgccccgaccttagctctcaccatcgctcttctactatgaacccccctccccatacccaaccccctggtcaacctcaacctaggcctcctatttattctagccacctctagcctagccgtttactcaatcctctgatcagggtgagcatcaaactcaaactacgccctgatcggcgcactgcgagcagtagcccaaacaatctcatatgaagtcaccctagccatcattctactatcaacattactaataagtggctcctttaacctctccgcccttatcacaacacaagaacacctctgattactcctgccatcatgacccttggccataatatgatttatctccacactagcagagaccaaccgaacccccttcgaccttgccgaaggggagtccgaactagtctcaggcttcaacatcgaatacgccgcaggccccttcgccctattcttcatagccgaatacacaaacattattataataaacaccctcaccactacaatcttcctaggaacaacatatgacgcactctcccctgaactctacacaacatattttgtcaccaagaccctacttctaacctccctgttcttatgaattcgaacagcatacccccgattccgctacgaccaactcatacacctcctatgaaaaaacttcctaccactcaccctagcattacttatatgatatgtctccatacccattacaatctccagcattccccctcaaacctaagaaatatgtctgataaaagagttactttgatagagtaaataataggagcttaaacccccttatttctaggactatgagaatcgaacccatccctgagaatccaaaattctccgtgccacctatcacaccccatcctaaagtaaggtcagctaaataagctatcgggcccataccccgaaaatgttggttatacccttcccgtactaattaatcccctggcccaacccgtcatctactctaccatctttgcaggcacactcatcacagcgctaagctcgcactgattttttacctgagtaggcctagaaataaacatgctagcttttattccagttctaaccaaaaaaataaaccctcgttccacagaagctgccatcaagtatttcctcacgcaagcaaccgcatccataatccttctaatagctatcctcttcaacaatatactctccggacaatgaaccataaccaatactaccaatcaatactcatcattaataatcataatggctatagcaataaaactaggaatagccccctttcacttctgagtcccagaggttacccaaggcacccctctgacatccggcctgcttcttctcacatgacaaaaactagcccccatctcaatcatataccaaatctctccctcactaaacgtaagccttctcctcactctctcaatcttatccatcatagcaggcagttgaggtggattaaaccaaacccagctacgcaaaatcttagcatactcctcaattacccacataggatgaataatagcagttctaccgtacaaccctaacataaccattcttaatttaactatttatattatcctaactactaccgcattcctactactcaacttaaactccagcaccacgaccctactactatctcgcacctgaaacaagctaacatgactaacacccttaattccatccaccctcctctccctaggaggcctgcccccgctaaccggctttttgcccaaatgggccattatcgaagaattcacaaaaaacaatagcctcatcatccccaccatcatagccaccatcaccctccttaacctctacttctacctacgcctaatctactccacctcaatcacactactccccatatctaacaacgtaaaaataaaatgacagtttgaacatacaaaacccaccccattcctccccacactcatcgcccttaccacgctactcctacctatctccccttttatactaataatcttatagaaatttaggttaaatacagaccaagagccttcaaagccctcagtaagttgcaatacttaatttctgtaacagctaaggactgcaaaaccccactctgcatcaactgaacgcaaatcagccactttaattaagctaagcccttactagaccaatgggacttaaacccacaaacacttagttaacagctaagcaccctaatcaactggcttcaatctacttctcccgccgccgggaaaaaaggcgggagaagccccggcaggtttgaagctgcttcttcgaatttgcaattcaatatgaaaatcacctcggagctggtaaaaagaggcctaacccctgtctttagatttacagtccaatgcttcactcagccattttacctcacccccactgatgttcgccgaccgttgactattctctacaaaccacaaagacattggaacactatacctattattcggcgcatgagctggagtcctaggcacagctctaagcctccttattcgagccgagctgggccagccaggcaaccttctaggtaacgaccacatctacaacgttatcgtcacagcccatgcatttgtaataatcttcttcatagtaatacccatcataatcggaggctttggcaactgactagttcccctaataatcggtgcccccgatatggcgtttccccgcataaacaacataagcttctgactcttacctccctctctcctactcctgctcgcatctgctatagtggaggccggagcaggaacaggttgaacagtctaccctcccttagcagggaactactcccaccctggagcctccgtagacctaaccatcttctccttacacctagcaggtgtctcctctatcttaggggccatcaatttcatcacaacaattatcaatataaaaccccctgccataacccaataccaaacgcccctcttcgtctgatccgtcctaatcacagcagtcctacttctcctatctctcccagtcctagctgctggcatcactatactactaacagaccgcaacctcaacaccaccttcttcgaccccgccggaggaggagaccccattctataccaacacctattctgatttttcggtcaccctgaagtttatattcttatcctaccaggcttcggaataatctcccatattgtaacttactactccggaaaaaaagaaccatttggatacataggtatggtctgagctatgatatcaattggcttcctagggtttatcgtgtgagcacaccatatatttacagtaggaatagacgtagacacacgagcatatttcacctccgctaccataatcatcgctatccccaccggcgtcaaagtatttagctgactcgccacactccacggaagcaatatgaaatgatctgctgcagtgctctgagccctaggattcatctttcttttcaccgtaggtggcctgactggcattgtattagcaaactcatcactagacatcgtactacacgacacgtactacgttgtagcccacttccactatgtcctatcaataggagctgtatttgccatcataggaggcttcattcactgatttcccctattctcaggctacaccctagaccaaacctacgccaaaatccatttcactatcatattcatcggcgtaaatctaactttcttcccacaacactttctcggcctatccggaatgccccgacgttactcggactaccccgatgcatacaccacatgaaacatcctatcatctgtaggctcattcatttctctaacagcagtaatattaataattttcatgatttgagaagccttcgcttcgaagcgaaaagtcctaatagtagaagaaccctccataaacctggagtgactatatggatgccccccaccctaccacacattcgaagaacccgtatacataaaatctagacaaaaaaggaaggaatcgaaccccccaaagctggtttcaagccaaccccatggcctccatgactttttcaaaaaggtattagaaaaaccatttcataactttgtcaaagttaaattataggctaaatcctatatatcttaatggcacatgcagcgcaagtaggtctacaagacgctacttcccctatcatagaagagcttatcacctttcatgatcacgccctcataatcattttccttatctgcttcctagtcctgtatgcccttttcctaacactcacaacaaaactaactaatactaacatctcagacgctcaggaaatagaaaccgtctgaactatcctgcccgccatcatcctagtcctcatcgccctcccatccctacgcatcctttacataacagacgaggtcaacgatccctcccttaccatcaaatcaattggccaccaatggtactgaacctacgagtacaccgactacggcggactaatcttcaactcctacatacttcccccattattcctagaaccaggcgacctgcgactccttgacgttgacaatcgagtagtactcccgattgaagcccccattcgtataataattacatcacaagacgtcttgcactcatgagctgtccccacattaggcttaaaaacagatgcaattcccggacgtctaaaccaaaccactttcaccgctacacgaccgggggtatactacggtcaatgctctgaaatctgtggagcaaaccacagtttcatgcccatcgtcctagaattaattcccctaaaaatctttgaaatagggcccgtatttaccctatagcaccccctctaccccctctagagcccactgtaaagctaacttagcattaaccttttaagttaaagattaagagaaccaacacctctttacagtgaaatgccccaactaaatactaccgtatggcccaccataattacccccatactccttacactattcctcatcacccaactaaaaatattaaacacaaactaccacctacctccctcaccaaagcccataaaaataaaaaattataacaaaccctgagaaccaaaatgaacgaaaatctgttcgcttcattcattgcccccacaatcctaggcctacccgccgcagtactgatcattctatttccccctctattgatccccacctccaaatatctcatcaacaaccgactaatcaccacccaacaatgactaatcaaactaacctcaaaacaaatgataaccatacacaacactaaaggacgaacctgatctcttatactagtatccttaatcatttttattgccacaactaacctcctcggactcctgcctcactcatttacaccaaccacccaactatctataaacctagccatggccatccccttatgagcgggcgcagtgattataggctttcgctctaagattaaaaatgccctagcccacttcttaccacaaggcacacctacaccccttatccccatactagttattatcgaaaccatcagcctactcattcaaccaatagccctggccgtacgcctaaccgctaacattactgcaggccacctactcatgcacctaattggaagcgccaccctagcaatatcaaccattaaccttccctctacacttatcatcttcacaattctaattctactgactatcctagaaatcgctgtcgccttaatccaagcctacgttttcacacttctagtaagcctctacctgcacgacaacacataatgacccaccaatcacatgcctatcatatagtaaaacccagcccatgacccctaacaggggccctctcagccctcctaatgacctccggcctagccatgtgatttcacttccactccataacgctcctcatactaggcctactaaccaacacactaaccatataccaatgatggcgcgatgtaacacgagaaagcacataccaaggccaccacacaccacctgtccaaaaaggccttcgatacgggataatcctatttattacctcagaagtttttttcttcgcaggatttttctgagccttttaccactccagcctagcccctaccccccaattaggagggcactggcccccaacaggcatcaccccgctaaatcccctagaagtcccactcctaaacacatccgtattactcgcatcaggagtatcaatcacctgagctcaccatagtctaatagaaaacaaccgaaaccaaataattcaagcactgcttattacaattttactgggtctctattttaccctcctacaagcctcagagtacttcgagtctcccttcaccatttccgacggcatctacggctcaacattttttgtagccacaggcttccacggacttcacgtcattattggctcaactttcctcactatctgcttcatccgccaactaatatttcactttacatccaaacatcactttggcttcgaagccgccgcctgatactggcattttgtagatgtggtttgactatttctgtatgtctccatctattgatgagggtcttactcttttagtataaatagtaccgttaacttccaattaactagttttgacaacattcaaaaaagagtaataaacttcgccttaattttaataatcaacaccctcctagccttactactaataattattacattttgactaccacaactcaacggctacatagaaaaatccaccccttacgagtgcggcttcgaccctatatcccccgcccgcgtccctttctccataaaattcttcttagtagctattaccttcttattatttgatctagaaattgccctccttttacccctaccatgagccctacaaacaactaacctgccactaatagttatgtcatccctcttattaatcatcatcctagccctaagtctggcctatgagtgactacaaaaaggattagactgaaccgaattggtatatagtttaaacaaaacgaatgatttcgactcattaaattatgataatcatatttaccaaatgcccctcatttacataaatattatactagcatttaccatctcacttctaggaatactagtatatcgctcacacctcatatcctccctactatgcctagaaggaataatactatcgctgttcattatagctactctcataaccctcaacacccactccctcttagccaatattgtgcctattgccatactagtctttgccgcctgcgaagcagcggtgggcctagccctactagtctcaatctccaacacatatggcctagactacgtacataacctaaacctactccaatgctaaaactaatcgtcccaacaattatattactaccactgacatgactttccaaaaaacacataatttgaatcaacacaaccacccacagcctaattattagcatcatccctctactattttttaaccaaatcaacaacaacctatttagctgttccccaaccttttcctccgaccccctaacaacccccctcctaatactaactacctgactcctacccctcacaatcatggcaagccaacgccacttatccagtgaaccactatcacgaaaaaaactctacctctctatactaatctccctacaaatctccttaattataacattcacagccacagaactaatcatattttatatcttcttcgaaaccacacttatccccaccttggctatcatcacccgatgaggcaaccagccagaacgcctgaacgcaggcacatacttcctattctacaccctagtaggctcccttcccctactcatcgcactaatttacactcacaacaccctaggctcactaaacattctactactcactctcactgcccaagaactatcaaactcctgagccaacaacttaatatgactagcttacacaatagcttttatagtaaagatacctctttacggactccacttatgactccctaaagcccatgtcgaagcccccatcgctgggtcaatagtacttgccgcagtactcttaaaactaggcggctatggtataatacgcctcacactcattctcaaccccctgacaaaacacatagcctaccccttccttgtactatccctatgaggcataattataacaagctccatctgcctacgacaaacagacctaaaatcgctcattgcatactcttcaatcagccacatagccctcgtagtaacagccattctcatccaaaccccctgaagcttcaccggcgcagtcattctcataatcgcccacgggcttacatcctcattactattctgcctagcaaactcaaactacgaacgcactcacagtcgcatcataatcctctctcaaggacttcaaactctactcccactaatagctttttgatgacttctagcaagcctcgctaacctcgccttaccccccactattaacctactgggagaactctctgtgctagtaaccacgttctcctgatcaaatatcactctcctacttacaggactcaacatactagtcacagccctatactccctctacatatttaccacaacacaatggggctcactcacccaccacattaacaacataaaaccctcattcacacgagaaaacaccctcatgttcatacacctatcccccattctcctcctatccctcaaccccgacatcattaccgggttttcctcttgtaaatatagtttaaccaaaacatcagattgtgaatctgacaacagaggcttacgaccccttatttaccgagaaagctcacaagaactgctaactcatgcccccatgtctaacaacatggctttctcaacttttaaaggataacagctatccattggtcttaggccccaaaaattttggtgcaactccaaataaaagtaataaccatgcacactactataaccaccctaaccctgacttccctaattccccccatccttaccaccctcgttaaccctaacaaaaaaaactcatacccccattatgtaaaatccattgtcgcatccacctttattatcagtctcttccccacaacaatattcatgtgcctagaccaagaagttattatctcgaactgacactgagccacaacccaaacaacccagctctccctaagcttcaaactagactacttctccataatattcatccctgtagcattgttcgttacatggtccatcatagaattctcactgtgatatataaactcagacccaaacattaatcagttcttcaaatatctactcatcttcctaattaccatactaatcttagttaccgctaacaacctattccaactgttcatcggctgagagggcgtaggaattatatccttcttgctcatcagttgatgatacgcccgagcagatgccaacacagcagccattcaagcaatcctatacaaccgtatcggcgatatcggtttcatcctcgccttagcatgatttatcctacactccaactcatgagacccacaacaaatagcccttctaaacgctaatccaagcctcaccccactactaggcctcctcctagcagcagcaggcaaatcagcccaattaggtctccacccctgactcccctcagccatagaaggccccaccccagtctcagccctactccactcaagcactatagttgtagcaggaatcttcttactcatccgcttccaccccctagcagaaaatagcccactaatccaaactctaacactatgcttaggcgctatcaccactctgttcgcagcagtctgcgcccttacacaaaatgacatcaaaaaaatcgtagccttctccacttcaagtcaactaggactcataatagttacaatcggcatcaaccaaccacacctagcattcctgcacatctgtacccacgccttcttcaaagccatactatttatgtgctccgggtccatcatccacaaccttaacaatgaacaagatattcgaaaaataggaggactactcaaaaccatacctctcacttcaacctccctcaccattggcagcctagcattagcaggaatacctttcctcacaggtttctactccaaagaccacatcatcgaaaccgcaaacatatcatacacaaacgcctgagccctatctattactctcatcgctacctccctgacaagcgcctatagcactcgaataattcttctcaccctaacaggtcaacctcgcttccccacccttactaacattaacgaaaataaccccaccctactaaaccccattaaacgcctggcagccggaagcctattcgcaggatttctcattactaacaacatttcccccgcatcccccttccaaacaacaatccccctctacctaaaactcacagccctcgctgtcactttcctaggacttctaacagccctagacctcaactacctaaccaacaaacttaaaataaaatccccactatgcacattttatttctccaacatactcggattctaccctagcatcacacaccgcacaatcccctatctaggccttcttacgagccaaaacctgcccctactcctcctagacctaacctgactagaaaagctattacctaaaacaatttcacagcaccaaatctccacctccatcatcacctcaacccaaaaaggcataattaaactttacttcctctctttcttcttcccactcatcctaaccctactcctaatcacataacctattcccccgagcaatctcaattacaatatatacaccaacaaacaatgttcaaccagtaactactactaatcaacgcccataatcatacaaagcccccgcaccaataggatcctcccgaatcaaccctgacccctctccttcataaattattcagcttcctacactattaaagtttaccacaaccaccaccccatcatactctttcacccacagcaccaatcctacctccatcgctaaccccactaaaacactcaccaagacctcaacccctgacccccatgcctcaggatactcctcaatagccatcgctgtagtatatccaaagacaaccatcattccccctaaataaattaaaaaaactattaaacccatataacctcccccaaaattcagaataataacacacccgaccacaccgctaacaatcaatactaaacccccataaataggagaaggcttagaagaaaaccccacaaaccccattactaaacccacactcaacagaaacaaagcatacatcattattctcgcacggactacaaccacgaccaatgatatgaaaaaccatcgttgtatttcaactacaagaacaccaatgaccccaatacgcaaaactaaccccctaataaaattaattaaccactcattcatcgacctccccaccccatccaacatctccgcatgatgaaacttcggctcactccttggcgcctgcctgatcctccaaatcaccacaggactattcctagccatgcactactcaccagacgcctcaaccgccttttcatcaatcgcccacatcactcgagacgtaaattatggctgaatcatccgctaccttcacgccaatggcgcctcaatattctttatctgcctcttcctacacatcgggcgaggcctatattacggatcatttctctactcagaaacctgaaacatcggcattatcctcctgcttgcaactatagcaacagccttcataggctatgtcctcccgtgaggccaaatatcattctgaggggccacagtaattacaaacttactatccgccatcccatacattgggacagacctagttcaatgaatctgaggaggctactcagtagacagtcccaccctcacacgattctttacctttcacttcatcttgcccttcattattgcagccctagcagcactccacctcctattcttgcacgaaacgggatcaaacaaccccctaggaatcacctcccattccgataaaatcaccttccacccttactacacaatcaaagacgccctcggcttacttctcttccttctctccttaatgacattaacactattctcaccagacctcctaggcgacccagacaattataccctagccaaccccttaaacacccctccccacatcaagcccgaatgatatttcctattcgcctacacaattctccgatccgtccctaacaaactaggaggcgtccttgccctattactatccatcctcatcctagcaataatccccatcctccatatatccaaacaacaaagcataatatttcgcccactaagccaatcactttattgactcctagccgcagacctcctcattctaacctgaatcggaggacaaccagtaagctacccttttaccatcattggacaagtagcatccgtactatacttcacaacaatcctaatcctaataccaactatctccctaattgaaaacaaaatactcaaatgggcctgtccttgtagtataaactaatacaccagtcttgtaaaccggagatgaaaacctttttccaaggacaaatcagagaaaaagtctttaactccaccattagcacccaaagctaagattctaatttaaactattctctgttctttcatggggaagcagatttgggtaccacccaagtattgactcacccatcaacaaccgctatgtatttcgtacattactgccagccatcatgaatattgtacggtaccataaatacttgaccacctgtagtacataaaaacccaatccacatcaaaaccccccccccatgcttacaagcaagtacagcaatcaaccctcaactatcacacatcaactgcaactccaaagccacccctcacccactaggataccaacaaacctacccacccttaacagtacatagtacataaagccatttaccgtacatagcacattacagtcaaatcccctctcgtccccatggatgacccccctcagataggggtcccttgaccaccatcctccgtgaaatcaatatcccgcacaagagtgctactctcctcgctccgggcccataacacttgggggtagctaaagtgaactgtatccgacatctggttcctacttcagggccataaagcctaaatagcccacacgttccccttaaataagacatcacgatg

SEQ ID NO: 380 - DNA, 16568 bp, Homo sapiens mitochondrial
  3106: "n" refers to a nucleotide at position 3107 of the Cambridge Reference Sequence (CRS, Anderson et al. 1981 Nature 290:457-465), later determined to be absent from the human mtDNA sequence according to the revised CRS (rCRS, Andrews et al. 1999 Nature Genetics 23:147); "n" therefore represents a single nucleotide deletion at a position corresponding to nucleotide 3107 of SEQ ID NO:1 as provided herein.
gatcacaggtctatcaccctattaaccactcacgggagctctccatgcatttggtattttcgtctggggggtgtgcacgcgatagcattgcgagacgctggagccggagcaccctatgtcgcagtatctgtctttgattcctgccccatcccattatttatcgcacctacgttcaatattatagtcgaacatacctactaaagtgtgttaattaattaatgcttgtaggacataataataacaattaaatgtctgcacagccgctttccacacagacatcataacaaaaaatttccaccaaaccccccctcccccgccttctggccacagcacttaaacacatctctgccaaaccccgaaaacaaagaaccctaacaccagcctaaccagatttcaaattttatcttttggcggtatgcacttttaacagtcaccccccaactaacacattattttcccctcccactcccatactactaatctcatcaatacaacccccgcccatcctacccagcacacacaccgctgctaaccccataccccgaaccaaccaaaccccaaagacaccccccacagtttatgtagcttacctcctcaaagcaatacactgaaaatgtttagacgggctcacatcaccccataaacaaataggtttggtcctagcctttctattagctcttagtaagattacacatgcaagcatccccactccagtgagttcaccctctaaatcaccacgatcaaaagggacaagcatcaagcacgcaacaatgcagctcaaaacgcttagcctagccacacccccacgggaaacagcagtgataaacctttagcaataaacgaaagtttaactaagctatactaaccccagggttggtcaatttcgtgccagccaccgcggtcacacgattaacccaagtcaatagaagccggcgtaaagagtgttttagatcaccccctccccaataaagctaaaactcacctgagttgtaaaaaactccagttgacacaaaataaactacgaaagtggctttaacatatctgaacacacaatagctaagacccaaactgggattagataccccactatgcttagccctaaacctcaacagttaaatcaacaaaactgctcgccagaacactacgagccacagcttaaaactcaaaggacctggcggtgcttcatatccctctagaggagcctgttctgtaatcgataaaccccgatcaacctcaccacctcttgctcagcctatataccgccatcttcagcaaaccctgatgaaggctacaaagtaagcgcaagtacccacgtaaagacgttaggtcaaggtgtagcccatgaggtggcaagaaatgggctacattttctaccccagaaaactacgatagcccttatgaaacttaagggtcgaaggtggatttagcagtaaactaagagtagagtgcttagttgaacagggccctgaagcgcgtacacaccgcccgtcaccctcctcaagtatacttcaaaggacatttaactaaaacccctacgcatttatatagaggagacaagtcgtaacatggtaagtgtactggaaagtgcacttggacgaaccagagtgtagcttaacacaaagcacccaacttacacttaggagatttcaacttaacttgaccgctctgagctaaacctagccccaaacccactccaccttactaccagacaaccttagccaaaccatttacccaaacaaagtataggcgatagaaattgaaacctggcgcaatagatatagtaccgcaagggaaagatgaaaaattataaccaagcataatatagcaaggactaacccctataccttctgcataatgaattaactagaaataactttgcaaggagagccaaagctaagacccccgaaaccagacgagctacctaagaacagctaaaagagcacacccgtctatgtagcaaaatagtgggaagatttataggtagaggcgacaaacctaccgagcctggtgatagctggttgtccaagatagaatcttagttcaactttaaatttgcccacagaaccctctaaatccccttgtaaatttaactgttagtccaaagaggaacagctctttggacactaggaaaaaaccttgtagagagagtaaaaaatttaacacccatagtaggcctaaaagcagccaccaattaagaaagcgttcaagctcaacacccactacctaaaaaatcccaaacatataactgaactcctcacacccaattggaccaatctatcaccctatagaagaactaatgttagtataagtaacatgaaaacattctcctccgcataagcctgcgtcagatcaaaacactgaactgacaattaacagcccaatatctacaatcaaccaacaagtcattattaccctcactgtcaacccaacacaggcatgctcataaggaaaggttaaaaaaagtaaaaggaactcggcaaatcttaccccgcctgtttaccaaaaacatcacctctagcatcaccagtattagaggcaccgcctgcccagtgacacatgtttaacggccgcggtaccctaaccgtgcaaaggtagcataatcacttgttccttaaatagggacctgtatgaatggctccacgagggttcagctgtctcttacttttaaccagtgaaattgacctgcccgtgaagaggcgggcatgacacagcaagacgagaagaccctatggagctttaatttattaatgcaaacaatacctaacagacccacaggtcctaaactaccaaacctgcattaaaaatttcggttggggcgacctcggagcagaacccaacctccgagcagtacatgctaagacttcaccagtcaaagcgaactaccatactcaattgatccaataacttgaccaacggaacaagttaccctagggataacagcgcaatcctattctagagtccatatcaacaatagggtttacgacctcgatgttggatcaggacatcccgatggtgcagccgctattaaaggttcgtttgttcaacgattaaagtcctacgtgatctgagttcagaccggagtaatccaggtcggtttctatctacnttcaaattcctccctgtacgaaaggacaagagaaataaggcctacttcacaaagcgccttcccccgtaaatgatatcatctcaacttagtattatacccacacccacccaagaacagggtttgttaagatggcagagcccggtaatcgcataaaacttaaaactttacagtcagaggttcaattcctcttcttaacaacacacccatggccaacctcctactcctcattgtacccattctaatcgcaatggcattcctaatgcttaccgaacgaaaaattctaggctatatacaactacgcaaaggccccaacgttgtaggcccctacgggctactacaacccttcgctgacgccataaaactcttcaccaaagagcccctaaaacccgccacatctaccatcaccctctacatcaccgccccgaccttagctctcaccatcgctcttctactatgaacccccctccccatacccaaccccctggttaacctcaacctaggcctcctatttattctagccacctctagcctagccgtttactcaatcctctgatcaggatgagcatcaaactcaaactacgccctaatcggcgcactgcgagcagtagcccaaacaatctcatatgaagtcaccctagccatcattctactatcaacattactaataagtggctcctttaacctctccacccttatcacaacacaagaacacctctgattactcctgccatcatgacccttggccataatatgatttatctccacactagcagagaccaaccgaacccccttcgaccttgccgaaggggagtccgaactagtctcaggcttcaacatcgaatacgccgcaggccccttcgccctattcttcatagccgaatacacaaacattattataataaacaccctcaccactacaatcttcctaggaacaacatatgacgcactctcccctgaactctacacaacatattttgtcaccaagaccctacttctgacctccctgttcttatgaattcgaacagcatacccccgattccgctacgaccaactcatacacctcctatgaaaaaacttcctaccactcaccctagcattacttatatgatatgtctccatacccattacaatctccagcattccccctcaaacctaagaaatatgtctgataaaagagttactttgatagagtaaataataggagcttaaacccccttatttctaggactatgagaatcgaacccatccctgagaatccaaaattctccgtgccacctatcacaccccatcctaaagtaaggtcagctaaataagctatcgggcccataccccgaaaatgttggttatacccttcccgtactaattaatcccctggcccaacccgtcatctactctaccatctttgcaggcacactcatcacagcgctaagctcgcactgattttttacctgagtaggcctagaaataaacatgctagcttttattccagttctaaccaaaaaaataaaccctcgttccacagaagctgccatcaagtatttcctcacgcaagcaaccgcatccataatccttctaatagctatcctcttcaacaatatactctccggacaatgaaccataaccaatactaccaatcaatactcatcattaataatcataatggctatagcaataaaactaggaatagccccctttcacttctgagtcccagaggttacccaaggcacccctctgacatccggcctgcttcttctcacatgacaaaaactagcccccatctcaatcatataccaaatctctccctcactaaacgtaagccttctcctcactctctcaatcttatccatcatagcaggcagttgaggtggattaaaccaaacccagctacgcaaaatcttagcatactcctcaattacccacataggatggataatagcaattctaccgtacaaccctaacataaccattcttaatttaactatttatattatcctaactactaccgcattcctactactcaacttaaactccagcaccacgaccctactactatctcgcacctgaaacaagctaacatgactaacacccttaattccatccaccctcctctccctaggaggcctgcccccgctaaccggctttttgcccaaatgggccattatcgaagaattcacaaaaaacaatagcctcatcatccccaccatcatagccaccatcaccctccttaacctctacttctacctacgcctaatctactccacctcaatcacactactccccatatccaacaacgtaaaaataaaatgacagtttgaacatacaaaacccaccccattcctccccacactcatcgcccttaccacgctactcctacctatctccccttttatactaataatcttatagaaatttaggttaaatacagaccaagagccttcaaagccctcagtaagttgcaatacttaatttctgtaacagctaaggactgcaaaaccccactctgcatcaactgaacgcaaatcagccactttaattaagctaagccctcactagaccaatgggacttaaacccacaaacacttagttaacagctaagcaccctaatcaactggcttcaatctacttctcccgccgccgggaaaaaaggcgggagaagccccggcaggtttgaagctgcttcttcgaatttgcaattcaatatgaaaatcacctcggagctggtaaaaagaggcctaacccctgtctttagatttacagtccaatgcttcactcagccattttacctcacccccactgatgttcgccgaccgttgactattctctacaaaccacaaagacattggaacactatacctattattcggcgcatgagctggagtcctaggcacagctctaagcctccttattcgagccgagctgggccagccaggcaaccttctaggtaacgaccacatctacaacgttatcgtcacagcccatgcatttgtaataatcttcttcatagtaatacccatcataatcggaggctttggcaactgactagttcccctaataatcggtgcccccgatatggcgtttccccgcataaacaacataagcttctgactcttacctccctctctcctactcctgctcgcatctgctatagtggaggccggagcaggaacaggttgaacagtctaccctcccttagcagggaactactcccaccctggagcctccgtagacctaaccatcttctccttacacctagcaggtgtctcctctatcttaggggccatcaatttcatcacaacaattatcaatataaaaccccctgccataacccaataccaaacgcccctcttcgtctgatccgtcctaatcacagcagtcctacttctcctatctctcccagtcctagctgctggcatcactatactactaacagaccgcaaccttaacaccaccttcttcgaccccgccggaggaggagaccccattctataccaacacctattctgatttttcggtcaccctgaagtttatattcttatcctaccaggcttcggaataatctcccatattgtaacttactactccggaaaaaaagaaccatttggatacataggtatggtctgagctatgatatcaattggcttcctagggtttatcgtgtgagcacaccatatatttacagtaggaatagacgtagacacacgagcatatttcacctccgccaccataatcatcgctatccccaccggcgtcaaagtatttagctgactcgccacactccacggaagcaatatgaaatgatctgctgcagtgctctgagccctaggattcatctttcttttcaccgtaggtggcctgactggcattgtattagcaaactcatcgctagacatcgtactacacgacacgtactacgttgtagctcacttccactatgtcctatcaataggggctgtatttgccatcataggaggcttcattcactgatttcccctattctcaggctacaccctagaccaaacctacgccaaaatccatttcgctatcatattcatcggcgtaaatctaactttcttcccacaacactttctcggcctatccggaatgccccgacgttactcggactaccccgatgcatacaccacatgaaatatcctatcatctgtaggctcattcatttctctaacagcagtaatattaataattttcatgatttgagaagccttcgcttcgaagcgaaaagtcctaatagtagaagaaccctccataaacctggagtgactacatggatgccccccaccctaccacacattcgaagaacccgtatacataaaatctagacaaaaaaggaaggaatcgaaccccccaaagctggtttcaagccaaccccatggcctccatgactttttcaaaaagatattagaaaaaccatttcataactttgtcaaagttaaattataggctaaatcctatatatcttaatggcacatgcagcgcaagtaggtctacaagacgctacttcccctatcatagaagagcttatcacctttcatgatcacgccctcataatcattttccttatctgcttcctagtcctgtatgcccttttcctaacactcacaacaaaactaactaatactaacatctcagacgctcaggaaatagaaaccgtctgaactatcctgcccgccatcatcctagtcctcatcgccctcccatccctacgcatcctttacataacagacgaggtcaacgatccctctcttaccatcaaatcaattggccaccaatggtactgaacctacgagtacaccgactacggcggactaatcttcaactcctacatacttcccccattattcctagaaccaggcgacctgcgactccttgacgttgacaatcgagtagtactcccgattgaagcccccattcgtataataattacatcacaagacgtcttgcactcatgagctgtccccacattaggcttaaaaacagatgcaattcccggacgtctaaaccaaaccactttcaccgctacacgaccgggggtatactacggtcaatgctctgaaatctgtggagcaaaccacagtttcatgcccatcgtcctagaattaattcccctaaaaatctttgaaatggggcccgtatttaccctatagcaccccctctaccccctctagagcccactgtaaagctaacttagcattaaccttttaagttaaagattaagagaaccaacacctctttacagtgaaatgccccaactaaatactaccgtatggcccaccataattacccccatactccttacactattcctcatcacccaactaaaaatattaaacacaaactaccacttacctccctcaccaaagcccataaaaataaaaaattataacaaaccctgagaaccaaaatgaacgaaaatctgttcgcttcattcattgcccccacaatcctaggcctacccgccgcagtactgatcattctatttccccctctattgatccccacctccaaatatctcatcaacaaccgactaattaccacccaacaatgactaatcaaactaacctcaaaacaaatgatagccatacacaacactaaaggacgaacctgatctcttatactagtatccttaatcatttttattgccacaactaacctcctcggactcctgcctcactcatttacaccaaccacccaactatctataaacctagccatggccatccccttatgagcgggcgcagtgattataggctttcgctctaagattaaaaatgccctagcccacttcttaccacaaggcacacctacaccccttatccccatactagttattatcgaaaccatcagcctactcattcaaccaatagccctggccgtacgcctaaccgctaacattactgcaggccacctactcatgcacctaattggaagcgccaccctagcaatatcaaccattaaccttccctctacacttatcatcttcacaattctaattctactgactatcctagaaatcgctgtcgccttaatccaagcctacgttttcacacttctagtaagcctctacctgcacgacaacacataatgacccaccaatcacatgcctatcatatagtaaaacccagcccatgacccctaacaggggccctctcagccctcctaatgacctccggcctagccatgtgatttcacttccactccataacgctcctcatactaggcctactaaccaacacactaaccatataccaatgatggcgcgatgtaacacgagaaagcacataccaaggccaccacacaccacctgtccaaaaaggccttcgatacgggataatcctatttattacctcagaagtttttttcttcgcaggatttttctgagccttttaccactccagcctagcccctaccccccaactaggagggcactggcccccaacaggcatcaccccgctaaatcccctagaagtcccactcctaaacacatccgtattactcgcatcaggagtatcaatcacctgagctcaccatagtctaatagaaaacaaccgaaaccaaataattcaagcactgcttattacaattttactgggtctctattttaccctcctacaagcctcagagtacttcgagtctcccttcaccatttccgacggcatctacggctcaacattttttgtagccacaggcttccacggacttcacgtcattattggctcaactttcctcactatctgcttcatccgccaactaatatttcactttacatccaaacatcactttggcttcgaagccgccgcctgatactggcattttgtagatgtggtttgactatttctgtatgtctccatctattgatgagggtcttactcttttagtataaatagtaccgttaacttccaattaactagttttgacaacattcaaaaaagagtaataaacttcgccttaattttaataatcaacaccctcctagccttactactaataattattacattttgactaccacaactcaacggctacatagaaaaatccaccccttacgagtgcggcttcgaccctatatcccccgcccgcgtccctttctccataaaattcttcttagtagctattaccttcttattatttgatctagaaattgccctccttttacccctaccatgagccctacaaacaactaacctgccactaatagttatgtcatccctcttattaatcatcatcctagccctaagtctggcctatgagtgactacaaaaaggattagactgagccgaattggtatatagtttaaacaaaacgaatgatttcgactcattaaattatgataatcatatttaccaaatgcccctcatttacataaatattatactagcatttaccatctcacttctaggaatactagtatatcgctcacacctcatatcctccctactatgcctagaaggaataatactatcgctgttcattatagctactctcataaccctcaacacccactccctcttagccaatattgtgcctattgccatactagtctttgccgcctgcgaagcagcggtaggcctagccctactagtctcaatctccaacacatatggcctagactacgtacataacctaaacctactccaatgctaaaactaatcgtcccaacaattatattactaccactgacatgactctccaaaaaacacataatttgaatcaacacaaccacccacagcctaattattagcatcatccccctactattttttaaccaaatcaacaacaacctatttagctgttccccaaccttttcctccgaccccctaacaacccccctcctaatactaactacctgactcctacccctcacaatcatggcaagccaacgccacttatccagtgaaccactatcacgaaaaaaactctacctctctatactaatctccctacaaatctccttaattataacattcacagccacagaactaatcatattttatatcttcttcgaaaccacacttatccccaccttggctatcatcacccgatgaggcaaccagccagaacgcctgaacgcaggcacatacttcctattctacaccctagtaggctcccttcccctactcatcgcactaatttacactcacaacaccctaggctcactaaacattctactactcactctcactgcccaagaactatcaaactcctgagccaacaacttaatatgactagcttacacaatagcttttatagtaaagatacctctttacggactccacttatgactccctaaagcccatgtcgaagcccccatcgctgggtcaatagtacttgccgcagtactcttaaaactaggcggctatggtataatacgcctcacactcattctcaaccccctgacaaaacacatagcctaccccttccttgtactatccctatgaggcataattataacaagctccatctgcctacgacaaacagacctaaaatcgctcattgcatactcttcaatcagccacatagccctcgtagtaacagccattctcatccaaaccccctgaagcttcaccggcgcagtcattctcataatcgcccacggacttacatcctcattactattctgcctagcaaactcaaactacgaacgcactcacagtcgcatcataatcctctctcaaggacttcaaactctactcccactaatagctttttgatgacttctagcaagcctcgctaacctcgccttaccccccactattaacctactgggagaactctctgtgctagtaaccacgttctcctgatcaaatatcactctcctacttacaggactcaacatactagtcacagccctatactccctctacatatttaccacaacacaatggggctcactcacccaccacattaacaacataaaaccctcattcacacgagaaaacaccctcatgttcatacacctatcccccattctcctcctatccctcaaccccgacatcattaccgggttttcctcttgtaaatatagtttaaccaaaacatcagattgtgaatctgacaacagaggcttacgaccccttatttaccgagaaagctcacaagaactgctaactcatgcccccatgtctaacaacatggctttctcaacttttaaaggataacagctatccattggtcttaggccccaaaaattttggtgcaactccaaataaaagtaataaccatgcacactactataaccaccctaaccctgacttccctaattccccccatccttaccaccctcgttaaccctaacaaaaaaaactcatacccccattatgtaaaatccattgtcgcatccacctttattatcagtctcttccccacaacaatattcatgtgcctagaccaagaagtcattatctcgaactgacactgagccacaacccaaacaacccagctctccctaagcttcaaactagactacttctccataatattcatccctgtagcattgttcgttacatggtccatcatagaattctcactgtgatatataaactcagacccaaacattaatcagttcttcaaatatctactcattttcctaattaccatactaatcttagttaccgctaacaacctattccaactgttcatcggctgagagggcgtaggaattatatccttcttgctcatcagttgatgatacgcccgagcagatgccaacacagcagccattcaagcaatcctatacaaccgtatcggcgatatcggtttcatcctcgccttagcatgatttatcctacactccaactcatgagacccacaacaaatagcccttctaaacgctaatccaagcctcaccccactactaggcctcctcctagcagcagcaggcaaatcagcccaattaggtctccacccctgactcccctcagccatagaaggccccaccccagtctcagccctactccactcaagcactatagttgtagcaggagtcttcttactcatccgcttccaccccctagcagaaaatagcccactaatccaaactctaacactatgcttaggcgctatcaccactctgttcgcagcagtctgcgcccttacacaaaatgacatcaaaaaaatcgtagccttctccacttcaagtcaactaggactcataatagttacaatcggcatcaaccaaccacacctagcattcctgcacatctgtacccacgccttcttcaaagccatactatttatgtgctccgggtccatcatccacaaccttaacaatgaacaagatattcgaaaaataggaggactactcaaaaccatacctctcacttcaacctccctcaccattggcagcctagcattagcaggaatacctttcctcacaggtttctattccaaagaccacatcatcgaaaccgcaaacatatcatacacaaacgcctgagccctatctattactctcatcgctacctccctgacaagcgcctatagcactcgaataattcttctcaccctaacaggtcaacctcgcttccctacccttactaacattaacgaaaataaccccaccctactaaaccccattaaacgcctggcagccggaagcctattcgcaggatttctcattactaacaacatttcccccgcatcccccttccaaacaacaatccccctccacctaaaactcacagccctcgctgtcactttcctaggacttctaacagccctagacctcaactacctaaccaacaaacttaaaataaaatacccactatgcacattttatttctccaacatactcggattctaccctagcatcacacaccgcacaatcccctatctaggccttcttacgagccaaaacctgcccctactcctcctagacctaacctgactagaaaagctattacctaaaacaatttcacagcaccaaatctccacctccatcatcacctcaacccaaaaaggcataattaaactttacttcctctctttcttcttcccactcatcctaaccctactcctaatcacataacctattcccccgagcaatctcaattacaacatatacaccaacaaacaatgttcagccagtaactactactaatcaacgcccataatcatacaaagcccccgcaccaataggatcctcccgaatcaaccctgacccctctccttcataaattattcagcttcctacactattaaagtttaccacaaccaccaccccatcatactctttcacccacagcaccaatcctacctccatcgctaaccccactaaaacactcaccaagacctcaacccctgacccccatgcctcaggatactcctcaatagccatcgctgtagtatatccaaagacaaccatcattccccctaaataaattaaaaaaactattaaacccatataacctcccccaaaattcagaataataacacacccaaccacaccgctaacaatcaatactaaacccccataaataggagaaggcttagaagaaaaccccacaaaccccattactaaacccacactcaacagaaacaaagcatacatcattattctcgcacggactacaaccacgaccaatgatatgaaaaaccatcgttgtatttcaactacaagaacaccaatgaccccaatacgcaaaattagccccctaataaaattaattaaccactcattcatcgacctccccaccccatccaacatctccgcatgatgaaacttcggctcactccttggcgcctgcctgatcctccaaatcaccacaggactattcctagccatgcactactcaccagacgcctcaaccgccttttcatcaatcgcccacatcactcgagacgtaaattatggctgaatcatccgctaccttcacgccaatggcgcctcaatattctttatctgcctcttcctacacatcgggcgaggcctatattacggatcatttctctactcagaaacctgaaacatcggcattatcctcctgcttgcaaccatagcaacagccttcataggctatgtcctcccgtgaggccaaatatcattctgaggggccacagtaattacaaacttactatccgccatcccatacattgggacagacctagttcaatgaatctgaggaggctactcagtagacagtcccaccctcacacgattctttacctttcacttcatcttgcccttcattattgcagccctagcagcactccacctcctattcttgcacgaaacgggatcaaacaaccccctaggaatcacctcccattccgataaaatcaccttccacccttactacacaatcaaagacgccctcggcttacttctcttccttctctccttaatgacattaacactattctcaccagacctcctaggcgacccagacaattataccctagccaaccccttaaacacccctccccacatcaagcccgaatgatatttcctattcgcctacacaattctccgatccgtccctaacaaactaggaggcgtccttgccctattactatccatcctcatcctagcaataatccccatcctccatatatccaaacaacaaagcataatatttcgcccactaagccaatcactttattgactcctagccgcagacctcctcattctaacctgaatcggaggacaaccagtaagctacccttttaccatcattggacaagtagcatccgtactatacttcacaacaatcctaatcctaataccaactatctccctaattgaaaacaaaatactcaaatgggcctgtccttgtagtataaactaatacaccagtcttgtaaaccggagatgaaaacctttttccaaggacaaatcagagaaaaagtctttaactccaccattagcacccaaagctaagattctaatttaaactattctctgttctttcatggggaagcagatttgggtaccacccaagtattgactcacccatcaacaaccgctatgtatttcgtacattactgccagccaccatgaatattgcacggtaccataaatacttgaccacctgtagtacataaaaacccaacccacatcaaaaccctccccccatgcttacaagcaagtacagcaatcaaccttcaactatcacacatcaactgcaactccaaagccaccccttacccattaggatatcaacaaacctacccgcccttaacagtacatagcacataaagccatttaccgtacatagcacattacagtcaaatcccttctcgtccccatggatgacccccctcagataggggtcccttgaccaccatcctccgtgaaatcaatatcccgcacaagagtgctactctcctcgctccgggcccataacacttgggggtagctaaagtgaactgtatccgacatctggttcctacttcagggccataaagcctaaatagcccacacgttccccttaaataagacatcacgatg

SEQ ID NO: 381 - DNA, 16570 bp, Homo sapiens mitochondrial
  3108: "n" refers to a nucleotide at position 3107 of the Cambridge Reference Sequence (CRS, Anderson et al. 1981 Nature 290:457-465), later determined to be absent from the human mtDNA sequence according to the revised CRS (rCRS, Andrews et al. 1999 Nature Genetics 23:147); "n" therefore represents a single nucleotide deletion at a position corresponding to nucleotide 3107 of SEQ ID NO:1 as provided herein.
gatcacaggtctatcaccctattaaccactcacgggagctctccatgcatttggtattttcgtctggggggtgtgcacgcgatagcattgcgagacgctggagccggagcaccctatgtcgcagtatctgtctttgattcctgccccatcccattatttatcgcacctacgttcaatattacaggcgaacatacctactaaagtgtgttaattaattaatgcttgtaggacataataataacaattgaatgtctgcacagccgctttccacacagacatcataacaaaaaatttccaccaaaccccccctcccccgccttctggccacagcacttaaacacatctctgccaaaccccaaaaacaaagaaccctaacaccagcctaaccagatttcaaattttatcttttggcggtatgcacttttaacagtcaccccccaactaacacattattttcccctcccactcccatactactaatctcatcaatacaacccccgcccatcctacccagcacacacacaccgctgctaaccccataccccgaaccaaccaaaccccaaagacaccccccacagtttatgtagcttacctcctcaaagcaatacactgaaaatgtttagacgggctcacatcaccccataaacaaataggtttggtcctagcctttctattagctcttagtaagattacacatgcaagcatccccgttccagtgagttcaccctctaaatcaccacgatcaaaagggacaagcatcaagcacgcaacaatgcagctcaaaacgcttagcctagccacacccccacgggaaacagcagtgattaacctttagcaataaacgaaagtttaactaagctatactaaccccagggttggtcaatttcgtgccagccaccgcggtcacacgattaacccaagtcaatagaagccggcgtaaagagtgttttagatcaccccctccccaataaagctaaaactcacctgagttgtaaaaaactccagttgacacaaaataaactacgaaagtggctttaacatatctgaacacacaatagctaagacccaaactgggattagataccccactatgcttagccctaaacctcaacagttaaatcaacaaaactgctcgccagaacactacgagccacagcttaaaactcaaaggacctggcggtgcttcatatccctctagaggagcctgttctgtaatcgataaaccccgatcaacctcaccacctcttgctcagcctatataccgccatcttcagcaaaccctgatgaaggctacaaagtaagcgcaagtacccacgtaaagacgttaggtcaaggtgtagcccatgaggtggcaagaaatgggctacattttctaccccagaaaactacgatagcccttatgaaacttaagggtcgaaggtggatttagcagtaaactgagagtagagtgcttagttgaacagggccctgaagcgcgtacacaccgcccgtcaccctcctcaagtatacttcaaaggacatttaactaaaacccctacgcatttatatagaggagacaagtcgtaacatggtaagtgtactggaaagtgcacttggacgaaccagagtgtagcttaacacaaagcacccaacttacacttaggagatttcaacttaacttgaccgctctgagctaaacctagccccaaacccactccaccttactaccagacaaccttagccaaaccatttacccaaataaagtataggcgatagaaattgaaacctggcgcaatagatatagtaccgcaagggaaagatgaaaaattataaccaagcataatatagcaaggactaacccctataccttctgcataatgaattaactagaaataactttgcaaggagagccaaagctaagacccccgaaaccagacgagctacctaagaacagctaaaagagcacacccgtctatgtagcaaaatagtgggaagatttataggtagaggcgacaaacctaccgagcctggtgatagctggttgtccaagatagaatcttagttcaactttaaatttgcccacagaaccctctaaatccccttgtaaatttaactgttagtccaaagaggaacagctctttggacactaggaaaaaaccttgtagagagagtaaaaaatttaacacccatagtaggcctaaaagcagccaccaattaagaaagcgttcaagctcaacacccactacctaaaaaatcccaaacatataactgaactcctcacacccaattggaccaatctatcaccctatagaagaactaatgttagtataagtaacatgaaaacattctcctccgcataagcctgcgtcagattaaaacactgaactgacaattaacagcccaatatctacaatcaaccaacaagtcattattacccccactgtcaacccaacacaggcatgctcataaggaaaggttaaaaaaagtaaaaggaactcggcaaatcttaccccgcctgtttaccaaaaacatcacctctagcatcaccagtattagaggcaccgcctgcccagtgacacatgtttaacggccgcggtaccctaaccgtgcaaaggtagcataatcacttgttccttaaatagggacctgtatgaatggctccacgagggttcagctgtctcttacttttaaccagtgaaattgacctgcccgtgaagaggcgggcatgacacagcaagacgagaagaccctatggagctttaatttattaatgcaaacagtacctaacaaacccacaggtcctaaactactaaacctgcattaaaaatttcggttggggcgacctcggagcagaacccaacctccgagcagtacatgctaagacttcaccagtcaaagcgaactactatactcaattgatccaataacttgaccaacggaacaagttaccctagggataacagcgcaatcctattctagagtccatatcaacaatagggtttacgacctcgatgttggatcaggacatcccgatggtgcagccgctattaaaggttcgtttgttcaacgattaaagtcctacgtgatctgagttcagaccggagtaatccaggtcggtttctatctacnttcaaattcctccctgtacgaaaggacaagagaaataaggcctacttcacaaagcgccttcccccgtaaatgatatcatctcaacttagtattatacccacacccacccaagaacagggtttgttaagatggcagagcccggtaatcgcataaaacttaaaactttacagtcagaggttcaattcctcttcttaacaacatacccatggccaacctcctactcctcattgtacccattctaatcgcaatggcattcctaatgcttaccgaacgaaaaattctaggctatatacaactacgcaaaggccccaacgttgtaggcccctacgggctactacaacccttcgctgacgccataaaactcttcaccaaagagcccctaaaacccgccacatctaccatcaccctctacatcaccgccccgaccttagctctcaccatcgctcttctactatgaacccccctccccatacccaaccccctggttaacctcaacctaggcctcctatttattctagccacctctagcctagccgtttactcaatcctctgatcagggtgagcatcaaactcaaactacgccctgatcggcgcactgcgagcagtagcccaaacaatctcatatgaagtcaccctagccatcattctactatcaacattactaataagtggctcctttaacctctccacccttatcacaacacaagaacacctctgattactcctgccatcatgacccttggccataatatgatttatctccacactagcagagaccaaccgaacccccttcgaccttgccgaaggggaatccgaactagtctcaggcttcaacatcgaatacgccgcaggccccttcgccctattcttcatagccgaatacacaaacattattataataaacaccctcaccactacaatcttcctaggaacaacatatgacgcactctcccctgaactctacacaacatattttgtcaccaagaccctacttctgacctccctgttcttatgaattcgaacagcatacccccgattccgctacgaccaactcatacacctcctatgaaaaaacttcctaccactcaccctagcattacttatatgacatgtctccatacccattacaatctccagcattccccctcaaacctaagaaatatgtctgataaaagagttactttgatagagtaaataataggagcttaaacccccttatttctaggactatgagaatcgaacccatccctgagaatccaaaattctccgtgccacctatcacaccccatcctaaagtaaggtcagctaaataagctatcgggcccataccccgaaaatgttggttatacccttcccgtactaattaatcccctggcccaacccgtcatctactctaccatctttgcaggcacactcatcacagcgctaagctcgcactgattttttacctgagtaggcctagaaataaacatgctagcttttattccagttctaaccaaaaaaataaaccctcgttccacagaagctgccatcaagtatttcctcacgcaagcaaccgcatccataatccttctaatagctatcctcttcaacaatatactctccggacaatgaaccataaccaatactaccaatcaatactcatcattaataatcataatggctatagcaataaaactaggaatagccccctttcacttctgagtcccagaggttacccaaggcacccctctgacatccggcctgcttcttctcacatgacaaaaactagcccccatctcaatcatataccaaatctctccctcactaaacgtaagccttctcctcactctctcaatcttatccatcatagcaggcagttgaggtggattaaaccaaacccagctacgcaaaatcttagcatactcctcaattacccacataggatgaataatagcagttctaccgtacaaccctaacataaccattcttaatttaactatttatattatcctaactactaccgcattcctactactcaacttaaactccagcaccacgaccctactactatctcgcacctgaaacaagctaacatgactaacacccttaattccatccaccctcctctccctaggaggcctgcccccgctaaccggctttttgcccaaatgggccattatcgaagaattcacaaagaacaatagcctcatcatccccaccatcatagccaccatcaccctccttaacctctacttctacctacgcctaatctactccacctcaatcacactactccccatatctaacaacgtaaaaataaaatgacagtttgaacatacaaaacccaccccattcctccccacactcatcgcccttaccacgctactcctacctatctccccttttatactaataatcttatagaaatttaggttaaatacagaccaagagccttcaaagccctcagtaagttgcaatacttaatttctgtaacagctaaggactgcaaaaccccactctgcatcaactgaacgcaaatcagccactttaattaagctaagcccttactagaccaatgggacttaaacccacaaacacttagttaacagctaagcaccctaatcaactggcttcaatctacttctcccgccgccgggaaaaaaggcgggagaagccccggcaggtttgaagctgcttcttcgaatttgcaattcaatatgaaaatcacctcggagctggtaaaaagaggcctaacccctgtctttagatttacagtccaatgcttcactcagccattttacctcacccccactgatgttcgccgaccgttgactattctctacaaaccacaaagacattggaacactatacctattattcggcgcatgagctggagtcctaggcacagctctaagcctccttattcgagccgagctgggccagccaggcaaccttctaggtaacgaccacatctacaacgttatcgtcacagcccatgcatttgtaataatcttcttcatagtaatacccatcataatcggaggctttggcaactgactagttcccctaataatcggtgcccccgatatggcgtttccccgcataaacaacataagcttctgactcttacctccctctctcctactcctgctcgcatctgctatagtggaggccggagcaggaacaggttgaacagtctaccctcccttagcagggaactactcccaccctggagcctccgtagacctaaccatcttctccttacacctagcaggtgtctcctctatcttaggggccatcaatttcatcacaacaattatcaatataaaaccccctgccataacccaataccaaacgcccctcttcgtctgatccgtcctaatcacagcagtcctacttctcctatctctcccagtcctagctgctggcatcactatactactaacagaccgcaacctcaacaccaccttcttcgaccccgccggaggaggagaccccattctataccaacacctattctgatttttcggtcaccctgaagtttatattcttatcctaccaggcttcggaataatctcccatattgtaacttactactccggaaaaaaagaaccatttggatacataggtatggtctgagctatgatatcaattggcttcctagggtttatcgtgtgagcacaccatatatttacagtaggaatagacgtagacacacgagcatatttcacctccgctaccataatcatcgctatccccaccggcgtcaaagtatttagctgactcgccacactccacggaagcaatatgaaatgatctgctgcagtgctctgagccctaggattcatctttcttttcaccgtaggtggcctgactggcattgtattagcaaactcatcactagacatcgtactacacgacacgtactacgttgtagctcacttccactatgtcctatcaataggagctgtatttgccatcataggaggcttcattcactgatttcccctattctcaggctacaccctagaccaaacctacgccaaaatccatttcactatcatattcatcggcgtaaatctaaccttcttcccacaacactttctcggcctatccggaatgccccgacgttactcggactaccccgatgcatacaccacatgaaatatcctatcatctgtaggttcattcatttctctaacagcagtaatattaataattttcatgatttgagaagccttcgcttcgaagcgaaaagtcctaatagtagaagaaccctccataaacctggagtgactatatggatgccccccaccctaccacacattcgaagaacccgtatacataaaatctagacaaaaaaggaaggaatcgaaccccccaaagctggtttcaagccaaccccatggcctccatgactttttcaaaaagatattagaaaaaccatttcataactttgtcaaagttaaattataggctaaatcctatatatcttaatggcacatgcagcgcaagtaggtctacaagacgctacttcccctatcatagaagagcttatcacctttcatgatcacgccctcataatcattttccttatctgcttcctagtcctgtatgcccttttcctaacactcacaacaaaactaactaatactaacatctcagacgctcaggaaatagagaccgtctgaactatcctgcccgccatcatcctagtcctcatcgccctcccatccctacgcatcctttacataacagacgaggtcaacgatccctcccttaccatcaaatcaattggccaccaatggtactgaacctacgagtacaccgactacggcggactaatcttcaactcctacatacttcccccattattcctagaaccaggcgacctgcgactccttgacgttgacaatcgagtagtactcccgattgaagcccccattcgtataataattacatcacaagacgtcttgcactcatgagctgtccccacattaggcttaaaaacagatgcaattcccggacgtctaaaccaaaccactttcaccgctacacgaccgggggtatactacggtcaatgctctgaaatctgtggagcaaaccacagtttcatacccatcgtcctagaattaattcccctaaaaatctttgaaatagggcccgtatttaccctatagcaccccctctaccccctctagagcccactgtaaagctaacttagcattaaccttttaagttaaagattaagagaaccaacacctctttacagtgaaatgccccaactaaatactaccgtatggcccaccataattacccccatactccttacactattcctcatcacccaactaaaaatattaaacacaaactaccacctacctccctcaccaaagcccataaaaataaaaaattataacaaaccctgagaaccaaaatgaacgaaaatctgttcgcttcattcattgcccccacaatcctaggcctacccgccgcagtactgatcattctatttccccctctattgatccccacctccaaatatctcatcaacaaccgactaatcaccacccaacaatgactaatcaaactaacctcaaaacaaatgatagccatacacaacactaaaggacgaacctgatctcttatactagtatccttaatcatttttattgccacaactaacctcctcggactcctgcctcactcatttacaccaaccacccaactatctataaacctagccatggccatccccttatgagcgggcgcagtgattataggctttcgctctaagattaaaaatgccctagcccacttcttaccacaaggcacacctacaccccttatccccatactagttattatcgaaaccatcagcctactcattcaaccaatagccctggccgtacgcctaaccgctaacattactgcaggccacctactcatgcacctaattggaagcgccaccctagcaatatcaaccattaaccttccctctacacttatcatcttcacaattctaattctactgactatcctagaaatcgctgtcgccttaatccaagcctacgttttcacacttctagtaagcctctacctgcacgacaacacataatgacccaccaatcgcatgcctatcatatagtaaaacccagcccatgacccctaacaggggccctctcagccctcctaatgacctccggcctagccatgtgatttcacttccactccataacgctcctcatactaggcctactaaccaacacactaaccatataccaatgatggcgcgatgtaacacgagaaagcacataccaaggccaccacacaccacctgtccaaaaaggccttcgatacgggataatcctatttattacctcagaagtttttttcttcgcaggatttttctgagccttttaccactccagcctagcccctaccccccaactaggagggcactggcccccaacaggcatcaccccgctaaatcccctagaagtcccactcctaaacacatccgtattactcgcatcaggagtatcaatcacctgagctcaccatagtctaatagaaaacaaccgaaaccaaataattcaagcactgcttattacaattttactgggtctctattttaccctcctacaagcctcagagtacttcgagtctcccttcaccatttccgacggcatctacggctcaacattttttgtagccacaggcttccacggacttcacgtcattattggctcaactttcctcactatctgcttcatccgccaactaatatttcactttacatccaaacatcactttggcttcgaagccgccgcctgatactggcattttgtagatgtggtttgactatttctgtatgtctccatctattgatgagggtcttactcttttagtataaatagtaccgttaacttccaattaactagttttgacaacattcaaaaaagagtaataaacttcgccttaattttaataatcaacaccctcctagccttactactaataatcattacattttgactaccacaactcaacggctacatagaaaaatccaccccttacgagtgcggcttcgaccctatatcccccgcccgcgtccctttctccataaaattcttcttagtagctattaccttcttattatttgatctagaaattgccctccttttacccctaccatgagccctacaaacaactaacctgccactaatagttatgtcatccctcttattaatcatcatcctagccctaagtctggcctatgagtgactacaaaaaggattagactgagccgaattggtatatagtttaaacaaaacgaatgatttcgactcattaaattatgataatcatatttaccaaatgcccctcatttacataaatattatactagcatttaccatctcacttctaggaatactagtatatcgctcacacctcatatcctccctactatgcctagaaggaataatactatcgctgttcattatagctactctcataaccctcaacacccactccctcttagccaatattgtgcctattgccatactagtctttgccgcctgcgaagcagcggtgggcctagccctactagtctcaatctccaacacatatggcctagactacgtacataacctaaacctactccaatgctaaaactaatcgtcccaacaattatattactaccactgacatgactttccaaaaaacacataatttgaatcaacacaaccacccacagcctaattattagcatcatccccctactattttttaaccaaatcaacaacaacctatttagctgttccccaaccttttcctccgaccccctaacaacccccctcctaatactaactacctgactcctacccctcacaatcatggcaagccaacgccacttatccagtgaaccactatcacgaaaaaaactctacctctctatactaatctccctacaaatctccttaattataacattcacagccacagaactaatcatattttatatcttcttcgaaaccacacttatccccaccttggctatcatcacccgatgaggcaaccagccagaacgcctgaacgcaggcacatacttcctattctacaccctagtaggctcccttcccctactcatcgcactaatttacactcacaacaccctaggctcactaaacattctactactcactctcactgcccaagaactatcaaactcctgagccaacaacttaatatgactagcttacacaatagcttttatagtaaagatacctctttacggactccacttatgactccctaaagcccatgtcgaagcccccatcgctgggtcaatagtacttgccgcagtactcttaaaactaggcggctatggtataatacgcctcacactcattctcaaccccctgacaaaacacatagcctaccccttccttgtactatccctatgaggcataattataacaagctccatctgcctacgacaaacagacctaaaatcgctcattgcatactcttcaatcagccacatagccctcgtagtaacagccattctcatccaaaccccctgaagcttcaccggcgcagtcattctcataatcgcccacggacttacatcctcattactattctgcctagcaaactcaaactacgaacgcactcacagtcgcatcataatcctctctcaaggacttcaaactctactcccactaatagctttttgatgacttctagcaagcctcgctaacctcgccttaccccccactattaacctactgggagaactctctgtgctagtaaccacattctcctgatcaaatatcactctcctactcacaggactcaacatactagtcacagccctatactccctctacatatttaccacaacacaatggggctcactcacccaccacattaacaacataaaaccctcattcacacgagaaaacaccctcatgttcatacacctatcccccattctcctcctatccctcaaccccgacatcattaccgggttttcctcttgtaaatatagtttaaccaaaacatcagattgtgaatctgacaacagaggcttacgaccccttatttaccgagaaagctcacaagaactgctaactcatgcccccatgtctaacaacatggctttctcaacttttaaaggataacagctatccattggtcttaggccccaaaaattttggtgcaactccaaataaaagtaataaccatgcacactactataaccaccctaaccctgacttccctaattccccccatccttaccaccctcgttaaccctaacaaaaaaaactcatacccccattatgtaaaatccattgtcgcatccacctttattatcagtctcttccccacaacaatattcatgtgcctagaccaagaagttattatctcgaactgacactgagccacaacccaaacaacccagctctccctaagcttcaaactagactacttctccataatattcatccctgtagcattgttcgttacatggtccatcatagaattctcactgtgatatataaactcagacccaaacattaatcagttcttcaagtatctactcattttcctaattaccatactaatcttagttaccgctaacaacctattccaactgttcatcggctgagagggcgtaggaattatatccttcttgctcatcagttgatgatacgcccgagcagatgccaacacagcagccattcaagcaatcctatacaaccgtatcggcgatatcggtttcatcctcgccttagcatgatttatcctacactccaactcatgagacccacaacaaatagcccttctaaacgctaatccaagcctcaccccactactaggcctcctcctagcagcagcaggcaaatcagcccaattaggtctccacccctgactcccctcagccatagaaggccccaccccagtctcagccctactccactcaagcactatagttgtagcaggaatcttcttactcatccgcttccaccccctagcagaaaatagcccactaatccaaactctaacactatgcttaggcgctatcaccactctgttcgcagcagtctgcgcccttacacaaaatgacatcaaaaaaatcgtagccttctccacttcaagtcaactaggactcataatagttacaatcggcatcaaccaaccacacctagcattcctgcacatctgtacccacgccttcttcaaagccatactatttatgtgctccgggtccatcatccacaaccttaacaatgaacaagatattcgaaaaataggaggactactcaaaaccatacctctcacttcaacctccctcaccattggcagcctagcattagcaggaatacctttcctcacaggtttctactccaaagaccacatcatcgaaaccgcaaacatatcatacacaaacgcctgagccctatctattactctcatcgctacctccctaacaagcgcctatagcactcgaataattcttctcaccctaacaggtcaacctcgcttccctacccttactaacattaacgaaaataaccccaccctactaaaccccattaaacgcctggcagccggaagcctattcgcaggatttctcattactaacaacatttcccccgcatcccccttccaaacaacaatccccctctacctaaaactcacggccctcgctgtcactttcctaggacttctaacagccctagacctcaactacctaaccaacaaacttaaaataaaatccccactatgcacattttatttctccaacatactcggattctaccctagcatcacacaccgcacaatcccctatctaggccttcttacgagccaaaacctgcccctactcctcctagacctaacctgactagaaaagctattacctaaaacaatttcacagcaccaaatctccacctccatcatcacctcaacccaaaaaggcataattaaactttacttcctctctttcttcttcccactcatcctaaccctactcctaatcacataacctattcccccgagcaatctcaattacaatatatacaccaacaaacaatgttcaaccagtaactactactaatcaacgcccataatcatacaaagcccccgcaccaataggatcctcccgaatcaaccctgacccctctccttcataaattattcagcttcctacactattaaagtttaccacaaccaccaccccatcatactctttcacccacagcaccaatcctacctccatcgctaaccccactaaaacactcaccaagacctcaacccctgacccccatgcctcaggatactcctcaatagccatcgctgtagtatatccaaagacaaccatcattccccctaaataaattaaaaaaactattaaacccatataacctcccccaaaattcagaataataacacacccgaccacgccgctaacaatcaatactaaacccccataaataggagaaggcttagaagaaaaccccacaaaccccattactaaacccacactcaacagaaacaaagcatacatcattattctcgcacggactacaaccacgaccaatgatatgaaaaaccatcgttgtatttcaactacaagaacaccaatgaccccaatacgcaaaattaaccccctaataaaattaattaaccactcattcatcgacctccccaccccatccaacatctccgcatgatgaaacttcggctcactccttggcgcctgcctgatcctccaaatcaccacaggactattcctagccatgcactactcaccagacgcctcaaccgccttttcatcaatcgcccacatcactcgagacgtaaattatggctgaatcatccgctaccttcacgccaatggcgcctcaatattctttatctgcctcttcctacacatcgggcgaggcctatattacggatcatttctctactcagaaacctgaaacatcggcattatcctcctgcttgcaactatagcaacagccttcataggctatgtcctcccgtgaggccaaatatcattctgaggggccacagtaattacaaacttactatccgccatcccatacattgggacagacctagttcaatgaatctgagggggctactcagtagacagtcccaccctcacacgattctttacctttcacttcatcttacccttcattattgcagccctagcagcactccacctcctattcttgcacgaaacgggatcaaacaaccccctaggaatcacctcccattccgataaaatcaccttccacccttactacacaatcaaagacgccctcggcttacttctcttccttctctccttaatgacattaacactattctcaccagacctcctaggcgacccagacaattataccctagccaaccccttaaacacccctccccacatcaagcccgaatgatatttcctattcgcctacacaattctccgatccgtccctaacaaactaggaggcgtccttgccctactactatccatcctcatcctagcaataatccccatcctccatatatccaaacaacaaagcataatatttcgcccactaagccaatcactttattgactcctagccgcagacctcctcattctaacctgaatcggaggacaaccagtaagctacccctttaccatcattggacaagtagcatccgtactatacttcacaacaatcctaatcctaataccaactatctccctaattgaaaacaaaatactcaaatgggcctgtccttgtagtataaactaatacaccagtcttgtaaaccggagatgaaaacctttttccaaggacaaatcagagaaaaagtctttaactccaccattagcacccaaagctaagattctaatttaaactattctctgttctttcatggggaagcagatttgggtaccacccaagtattgactcacccatcaacaaccgctatgtatttcgtacattactgccagccaccatgaatattgtacggtaccataaatacttgaccacctgtagtacataaaaacccaatccacatcaaaaccccctccccatgcttacaagcaagtacagcaatcaaccttcaactatcacacatcaactgcaactccaaagccacccctcacccactaggatatcaacaaatctacccatccttaacagtacatggtacataaagccatttaccgtacatagcacattacagtcaaatcccttctcgtccccatggatgacccccctcagataggagtcccttgaccaccatcctccgtgaaatcaatatcccgcacaagagtgctactctcctcgctccgggcccataacacttgggggtagctaaagtgaactgtatccgacatctggttcctacttcagggccataaagcctaaatagcccacacgttccccttaaataagacatcacgatg

SEQ ID NO: 382 - DNA, 16568 bp, Homo sapiens mitochondrial
  3106: "n" refers to a nucleotide at position 3107 of the Cambridge Reference Sequence (CRS, Anderson et al. 1981 Nature 290:457-465), later determined to be absent from the human mtDNA sequence according to the revised CRS (rCRS, Andrews et al. 1999 Nature Genetics 23:147); "n" therefore represents a single nucleotide deletion at a position corresponding to nucleotide 3107 of SEQ ID NO:1 as provided herein.
gatcacaggtctatcaccctattaaccactcacgggagctctccatgcatttggtattttcgtctggggggtgtgcacgcgatagcattgcgagacgctggagccggagcaccctatgtcgcagtatctgtctttgattcctgcctcattctattatttatcgcacctacgttcaatattacaggcgaacatacttactaaagtgtgttaattaattaatgcttgtaggacataataataacaattgaatgtctgcacagccgctttccacacagacatcataacaaaaaatttccaccaaaccccccctcccccgccttctggccacagcacttaaacacatctctgccaaaccccaaaaacaaagaaccctaacaccagcctaaccagatttcaaattttatcttttggcggtatgcacttttaacagtcaccccccaactaacacattattttcccctcccactcccatactactaatctcatcaatacaacccccgcccatcctacccagcacacacaccgctgctaaccccataccccgaaccaaccaaaccccaaagacaccccccacagtttatgtagcttacctcctcaaagcaatacactgaaaatgtttagacgggctcacatcaccccataaacaaataggtttggtcctagcctttctattagctcttagtaagattacacatgcaagcatccccgttccagtgagttcaccctctaaatcaccacgatcaaaagggacaagcatcaagcacgcagcaatgcagctcaaaacgcttagcctagccacacccccacgggaaacagcagtgattaacctttagcaataaacgaaagtttaactaagctatactaaccccagggttggtcaatttcgtgccagccaccgcggtcacacgattaacccaagccaatagaagccggcgtaaagagtgttttagatcaccccctccccaataaagctaaaactcacctgagttgtaaaaaactccagttgacacaaaatagactacgaaagtggctttaacatatctgaacacacaatagctaagacccaaactgggattagataccccactatgcttagccctaaacctcaacagttaaatcaacaaaactgctcgccagaacactacgagccacagcttaaaactcaaaggacctggcggtgcttcatatccctctagaggagcctgttctgtaatcgataaaccccgatcaacctcaccacctcttgctcagcctatataccgccatcttcagcaaaccctgatgaaggctacaaagtaagcgcaagtacccacgtaaagacgttaggtcaaggtgtagcccatgaggtggcaagaaatgggctacattttctaccccagaaaactacgatagcccttatgaaacttaagggtcgaaggtggatttagcagtaaactgagagtagagtgcttagttgaacagggccctgaagcgcgtacacaccgcccgtcaccctcctcaagtatacttcaaaggacatttaactaaaacccctacgcatttatatagaggagacaagtcgtaacatggtaagtgtactggaaagtgcacttggacgaaccagagtgtagcttaacacaaagcacccaacttacacttaggagatttcaacttaacttgaccgctctgagctaaacctagccccaaacccactccaccttactaccagacaaccttagccaaaccatttacccaaataaagtataggcgatagaaattgaaacctggcgcaatagatatagtaccgcaagggaaagatgaaaaattataaccaagcataatatagcaaggactaacccctataccttctgcataatgaattaactagaaataactttgcaaggagagccaaagctaaggcccccgaaaccagacgagctacctaagaacagctaaaagagcacacccgtctatgtagcaaaatagtgggaagatttataggtagaggcgacaaacctaccgagcctggtgatagctggttgtccaagatagaatcttagttcaactttaaatttgcccacagaaccctctaaatccccttgtaaatttaactgttagtccaaagaggaacagctctttggacactaggaaaaaaccttgtagagagagtaaaaaatttaacacccatagtaggcctaaaagcagccaccaattaagaaagcgttcaagctcaacacccactacctaaaaaatcccaaacatataactgaactcctcacacccaattggaccaatctatcaccctatagaagaactaatgttagtataagtaacatgaaaacattctcctccgcataagcctgcgtcagattaaaacactgaactgacaattaacagcccaatatctacaatcaaccaacaagtcattattaccctcactgtcaacccaacacaggcatgctcataaggaaaggttaaaaaaagtaaaaggaactcggcaaatcttaccccgcctgtttaccaaaaacatcacctctagcatcaccagtattagaggcaccgcctgcccagtgacacatgtttaacggccgcggtaccctaaccgtgcaaaggtagcataatcacttgttccttaaatagggacctgtatgaatggctccacgagggttcagctgtctcttacttttaaccagtgaaattgacctgcccgtgaagaggcgggcatgacacagcaagacgagaagaccctatggagctttaatttattaatgcaaacagtacctaacaaacccacaggtcctaaactaccaaacctgcattaaaaatttcggttggggcgacctcggagcagaacccaacctccgagcagtacatgctaagacttcaccagtcaaagcgaactactatactcaattgatccaataacttgaccaacggaacaagttaccctagggataacagcgcaatcctattctagagtccatatcaacaatagggtttacgacctcgatgttggatcaggacatcccgatggtgcagccgctattaaaggttcgtttgttcaacgattaaagtcctacgtgatctgagttcagaccggagtaatccaggtcggtttctatctacnttcaaattcctccctgtacgaaaggacaagagaaataaggcctacttcacaaagcgccttcccccgtaaatgatatcatctcaacttagtattatacccacacccacccaagaacagggtttgttaagatggcagagcccggtaatcgcataaaacttaaaactttacagtcagaggttcaattcctcttcttaacaacatacccatggccaacctcctactcctcattgtacccattctaatcgcaatggcattcctaatgcttaccgaacgaaaaattctaggctatatacaactacgcaaaggccccaacgttgtaggcccctacgggctactacaacccttcgctgacgccataaaactcttcaccaaagagcccctaaaacccgccacatctaccatcaccctctacatcaccgccccgaccttagctctcaccatcgctcttctactatgaacccccctccccatacccaaccccctggtcaacctcaacctaggcctcctatttattctagccacctctagcctagccgtttactcaatcctctgatcagggtgagcatcaaactcaaactacgccctgatcggcgcactgcgagcagtagcccaaacaatctcatatgaagtcaccctagccatcattctactatcaacattactaataagtggctcctttaacctctccacccttatcacaacacaagaacacctctgattactcctgccatcatgacccttggccataatatgatttatctccacactagcagagaccaaccgaacccccttcgaccttgccgaaggggagtccgaactagtctcaggcttcaacatcgaatacgccgcaggccccttcgccctattcttcatagccgaatacacaaacattattataataaacaccctcaccactacaatcttcctaggaacaacatatgacgcactctcccctgaactctacacaacatattttgtcaccaagaccctacttctaacctccctgttcttatgaattcgaacagcatacccccgattccgctacgaccaactcatacacctcctatgaaaaaacttcctaccactcaccctagcattacttatatgatatgtctccatacccattacaatctccagcattccccctcaaacctaagaaatatgtctgataaaagagttactttgatagagtaaataataggagcttaaacccccttatttctaggactatgagaatcgaacccatccctgagaatccaaaattctccgtgccacctatcacaccccatcctaaagtaaggtcagctaaataagctatcgggcccataccccgaaaatgttggttatacccttcccgtactaattaatcccctggcccaacccgtcatctactctaccatctttgcaggcacactcatcacagcgctaagctcgcactgattttttacctgagtaggcctagaaataaacatgctagcttttattccagttctaaccaaaaaaataaaccctcgttccacagaagctgccatcaagtatttcctcacgcaagcaaccgcatccataatccttctaatagctatcctcttcaacaatatactctccggacaatgaaccataaccaatactaccaatcaatactcatcattaataatcataatggctatagcaataaaactaggaatagccccctttcacttctgagtcccagaggttacccaaggcacccctctgacatccggcctgcttcttctcacatgacaaaaactagcccccatctcaatcatataccaaatctctccttcactaaacgtaagccttctcctcactctctcaatcttatccatcatagcaggcagttgaggtggattaaaccaaacccagctacgcaaaatcttagcatactcctcaattacccacataggatgaataatagcaattctaccgtacaaccctaacataaccattcttaatttaactatttatattatcctaactactaccgcattcctactactcaacttaaactccagcaccacaaccctactactatctcgcacctgaaacaagctaacatgactaacacccttaattccatccaccctcctctccctaggaggcctgcccccgctaaccggctttttgcccaaatgggccattatcgaagaattcacaaaaaacaatagcctcatcatccccaccatcatagccaccatcaccctccttaacctctacttctacctacgcctaatctactccacctcaatcacactactccccatatctaacaacgtaaaaataaaatgacagtttgaacatacaaaacccaccccattcctccccacactcatcgcccttaccacgctactcctacctatctccccttttatactaataatcttatagaaatttaggttaaatacagaccaagagccttcaaagccctcagtaagttgcaatacttaatttctgtaacagctaaggactgcaaaaccccactctgcatcaactgaacgcaaatcagccactttaattaagctaagcccttactagaccaatgggacttaaacccacaaacacttagttaacagctaagcaccctaatcaactggcttcaatctacttctcccgccgccgggaaaaaaggcgggagaagccccggcaggtttgaagctgcttcttcgaatttgcaattcaatatgaaaatcacctcggagctggtaaaaagaggcctaacccctgtctttagatttacagtccaatgcttcactcagccattttacctcacccccactgatgttcgccgaccgttgactattctctacaaaccacaaagacattggaacactatacctattattcggcgcatgagctggagtcctaggcacagctctaagcctccttattcgagccgagctgggccagccaggcaaccttctaggtaacgaccacatctacaacgttatcgtcacagcccatgcatttgtaataatcttcttcatagtaatacccatcataatcggaggctttggcaactgactagttcccctaataatcggtgcccccgatatggcgtttccccgcataaacaacataagcttctgactcttacctccctctctcctactcctgctcgcatctgctatagtggaggccggagcagggacaggttgaacagtctaccctcccttagcagggaactactcccaccctggagcctccgtagacctaaccatcttctccttacacctagcaggtgtctcctctatcttaggggccatcaatttcatcacaacaattatcaatataaaaccccctgccataacccaataccaaacgcccctcttcgtctgatccgtcctaatcacagcagtcctacttctcctatctctcccagtcctagctgctggcatcactatactactaacagaccgcaacctcaacaccaccttcttcgaccccgccggaggaggagaccccattctataccaacacctattctgatttttcggtcaccctgaagtttatattcttatcctaccaggcttcggaataatctcccatattgtaacctactactccggaaaaaaagaaccatttggatacataggtatggtctgagctatgatatcaattggcttcctagggtttatcgtgtgagcacaccatatatttacagtaggaatagacgtagacacacgagcatatttcacctccgctaccataatcatcgctatccccaccggcgtcaaagtatttagctgactcgccacactccacggaagcaatatgaaatgatctgctgcagtgctctgagccctaggattcatctttcttttcaccgtaggtggcctgactggcattgtattagcaaactcatcactagacatcgtactacacgacacgtactacgttgtagctcacttccactatgtcctatcaataggagctgtatttgccatcataggaggcttcattcactgatttcccctattctcaggctacaccctagaccaaacctacgccaaaatccatttcactatcatattcatcggcgtaaatctaactttcttcccacaacactttctcggcctatccggaatgccccgacgttactcggactaccccgatgcatacaccacatgaaacatcctatcatctgtaggctcattcatttctctaacagcagtaatattaataattttcatgatttgagaagccttcgcttcgaagcgaaaagtcctaatagtagaagaaccctccataaacctggagtgactatatggatgccccccaccctaccacacattcgaagagcccgtatacataaaatctagacaaaaaaggaaggaatcgaaccccccaaagctggtttcaagccaaccccatggcctccatgactttttcaaaaaggtattagaaaaaccatttcataactttgtcaaagttaaattataggctaaatcctatatatcttaatggcacatgcagcgcaagtaggtctacaagacgctacttcccctatcatagaagagcttatcacctttcatgatcacgccctcataatcattttccttatctgcttcctagtcctgtatgcccttttcctaacactcacaacaaaactaactaatactaacatctcagacgctcaggaaatagaaaccgtctgaactatcctgcccgccatcatcctagtcctcatcgccctcccatccctacgcatcctttacataacagacgaggtcaacgatccctcccttaccatcaaatcaattggccaccaatggtactgaacctacgagtacaccgactacggcggactaatcttcaactcctacatacttcccccattattcctagaaccaggcgacctgcgactccttgacgttgacaatcgagtagtactcccgattgaagcccccattcgtataataattacatcacaagacgtcttgcactcatgagctgtccccacattaggcttaaaaacagatgcaattcccggacgtctaaaccaaaccactttcaccgctacacgaccgggggtatactacggtcaatgctctgaaatctgtggagcaaaccacagtttcatgcccatcgtcctagaattaattcccctaaaaatctttgaaatagggcccgtatttaccctatagcaccccctctaccccctctagagcccactgtaaagctaacttagcattaaccttttaagttaaagattaagagaaccaacacctctttacagtgaaatgccccaactaaatactaccgtatggcccaccataattacccccatactccttacactattcctcatcacccaactaaaaatattaaacacaaactaccacctacctccctcaccaaagcccataaaaataaaaaattataacaaaccctgagaaccaaaatgaacgaaaatctgttcgcttcattcattgcccccacaatcctaggcctacccgccgcagtactgatcattctatttccccctctattgacccccacctccaaatatctcatcaacaaccgactaatcaccacccaacaatgactaatcaaactaacctcaaaacaaatgatagccatacacaacactaaaggacgaacctgatctcttatactagtatccttaatcatttttattgccacaactaacctcctcggactcctgcctcactcatttacaccaaccacccaactatctataaacctagccatggccatccccttatgagcgggcgcagtgattataggctttcgctctaagattaaaaatgccctagcccacttcttaccacaaggcacacctacaccccttatccccatactagttattatcgaaaccatcagcctactcattcaaccaatagccctggccgtacgcctaaccgctaacattactgcaggccacctactcatgcacctaattggaagcgccaccctagcaatatcaaccattaaccttccctctacacttatcatcttcacaattctaattctactgactatcctagaaatcgctgtcgccttaatccaagcctacgttttcacacttctagtaagcctctacctgcacgacaacacataatgacccaccaatcacatgcctatcatatagtaaaacccagcccatgacccctaacaggggccctctcagccctcctaatgacctccggcctagccatgtgatttcacttccactccataacgctcctcatactaggcctactaaccaacacactaaccatataccaatgatggcgcgatgtaacacgagaaagcacataccaaggccaccacacaccacctgtccaaaaaggccttcgatacgggataatcctatttattacctcagaagtttttttcttcgcaggatttttctgagccttttaccactccagcctagcccctaccccccaactaggagggcactggcccccaacaggcatcaccccgctaaatcccctagaagtcccactcctaaacacatccgtattactcgcatcaggagtatcaatcacctgagctcaccatagtctaatagaaaacaaccgaaaccaaataattcaagcactgcttattacaattttactgggtctctattttaccctcctacaagcctcagagtacttcgagtctcccttcaccatttccgacggcatctacggctcaacattttttgtagccacaggcttccacggacttcacgtcattattggctcaactttcctcactatctgcttcatccgccaactaatatttcactttacatccaaacatcactttggcttcgaagccgccgcctgatactggcattttgtagatgtggtttgactatttctgtatgtctccatctattgatgagggtcttactcttttagtataaatagtaccgttaacttccaattaactagttttgacaacattcaaaaaagagtaataaacttcgccttaattttaataatcaacaccctcctagccttactactaataattattacattttgactaccacaactcaacggctacatagaaaaatccaccccttacgagtgcggcttcgaccctatatcccccgcccgcgtccctttctccataaaattcttcttagtagctattaccttcttattatttgatctagaaattgccctccttttacccctaccatgagccctacaaacaactaacctgccactaatagttatgtcatccctcttattaatcatcatcctagccctaagtctggcctatgagtgactacaaaaaggattagactgagccgaattggtatatagtttaaacaaaacgaatgatttcgactcattaaattatgataatcatatttaccaaatgcccctcatttacataaatattatactagcatttaccatctcacttctaggaatactagtatatcgctcacacctcatatcctccctactatgcctagaaggaataatactatcgctgttcattatagctactctcataaccctcaacacccactccctcttagccaatattgtgcctattgccatactagtctttgccgcctgcgaagcagcggtgggcctagccctactagtctcaatctccaacacatatggcctagactacgtacataacctaaacctactccaatgctaaaactaatcgtcccaacaattatattactaccactgacatgactttccaaaaaacacataatttgaatcaacacaaccacccacagcctaattattagcatcatccccctactattttttaaccaaatcaacaacaacctatttagctgttccccaaccttttcctccgaccccctaacaacccccctcctaatactaactacctgactcctacccctcacaatcatggcaagccaacgccacttatccagtgaaccactatcacgaaaaaaactctacctctctatactaatctccctacaaatctccttaattataacattcacagccacagaactaatcatattttatatcttcttcgaaaccacacttatccccaccttggctatcatcacccgatgaggcaaccagccagaacgcctgaacgcaggcacatacttcctattctacaccctagtaggctcccttcccctactcatcgcactaatttacactcacaacaccctaggctcactaaacattctactactcactctcactgcccaagaactatcaaactcctgagccaacaacttaatatgactagcttacacaatagcttttatagtaaagatacctctttacggactccacttatgactccctaaagcccatgtcgaagcccccatcgctgggtcaatagtacttgccgcagtactcttaaaactaggcggctatggtataatacgcctcacactcattctcaaccccctgacaaaacacatagcctaccccttccttgtactatccctatgaggcataattataacaagctccatctgcctacgacaaacagacctaaaatcgctcattgcatactcttcaatcagccacatagccctcgtagtaacagccattctcatccaaaccccctgaagcttcaccggcgcagtcattctcataatcgcccacggacttacatcctcattactattctgcctagcaaactcaaactacgaacgcactcacagtcgcatcataatcctctctcaaggacttcaaactctactcccactaatagctttttgatgacttctagcaagcctcgctaacctcgccttaccccccactattaacctactgggagaactctctgtgctagtaaccacgttctcctgatcaaatatcactctcctacttacaggactcaacatactagtcacagccctatactccctctacatatttaccacaacacaatggggctcactcacccaccacattaacaacataaaaccctcattcacacgagaaaacaccctcatgttcatacacctatcccccattctcctcctatccctcaaccccgacatcattaccgggttttcctcttgtaaatatagtttaaccaaaacatcagattgtgaatctgacaacagaggcttacgaccccttatttaccgagaaagctcacaagaactgctaactcatgcccccatgtctaacaacatggctttctcaacttttaaaggataacagctatccattggtcttaggccccaaaaattttggtgcaactccaaataaaagtaataaccatgcacactactataaccaccctaaccctgacttccctaattccccccatccttaccaccctcgttaaccctaacaaaaaaaactcatacccccattatgtaaaatccattgtcgcatccacctttattatcagtctcttccccacaacaatattcatgtgcctagaccaagaagttattatctcgaactgacactgagccacaacccaaacaacccagctctccctaagcttcaaactagactacttctccataatattcatccctgtagcattgttcgttacatggtccatcatagaattctcactgtgatatataaactcagacccaaacattaatcagttcttcaaatatctactcattttcctaattaccatactaatcttagttaccgctaacaacctattccaactgttcatcggctgagagggcgtaggaattatatccttcttgctcatcagttgatgatacgcccgagcagatgccaacacagcagccattcaagcaatcctatacaaccgtatcggcgatatcggtttcatcctcgccttagcatgatttatcctacactccaactcatgagacccacaacaaatagcccttctaaacgctaatccaagcctcaccccactactaggcctcctcctagcagcagcaggcaaatcagcccaattaggtctccacccctgactcccctcagccatagaaggccccaccccagtctcagccctactccactcaagcactatagttgtagcaggagtcttcttactcatccgcttccaccccctagcagaaaatagcccactaatccaaactctaacactatgcttaggcgctatcaccactctgttcgcagcagtctgcgcccttacacaaaatgacatcaaaaaaatcgtagccttctccacttcaagtcaactaggactcataatagttacaatcggcatcaaccaaccacacctagcattcctgcacatctgtacccacgccttcttcaaagccatactatttatgtgctccgggtccatcatccacaaccttaacaatgaacaagatattcgaaaaataggaggactactcaaaaccatacctctcacttcaacctccctcaccattggcagcctagcattagcaggaatacctttcctcacaggtttctactccaaagaccacatcatcgaaaccgcaaacatatcatacacaaacgcctgagccctatctattactctcatcgctacctccctgacaagcgcctatagcactcgaataattcttctcaccctaacaggtcaacctcgcttccccacccttactaacattaacgaaaataaccccaccctactaaaccccattaaacgcctggcagccggaagcctattcgcaggatttctcattactaacaacatttcccccgcatcccccttccaaacaacaatccccctctacctaaaactcacagccctcgctgtcactttcctaggacttctaacagccctagacctcaactacctaaccaacaaacttaaaataaaatccccaccatgcacattttatttctccaacatactcggattctaccctagcatcacacaccgcacaatcccctatctaggccttcttacgagccaaaacctgcccctactcctcctagacctaacctgactagaaaagctattacctaaaacaatttcacagcaccaaatctccacctccatcatcacctcaacccaaaaaggcataattaaactttacttcctctctttcttcttcccactcatcctaaccctactcctaatcacataacctattcccccgagcaatctcaattacaatatatacaccaacaaacaatgttcaaccagtaactactactaatcaacgcccataatcatacaaagcccccgcaccaataggatcctcccgaatcaaccctgacccttctccttcataaattattcagcttcctacactattaaagtttaccacaaccaccaccccatcatactctttcacccacagcaccaatcctacctccatcgctaaccccactaaaacactcaccaagacctcaacccctgacccccatgcctcaggatactcctcaatagccatcgctgtagtatatccaaagacaaccatcattccccctaaataaattaaaaaaactattaaacccatataacctcccccaaaattcagaataataacacacccgaccacaccgctaacaatcaatactaaacccccataaataggagaaggcttagaagaaaaccccacaaaccccattactaaacccacactcaacagaaacaaagcatacatcattattctcgcacggactacaaccacgaccaatgatatgaaaaaccatcgttgtatttcaactacaagaacaccaatgaccccaatacgcaaaattaaccccctaataaaattaattaaccactcattcatcgacctccccaccccatccaacatctccgcatgatgaaacttcggctcactccttggcgcctgcctgatcctccaaatcaccacaggactattcctagccatgcactactcaccagacgcctcaaccgccttttcatcaatcgcccacatcactcgagacgtaaattatggctgaatcatccgctaccttcacgccaatggcgcctcaatattctttatctgcctcttcctacacatcgggcgaggcctatattacggatcatttctctactcagaaacctgaaacatcggcattatcctcctgcttgcaactatagcaacagccttcataggctatgtcctcccgtgaggccaaatatcattctgaggggccacagtaattacaaacttactatccgccatcccatacattgggacagacctagttcaatgaatctgaggaggctactcagtagacagtcccaccctcacacgattctttacctttcacttcatcttacccttcattattgcagccctagcagcactccacctcctattcttgcacgaaacgggatcaaacaaccccctaggaatcacctcccattccgataaaatcaccttccacccttactacacaatcaaagacgccctcggcttacttctcttccttctctccttaatgacattaacactattctcaccagacctcctaggcgacccagacaattataccctagccaaccccttaaacacccctccccacatcaagcccgaatgatatttcctattcgcctacacaattctccgatccgtccctaacaaactaggaggcgtccttgccctattactatccatcctcatcctagcaataatccccatcctccatatatccaaacaacaaagcataatatttcgcccactaagccaatcactttattgactcctagccgcagacctcctcattctaacctgaatcggaggacaaccagtaagctacccttttaccatcattggacaagtagcatccgtactatacttcacaacaatcctaatcctaataccaactatctccctaattgaaaacaaaatactcaaatgggcctgtccttgtagtataaactaatacaccagtcttgtaaaccggagatgaaaacctttttccaaggacaaatcagagaaaaagtctttaactccaccattagcacccaaagctaagattctaatttaaactattctctgttctttcatggggaagcagatttgggtaccacccaagtattgactcacccatcaacaaccgccatgtatttcgtacattactgccagccaccatgaatatcgtacggtaccataaatacttgaccacctgtagtacataaaaacccaatccacatcaaaaccccctccccatgcttacaagcaagtacagcaatcaaccttcaactatcacacatcaactgcaactccaaagccacccctcacccactaggataccaacaaacctacccacccttaacagtacatagtacataaagccatttaccgtacatagcacattacagtcaaatcccttctcgtccccatggatgacccccctcagataggggtcccttggccaccatcctccgtgaaatcaatatcccgcacaagagtgctactctcctcgctccgggcccataacacttgggggtagctaaagtgaactgtatccgacatctggttcctacttcagggtcataaagcctaaatagcccacacgttccccttaaataagacatcacgatg

SEQ ID NO: 383 - DNA, 16570 bp, Homo sapiens mitochondrial
  3108: "n" refers to a nucleotide at position 3107 of the Cambridge Reference Sequence (CRS, Anderson et al. 1981 Nature 290:457-465), later determined to be absent from the human mtDNA sequence according to the revised CRS (rCRS, Andrews et al. 1999 Nature Genetics 23:147); "n" therefore represents a single nucleotide deletion at a position corresponding to nucleotide 3107 of SEQ ID NO:1 as provided herein.
gatcacaggtctatcaccctattaaccactcacgggagctctccatgcatttggtattttcgtctggggggtgtgcacgcgatagcattgcgagacgctggagccggagcaccctatgtcgcagtatctgtctttgattcctgccccatcccattatttatcgcacctacgttcaatattacaggcgaacatacctactaaagtgtgttaattaattaatgcttgtaggacataataataacaattgaatgtctgcacagccgctttccacacagacatcataacaaaaaatttccaccaaaccccccctcccccgccttctggccacagcacttaaacacatctctgccaaaccccaaaaacaaagaaccctaacaccagcctaaccagatttcaaattttatcttttggcggtatgcacttttaacagtcaccccccaactaacacattattttcccctcccactcccatactactaatctcatcaatacaacccccgcccatcctacccagcacacacacaccgctgctaaccccataccccgaaccaaccaaaccccaaagacaccccccacagtttatgtagcttacctcctcaaagcaatacactgaaaatgtttagacgggctcacatcaccccataaacaaataggtttggtcctagcctttctattagctcttagtaagattacacatgcaagcatccccgttccagtgagttcaccctctaaatcaccacgatcaaaagggacaagcatcaagcacgcaacaatgcagctcaaaacgcttagcctagccacacccccacgggaaacagcagtgattaacctttagcaataaacgaaagtttaactaagctatactaaccccagggttggtcaatttcgtgccagccaccgcggtcacacgattaacccaagtcaatagaagccggcgtaaagagtgttttagatcaccccctccccaataaagctaaaactcacctgagttgtaaaaaactccagttgacacaaaataaactacgaaagtggctttaacatatctgaacacacaatagctaagacccaaactgggattagataccccactatgcttagccctaaacctcaacagttaaatcaacaaaactgctcgccagaacactacgagccacagcttaaaactcaaaggacctggcggtgcttcatatccctctagaggagcctgttctgtaatcgataaaccccgatcaacctcaccacctcttgctcagcctatataccgccatcttcagcaaaccctgatgaaggctacaaagtaagcgcaagtacccacgtaaagacgttaggtcaaggtgtagcccatgaggtggcaagaaatgggctacattttctaccccagaaaactacgatagcccttatgaaacttaagggtcgaaggtggatttagcagtaaactgagagtagagtgcttagttgaacagggccctgaagcgcgtacacaccgcccgtcaccctcctcaagtatacttcaaaggacatttaactaaaacccctacgcatttatatagaggagacaagtcgtaacatggtaagtgtactggaaagtgcacttggacgaaccagagtgtagcttaacacaaagcacccaacttacacttaggagatttcaacttaacttgaccgctctgagctaaacctagccccaaacccactccaccttactaccagacaaccttagccaaaccatttacccaaataaagtataggcgatagaaattgaaacctggcgcaatagatatagtaccgcaagggaaagatgaaaaattataaccaagcataatatagcaaggactaacccctataccttctgcataatgaattaactagaaataactttgcaaggagagccaaagctaagacccccgaaaccagacgagctacctaagaacagctaaaagagcacacccgtctatgtagcaaaatagtgggaagatttataggtagaggcgacaaacctaccgagcctggtgatagctggttgtccaagatagaatcttagttcaactttaaatttgcccacagaaccctctaaatccccttgtaaatttaactgttagtccaaagaggaacagctctttggacactaggaaaaaaccttgtagagagagtaaaaaatttaacacccatagtaggcctaaaagcagccaccaattaagaaagcgttcaagctcaacacccactacctaaaaaatcccaaacatataactgaactcctcacacccaattggaccaatctatcaccctatagaagaactaatgttagtataagtaacatgaaaacattctcctccgcataagcctgcgtcagattaaaacactgaactgacaattaacagcccaatatctacaatcaaccaacaagtcattattacccccactgtcaacccaacacaggcatgctcataaggaaaggttaaaaaaagtaaaaggaactcggcaaatcttaccccgcctgtttaccaaaaacatcacctctagcatcaccagtattagaggcaccgcctgcccagtgacacatgtttaacggccgcggtaccctaaccgtgcaaaggtagcataatcacttgttccttaaatagggacctgtatgaatggctccacgagggttcagctgtctcttacttttaaccagtgaaattgacctgcccgtgaagaggcgggcatgacacagcaagacgagaagaccctatggagctttaatttattaatgcaaacagtacctaacaaacccacaggtcctaaactactaaacctgcattaaaaatttcggttggggcgacctcggagcagaacccaacctccgagcagtacatgctaagacttcaccagtcaaagcgaactactatactcaattgatccaataacttgaccaacggaacaagttaccctagggataacagcgcaatcctattctagagtccatatcaacaatagggtttacgacctcgatgttggatcaggacatcccgatggtgcagccgctattaaaggttcgtttgttcaacgattaaagtcctacgtgatctgagttcagaccggagtaatccaggtcggtttctatctacnttcaaattcctccctgtacgaaaggacaagagaaataaggcctacttcacaaagcgccttcccccgtaaatgatatcatctcaacttagtattatacccacacccacccaagaacagggtttgttaagatggcagagcccggtaatcgcataaaacttaaaactttacagtcagaggttcaattcctcttcttaacaacatacccatggccaacctcctactcctcattgtacccattctaatcgcaatggcattcctaatgcttaccgaacgaaaaattctaggctatatacaactacgcaaaggccccaacgttgtaggcccctacgggctactacaacccttcgctgacgccataaaactcttcaccaaagagcccctaaaacccgccacatctaccatcaccctctacatcaccgccccgaccttagctctcaccatcgctcttctactatgaacccccctccccatacccaaccccctggttaacctcaacctaggcctcctatttattctagccacctctagcctagccgtttactcaatcctctgatcagggtgagcatcaaactcaaactacgccctgatcggcgcactgcgagcagtagcccaaacaatctcatatgaagtcaccctagccatcattctactatcaacattactaataagtggctcctttaacctctccacccttatcacaacacaagaacacctctgattactcctgccatcatgacccttggccataatatgatttatctccacactagcagagaccaaccgaacccccttcgaccttgccgaaggggaatccgaactagtctcaggcttcaacatcgaatacgccgcaggccccttcgccctattcttcatagccgaatacacaaacattattataataaacaccctcaccactacaatcttcctaggaacaacatatgacgcactctcccctgaactctacacaacatattttgtcaccaagaccctacttctgacctccctgttcttatgaattcgaacagcatacccccgattccgctacgaccaactcatacacctcctatgaaaaaacttcctaccactcaccctagcattacttatatgatatgtctccatacccattacaatctccagcattccccctcaaacctaagaaatatgtctgataaaagagttactttgatagagtaaataataggagcttaaacccccttatttctaggactatgagaatcgaacccatccctgagaatccaaaattctccgtgccacctatcacaccccatcctaaagtaaggtcagctaaataagctatcgggcccataccccgaaaatgttggttatacccttcccgtactaattaatcccctggcccaacccgtcatctactctaccatctttgcaggcacactcatcacagcgctaagctcgcactgattttttacctgagtaggcctagaaataaacatgctagcttttattccagttctaaccaaaaaaataaaccctcgttccacagaagctgccatcaagtatttcctcacgcaagcaaccgcatccataatccttctaatagctatcctcttcaacaatatactctccggacaatgaaccataaccaatactaccaatcaatactcatcattaataatcataatggctatagcaataaaactaggaatagccccctttcacttctgagtcccagaggttacccaaggcacccctctgacatccggcctgcttcttctcacatgacaaaaactagcccccatctcaatcatataccaaatctctccctcactaaacgtaagccttctcctcactctctcaatcttatccatcatagcaggcagttgaggtggattaaaccaaacccagctacgcaaaatcttagcatactcctcaattacccacataggatgaataatagcagttctaccgtacaaccctaacataaccattcttaatttaactatttatattatcctaactactaccgcattcctactactcaacttaaactccagcaccacgaccctactactatctcgcacctgaaacaagctaacatgactaacacccttaattccatccaccctcctctccctaggaggcctgcccccgctaaccggctttttgcccaaatgggccattatcgaagaattcacaaagaacaatagcctcatcatccccaccatcatagccaccatcaccctccttaacctctacttctacctacgcctaatctactccacctcaatcacactactccccatatctaacaacgtaaaaataaaatgacagtttgaacatacaaaacccaccccattcctccccacactcatcacccttaccacgctactcctacctatctccccttttatactaataatcttatagaaatttaggttaaatacagaccaagagccttcaaagccctcagtaagttgcaatacttaatttctgtaacagctaaggactgcaaaaccccactctgcatcaactgaacgcaaatcagccactttaattaagctaagcccttactagaccaatgggacttaaacccacaaacacttagttaacagctaagcaccctaatcaactggcttcaatctacttctcccgccgccgggaaaaaaggcgggagaagccccggcaggtttgaagctgcttcttcgaatttgcaattcaatatgaaaatcacctcggagctggtaaaaagaggcctaacccctgtctttagatttacagtccaatgcttcactcagccattttacctcacccccactgatgttcgccgaccgttgactattctctacaaaccacaaagacattggaacactatacctattattcggcgcatgagctggagtcctaggcacagctctaagcctccttattcgagccgagctgggccagccaggcaaccttctaggtaacgaccacatctacaacgttatcgtcacagcccatgcatttgtaataatcttcttcatagtaatacccatcataatcggaggctttggcaactgactagttcccctaataatcggtgcccccgatatggcgtttccccgcataaacaacataagcttctgactcttacctccctctctcctactcctgctcgcatctgctatagtggaggccggagcaggaacaggttgaacagtctaccctcccttagcagggaactactcccaccctggagcctccgtagacctaaccatcttctccttacacctagcaggtgtctcctctatcttaggggccatcaatttcatcacaacaattatcaatataaaaccccctgccataacccaataccaaacgcccctcttcgtctgatccgtcctaatcacagcagtcctacttctcctatctctcccagtcctagctgctggcatcactatactactaacagaccgcaacctcaacaccaccttcttcgaccccgccggaggaggagaccccattctataccaacacctattctgatttttcggtcaccctgaagtttatattcttatcctaccaggcttcggaataatctcccatattgtaacttactactccggaaaaaaagaaccatttggatacataggtatggtctgagctatgatatcaattggcttcctagggtttatcgtgtgagcacaccatatatttacagtaggaatagacgtagacacacgagcatatttcacctccgctaccataatcatcgctatccccaccggcgtcaaagtatttagctgactcgccacactccacggaagcaatatgaaatgatctgctgcagtgctctgagccctaggattcatctttcttttcaccgtaggtggcctgactggcattgtattagcaaactcatcactagacatcgtactacacgacacgtactacgttgtagctcacttccactatgtcctatcaataggagctgtatttgccatcataggaggcttcattcactgatttcccctattctcaggctacaccctagaccaaacctacgccaaaatccatttcactatcatattcatcggcgtaaatctaaccttcttcccacaacactttctcggcctatccggaatgccccgacgttactcggactaccccgatgcatacaccacatgaaatatcctatcatctgtaggttcattcatttctctaacagcagtaatattaataattttcatgatttgagaagccttcgcttcgaagcgaaaagtcctaatagtagaagaaccctccataaacctggagtgactatatggatgccccccaccctaccacacattcgaagaacccgtatacataaaatctagacaaaaaaggaaggaatcgaaccccccaaagctggtttcaagccaaccccatggcctccatgactttttcaaaaagatattagaaaaaccatttcataactttgtcaaagttaaattataggctaaatcctatatatcttaatggcacatgcagcgcaagtaggtctacaagacgctacttcccctatcatagaagagcttatcacctttcatgatcacgccctcataatcattttccttatctgcttcctagtcctgtatgcccttttcctaacactcacaacaaaactaactaatactaacatctcagacgctcaggaaatagagaccgtctgaactatcctgcccgccatcatcctagtcctcatcgccctcccatccctacgcatcctttacataacagacgaggtcaacgatccctcccttaccatcaaatcaattggccaccaatggtactgaacctacgagtacaccgactacggcggactaatcttcaactcctacatacttcccccattattcctagaaccaggcgacctgcgactccttgacgttgacaatcgagtagtactcccgattgaagcccccattcgtataataattacatcacaagacgtcttgcactcatgagctgtccccacattaggcttaaaaacagatgcaattcccggacgtctaaaccaaaccactttcaccgctacacgaccgggggtatactacggtcaatgctctgaaatctgtggagcaaaccacagtttcatacccatcgtcctagaattaatccccctaaaaatctttgaaatagggcccgtatttaccctatagcaccccctctaccccctctagagcccactgtaaagctaacttagcattaaccttttaagttaaagattaagagaaccaacacctctttacagtgaaatgccccaactaaatactaccgtatggcccaccataattacccccatactccttacactattcctcatcacccaactaaaaatattaaacacaaactaccacctacctccctcatcaaagcccataaaaataaaaaattataacaaaccctgagaaccaaaatgaacgaaaatctgttcgcttcattcattgcccccacaatcctaggcctacccgccgcagtactgatcattctatttccccctctattgatccccacctccaaatatctcatcaacaaccgactaatcaccacccaacaatgactaatcaaactaacctcaaaacaaatgatagccatacacaacactaaaggacgaacctgatctcttatactagtatccttaatcatttttattgccacaactaacctcctcggactcctgcctcactcatttacaccaaccacccaactatctataaacctagccatggccatccccttatgagcgggcgcagtgattataggctttcgctctaagattaaaaatgccctagcccacttcttaccacaaggcacacctacaccccttatccccatactagttattatcgaaaccatcagcctactcattcaaccaatagccctggccgtacgcctaaccgctaacattactgcaggccacctactcatgcacctaattggaagcgccaccctagcaatatcaaccattaaccttccctctacacttatcatcttcacaattctaattctactgactatcctagaaatcgctgtcgccttaatccaagcctacgttttcacacttctagtaagcctctacctgcacgacaacacataatgacccaccaatcgcatgcctatcatatagtaaaacccagcccatgacccctaacaggggccctctcagccctcctaatgacctccggcctagccatgtgatttcacttccactccataacgctcctcatactaggcctactaaccaacacactaaccatataccaatgatggcgcgatgtaacacgagaaagcacataccaaggccaccacacaccacctgtccaaaaaggccttcgatacgggataatcctatttattacctcagaagtttttttcttcgcaggatttttctgagccttttaccactccagcctagcccctaccccccaactaggagggcactggcccccaacaggcatcaccccgctaaatcccctagaagtcccactcctaaacacatccgtattactcgcatcaggagtatcaatcacctgagctcaccatagtctaatagaaaacaaccgaaaccaaataattcaagcactgcttattacaattttactgggtctctattttaccctcctacaagcctcagagtacttcgagtctcccttcaccatttccgacggcatctacggctcaacattttttgtagccacaggcttccacggacttcacgtcattattggctcaactttcctcactatctgcttcatccgccaactaatatttcactttacatccaaacatcactttggcttcgaagccgccgcctgatactggcattttgtagatgtggtttgactatttctgtatgtctccatctattgatgagggtcttactcttttagtataaatagtaccgttaacttccaattaactagttttgacaacattcaaaaaagagtaataaacttcgccttaattttaataatcaacaccctcctagccttactactaataatcattacattttgactaccacaactcaacggctacatagaaaaatccaccccttacgagtgcggcttcgaccctatatcccccgcccgcgtccctttctccataaaattcttcttagtagctattaccttcttattatttgatctagaaattgccctccttttacccctaccatgagccctacaaacaactaacctgccactaatagttatgtcatccctcttattaatcatcatcctagccctaagtctggcctatgagtgactacaaaaaggattagactgagccgaattggtatatagtttaaacaaaacgaatgatttcgactcattaaattatgataatcatatttaccaaatgcccctcatttacataaatattatactagcatttaccatctcacttctaggaatactagtatatcgctcacacctcatatcctccctactatgcctagaaggaataatactatcgctgttcattatagctactctcataaccctcaacacccactccctcttagccaatattgtgcctattgccatactagtctttgccgcctgcgaagcagcggtgggcctagccctactagtctcaatctccaacacatatggcctagactacgtacataacctaaacctactccaatgctaaaactaatcgtcccaacaattatattactaccactgacatgactttccaaaaaacacataatttgaatcaacacaaccacccacagcctaattattagcatcatccccctactattttttaaccaaatcaacaacaacctatttagctgttccccaaccttttcctccgaccccctaacaacccccctcctaatactaactacctgactcctacccctcacaatcatggcaagccaacgccacttatccagtgaaccactatcacgaaaaaaactctacctctctatactaatctccctacaaatctccttaattataacattcacagccacagaactaatcatattttatatcttcttcgaaaccacacttatccccaccttggctatcatcacccgatgaggcaaccagccagaacgcctgaacgcaggcacatacttcctattctacaccctagtaggctcccttcccctactcatcgcactaatttacactcacaacaccctaggctcactaaacattctactactcactctcactgcccaagaactatcaaactcctgagccaacaacttaatatgactagcttacacaatagcttttatagtaaagatacctctttacggactccacttatgactccctaaagcccatgtcgaagcccccatcgctgggtcaatagtacttgccgcagtactcttaaaactaggcggctatggtataatacgcctcacactcattctcaaccccctgacaaaacacatagcctaccccttccttgtactatccctatgaggcataattataacaagctccatctgcctacgacaaacagacctaaaatcgctcattgcatactcttcaatcagccacatagccctcgtagtaacagccattctcatccaaaccccctgaagcttcaccggcgcagtcattctcataatcgcccacggacttacatcctcattactattctgcctagcaaactcaaactacgaacgcactcacagtcgcatcataatcctctctcaaggacttcaaactctactcccactaatagctttttgatgacttctagcaagcctcgctaacctcgccttaccccccactattaacctactgggagaactctctgtgctagtaaccacattctcctgatcaaatatcactctcctactcacaggactcaacatactagtcacagccctatactccctctacatatttaccacaacacaatggggctcactcacccaccacattaacaacataaaaccctcattcacacgagaaaacaccctcatgttcatacacctatcccccattctcctcctatccctcaaccccgacatcattaccgggttttcctcttgtaaatatagtttaaccaaaacatcagattgtgaatctgacaacagaggcttacgaccccttatttaccgagaaagctcacaagaactgctaactcatgcccccatgtctaacaacatggctttctcaacttttaaaggataacagctatccattggtcttaggccccaaaaattttggtgcaactccaaataaaagtaataaccatgcacactactataaccaccctaaccctgacttccctaattccccccatccttaccaccctcgttaaccctaacaaaaaaaactcatacccccattatgtaaaatccattgtcgcatccacctttattatcagtctcttccccacaacaatattcatgtgcctagaccaagaagttattatctcgaactgacactgagccacaacccaaacaacccagctctccctaagcttcaaactagactacttctccataatattcatccctgtagcattgttcgttacatggtccatcatagaattctcactgtgatatataaactcagacccaaacattaatcaattcttcaagtatctactcattttcctaattaccatactaatcttagttaccgctaacaacctattccaactgttcatcggctgagagggcgtaggaattatatccttcttgctcatcagttgatgatacgcccgagcagatgccaacacagcagccattcaagcaatcctatacaaccgtatcggcgatatcggtttcatcctcgccttagcatgatttatcctacactccaactcatgagacccacaacaaatagcccttctaaacgctaatccaagcctcaccccactactaggcctcctcctagcagcagcaggcaaatcagcccaattaggtctccacccctgactcccctcagccatagaaggccccaccccagtctcagccctactccactcaagcactatagttgtagcaggaatcttcttactcatccgcttccaccccctagcagaaaatagcccactaatccaaactctaacactatgcttaggcgctatcaccactctgttcgcagcagtctgcgcccttacacaaaatgacatcaaaaaaatcgtagccttctccacttcaagtcaactaggactcataatagttacaatcggcatcaaccaaccacacctagcattcctgcacatctgtacccacgccttcttcaaagccatactatttatgtgctccgggtccatcatccacaaccttaacaatgaacaagatattcgaaaaataggaggactactcaaaaccatacctctcacttcaacctccctcaccattggcagcctagcattagcaggaatacctttcctcacaggtttctactccaaagaccacatcatcgaaaccgcaaacatatcatacacaaacgcctgagccctatctattactctcatcgctacctccctaacaagcgcctatagcactcgaataattcttctcaccctaacaggtcaacctcgcttccctacccttactaacattaacgaaaataaccccaccctactaaaccccattaaacgcctggcagccggaagcctattcgcaggatttctcattactaacaacatttcccccgcatcccccttccaaacaacaatccccctctacctaaaactcacggccctcgctgtcactttcctaggacttctaacagccctagacctcaactacctaaccaacaaacttaaaataaaatccccactatgcacattttatttctccaacatactcggattctaccctagcatcacacaccgcacaatcccctatctaggccttcttacgagccaaaacctgcccctactcctcctagacctaacctgactagaaaagctattacctaaaacaatttcacagcaccaaatctccacctccatcatcacctcaacccaaaaaggcataattaaactttacttcctctctttcttcttcccactcatcctaaccctactcctaatcacataacctattcccccgagcaatctcaattacaatatatacaccaacaaacaatgttcaaccagtaactactactaatcaacgcccataatcatacaaagcccccgcaccaataggatcctcccgaatcaaccctgacccctctccttcataaattattcagcttcctacactattaaagtttaccacaaccaccaccccatcatactctttcacccacagcaccaatcctacctccatcgctaaccccactaaaacactcaccaagacctcaacccctgacccccatgcctcaggatactcctcaatagccatcgctgtagtatatccaaagacaaccatcattccccctaaataaattaaaaaaactattaaacccatataacctcccccaaaattcagaataataacacacccgaccacgccgctaacaatcaatactaaacccccataaataggagaaggcttagaagaaaaccccacaaaccccattactaaacccacactcaacagaaacaaagcatacatcattattctcgcacggactacaaccacgaccaatgatatgaaaaaccatcgttgtatttcaactacaagaacaccaatgaccccaatacgcaaaattaaccccctaataaaattaattaaccactcattcatcgacctccccaccccatccaacatctccgcatgatgaaacttcggctcactccttggcgcctgcctgatcctccaaatcaccacaggactattcctagccatgcactactcaccagacgcctcaaccgccttttcatcaatcgcccacatcactcgagacgtaaattatggctgaatcatccgctaccttcacgccaatggcgcctcaatattctttatctgcctcttcctacacatcgggcgaggcctatattacggatcatttctctactcagaaacctgaaacatcggcattatcctcctgcttgcaactatagcaacagccttcataggctatgtcctcccgtgaggccaaatatcattctgaggggccacagtaattacaaacttactatccgccatcccatacattgggacagacctagttcaatgaatctgagggggctactcagtagacagtcccaccctcacacgattctttacctttcacttcatcttacccttcattattgcagccctagcagcactccacctcctattcttgcacgaaacgggatcaaacaaccccctaggaatcacctcccattccgataaaatcaccttccacccttactacacaatcaaagacgccctcggcttacttctcttccttctctccttaatgacattaacactattctcaccagacctcctaggcgacccagacaattataccctagccaaccccttaaacacccctccccacatcaagcccgaatgatatttcctattcgcctacacaattctccgatccgtccctaacaaactaggaggcgtccttgccctactactatccatcctcatcctagcaataatccccatcctccatatatccaaacaacaaagcataatatttcgcccactaagccaatcactttattgactcctagccgcagacctcctcattctaacctgaatcggaggacaaccagtaagctacccctttaccatcattggacaagtagcatccgtactatacttcacaacaatcctaatcctaataccaactatctccctaattgaaaacaaaatactcaaatgggcctgtccttgtagtataaactaatacaccagtcttgtaaaccggagatgaaaacctttttccaaggacaaatcagagaaaaagtctttaactccaccattagcacccaaagctaagattctaatttaaactattctctgttctttcatggggaagcagatttgggtaccacccaagtattgactcacccatcaacaaccgctatgtatttcgtacattactgccagccaccatgaatattgtacggtaccataaatacttgaccacctgtagtacataaaaacccaatccacatcaaaaccccctccccatgcttacaagcaagtacagcaatcaaccttcaactatcacacatcaactgcaactccaaagccacccctcacccactaggatatcaacaaacctacccatccttaacagtacatggtacataaagccatttaccgtacatagcacattacagtcaaatcccttctcgtccccatggatgacccccctcagataggagtcccttgaccaccatcctccgtgaaatcaatatcccgcacaagagtgctactctcctcgctccgggcccataacacttgggggtagctaaagtgaactgtatccgacatctggttcctacttcagggccataaagcctaaatagcccacacgttccccttaaataagacatcacgatg

SEQ ID NO: 384 - DNA, 16571 bp, Homo sapiens mitochondrial
  3109: "n" refers to a nucleotide at position 3107 of the Cambridge Reference Sequence (CRS, Anderson et al. 1981 Nature 290:457-465), later determined to be absent from the human mtDNA sequence according to the revised CRS (rCRS, Andrews et al. 1999 Nature Genetics 23:147); "n" therefore represents a single nucleotide deletion at a position corresponding to nucleotide 3107 of SEQ ID NO:1 as provided herein.
gatcacaggtctatcaccctattaaccactcacgggagctctccatgcatttggtattttcgtctggggggtgtgcacgcgatagcattgcgagacgctggagccggagcaccctatgtcgcagtatctgtctttgattcctgcctcattctattatttatcgcacctacgttcaatattacaggcgaacatacttactaaagtgtgttaattaattaatgcttgtaggacataataataacaattgaatgtctgcacagccgctttccacacagacatcataacaaaaaatttccaccaaaccccccctcccccccgcttctggccacagcacttaaacacatctctgccaaaccccaaaaacaaagaaccctaacaccagcctaaccagatttcaaattttatcttttggcggtatgcacttttaacagtcaccccccaactaacacattattttcccctcccactcccatactactaatctcatcaatacaacccccgcccatcctacccagcacacacacaccgctgctaaccccataccccgaaccaaccaaaccccaaagacaccccccacagtttatgtagcttacctcctcaaagcaatacactgaaaatgtttagacgggctcacatcaccccataaacaaataggtttggtcctagcctttctattagctcttagtaagattacacatgcaagcatccccgttccagtgagttcaccctctaaatcaccacgatcaaaagggacaagcatcaagcacgcagcaatgcagctcaaaacgcttagcctagccacacccccacgggaaacagcagtgattaacctttagcaataaacgaaagtttaactaagctatactaaccccagggttggtcaatttcgtgccagccaccgcggtcacacgattaacccaagtcaatagaagccggcgtaaagagtgttttagatcaccccctccccaataaagctaaaactcacctgagttgtaaaaaactccagttgacacaaaatagactacgaaagtggctttaacatatctgaacacacaatagctaagacccaaactgggattagataccccactatgcttagccctaaacctcaacagttaaatcaacaaaactgctcgccagaacactacgagccacagcttaaaactcaaaggacctggcggtgcttcatatccctctagaggagcctgttctgtaatcgataaaccccgatcaacctcaccacctcttgctcagcctatataccgccatcttcagcaaaccctgatgaaggctacaaagtaagcgcaagtacccacgtaaagacgttaggtcaaggtgtagcccatgaggtggcaagaaatgggctacattttctaccccagaaaactacgatagcccttatgaaacttaagggtcgaaggtggatttagcagtaaactgagagtagagtgcttagttgaacagggccctgaagcgcgtacacaccgcccgtcaccctcctcaagtatacttcaaaggacatttaactaaaacccctacgcatttatatagaggagacaagtcgtaacatggtaagtgtactggaaagtgcacttggacgaaccagagtgtagcttaacacaaagcacccaacttacacttaggagatttcaacttaacttgaccgctctgagctaaacctagccccaaacccactccaccttactaccagacaaccttagctaaaccatttacccaaataaagtataggcgatagaaattgaaacctggcgcaatagatatagtaccgcaagggaaagatgaaaaattataaccaagcataatatagcaaggactaacccctataccttctgcataatgaattaactagaaataactttgcaaggagagccaaagctaagacccccgaaaccagacgagctacctaagaacagctaaaagagcacacccgtctatgtagcaaaatagtgggaagatttataggtagaggcgacaaacctaccgagcctggtgatagctggttgtccaagatagaatcttagttcaactttaaatttgcccacagaaccctctaaatccccttgtaaatttaactgttagtccaaagaggaacagctctttggacactaggaaaaaaccttgtagagagagtaaaaaatttaacacccatagtaggcctaaaagcagccaccaattaagaaagcgttcaagctcaacacccactacctaaaaaatcccaaacatataactgaactcctcacacccaattggaccaatctatcaccctatagaagaactaatgttagtataagtaacatgaaaacattctcctccgcataagcctgcgtcagattaaaacactgaactgacaattaacagcccaatatctacaatcaaccaacaagtcattattaccctcactgtcaacccaacacaggcatgctcataaggaaaggttaaaaaaagtaaaaggaactcggcaaatcttaccccgcctgtttaccaaaaacatcacctctagcatcaccagtattagaggcaccgcctgcccagtgacacatgtttaacggccgcggtaccctaaccgtgcaaaggtagcataatcacttgttccttaaatagggacctgtatgaatggctccacgagggttcagctgtctcttacttttaaccagtgaaattgacctgcccgtgaagaggcgggcatgacacagcaagacgagaagaccctatggagctttaatttattaatgcaaacggtacctaacaaacccacaggtcctaaactaccaaacctgcattaaaaatttcggttggggcgacctcggagcagaacccaacctccgagcagtacatgctaagacttcaccagtcaaagcgaactactatactcaattgatccaataacttgaccaacggaacaagttaccctagggataacagcgcaatcctattctagagtccatatcaacaatagggtttacgacctcgatgttggatcaggacatcccgatggtgcagccgctattaaaggttcgtttgttcaacgattaaagtcctacgtgatctgagttcagaccggagtaatccaggtcggtttctatctacnttcaaattcctccctgtacgaaaggacaagagaaataaggcctacttcacaaagcgccttcccccgtaaatgatatcatctcaacttagcattatacccacacctacccaagaacagggtttgttaagatggcagagcccggtaatcgcataaaacttaaaactttacagtcagaggttcaattcctcttcttaacaacatacccatggccaacctcctactcctcattgtacccattctaatcgcaatggcattcctaatgcttaccgaacgaaaaattctaggctatatacaactacgcaaaggccccaacgttgtaggcccctacgggctactacaacccttcgctgacgccataaaactcttcaccaaagagcccctaaaacccgccacatctaccatcaccctctacatcaccgccccgaccttagctctcaccatcgctcttctactatgaacccccctccccatacccaaccccctggtcaacctcaacctaggcctcctatttattctagccacctctagcctagccgtttactcaatcctctgatcagggtgagcatcaaactcaaactacgccctgatcggcgcactgcgagcagtagcccaaacaatctcatatgaagtcaccctagccatcattctactatcaacattactaataagtggctcctttaacctctccacccttatcacaacacaagaacacctctgattactcctgccatcatgacccttggccataatatgatttatctccacactagcagagaccaaccgaacccccttcgaccttgccgaaggggagtccgaactagtctcaggcttcaacatcgaatacgccgcaggccccttcgccctattcttcatagccgaatacacaaacattattataataaacaccctcaccactacaatcttcctaggaacaacatatgacgcactctcccctgaactctacacaacatattttgtcaccaagaccctacttctaacctccctgttcttatgaattcgaacagcatacccccgattccgctacgaccaactcatacacctcctatgaaaaaacttcctaccactcaccctagcattacttatatgatatgtctccatacccattacaatctccagcattccccctcaaacctaagaaatatgtctgataaaagagttactttgatagagtaaataataggagcttaaacccccttatttctaggactatgagaatcgaacccatccctgagaatccaaaattctccgtgccacctatcacaccccatcctaaagtaaggtcagctaaataagctatcgggcccataccccgaaaatgttggttatacccttcccgtactaattaatcccctggcccaacccgtcatctactctaccatctttgcaggcacactcatcacagcgctaagctcgcactgattttttacctgagtaggcctagaaataaacatgctagcttttattccagttctaaccaaaaaaataaaccctcgttccacagaagctgccatcaagtatttcctcacgcaagcaaccgcatccataatccttctaatagctatcctcttcaacaatatactctccggacaatgaaccataaccagtactaccaatcaatactcatcattaataatcataatggctatagcaataaaactaggaatagccccctttcacttctgagtcccagaggttacccaaggcacccctctgatatccggcctgcttcttctcacatgacaaaaactagcccccatctcaatcatataccaaatctctccctcactaaacgtaagccttctcctcactctctcaatcttatccatcatagcaggcagttgaggtggattaaaccaaacccagctacgcaaaatcttagcatactcctcaattacccacataggatgaataatagcagttctaccgtacaaccctaacataaccattcttaatttaactatttatattatcctaactactaccgcattcctactactcaacttaaactccagcaccacgaccctactactatctcgcacctgaaacaagctaacatgactaacacccttaattccatccaccctcctctccctaggaggcctgcccccgctaaccggctttttgcccaaatgggccattatcgaagaattcacaaaaaacaatagcctcatcatccccaccatcatagccaccatcaccctccttaacctctacttctacctacgcctaatctactccacctcaatcacactactccccatatctaacaacgtaaaaataaaatgacagtttgaacatacaaaacccaccccattcctccccacactcatcgcccttaccacgctactcctacctatctccccttttatactaataatcttatagaaatttaggttaaatacagaccaagagccttcaaagccctcagtaagttgcaatacttaatttctgtaacagctaaggactgcaaaaccccactctgcatcaactgaacgcaaatcagccactttaattaagctaagcccttactagaccaatgggacttaaacccacaaacacttagttaacagctaagcaccctaatcaactggcttcaatctacttctcccgccgccgggaaaaaaggcgggagaagccccggcaggtttgaagctgcttcttcgaatttgcaattcaatatgaaaatcacctcggagctggtaaaaagaggcctaacccctgtctttagatttacagtccaatgcttcactcagccattttacctcacccccactgatgttcgccgaccgttgactattctctacaaaccacaaagacattggaacactatacctattattcggcgcatgagctggagtcctaggcacagctctaagcctccttattcgagccgagctgggccagccaggcaaccttctaggtaacgaccacatctacaacgttatcgtcacagcccatgcatttgtaataatcttcttcatagtaatacccatcataatcggaggctttggcaactgactagttcccctaataatcggtgcccccgatatggcgtttccccgcataaacaacataagcttctgactcttacctccctctctcctactcctgctcgcatctgctatagtggaggccggagcaggaacaggttgaacagtctaccctcccttagcagggaactactcccaccctggagcctccgtagacctaaccatcttctccttacacctagcaggtgtctcctctatcttaggggccatcaatttcatcacaacaattatcaatataaaaccccctgccataacccaataccaaacgcccctcttcgtctgatccgtcctaatcacagcagtcctacttctcctatctctcccagtcctagctgctggcatcactatactactaacagaccgcaacctcaacaccaccttcttcgaccccgccggaggaggagaccccattctataccaacacctattctgatttttcggtcaccctgaagtttatattcttatcctaccaggcttcggaataatctcccatattgtaacttactactccggaaaaaaagaaccatttggatacataggtatggtctgagctatgatatcaattggcttcctagggtttatcgtgtgagcacaccatatatttacagtaggaatagacgtagacacacgagcatatttcacctccgctaccataatcatcgctatccccaccggcgtcaaagtatttagctgactcgccacactccacggaagcaatatgaaatgatctgctgcagtgctctgagccctaggattcatctttcttttcaccgtaggtggcctgactggcattgtattagcaaactcatcactagacatcgtactacacgacacgtactacgttgtagctcacttccactatgtcctatcaataggagctgtatttgccatcataggaggcttcattcactgatttcccctattctcaggctacaccctagaccaaacctacgccaaaatccatttcactatcatattcatcggcgtaaatctaactttcttcccacaacactttctcggcctatccggaatgccccgacgttactcggactaccccgatgcatacaccacatgaaacatcctatcatctgtaggctcattcatttctctaacagcagtaatattaataattttcatgatttgagaagccttcgcttcgaagcgaaaagtcctaatagtagaagaaccctccataaacctggagtgactatatggatgccccccaccctaccacacattcgaagaacccgtatacataaaatctagacaaaaaaggaaggaatcgaaccccccaaagctggtttcaagccaaccccatggcctccatgactttttcaaaaaggtattagaaaaaccatttcataactttgtcaaagttaaattataggctaaatcctatatatcttaatggcacatgcagcgcaagtaggtctacaagacgctacttcccctatcatagaagagcttatcacctttcatgatcacgccctcataatcattttccttatctgcttcctagtcctgtatgcccttttcctaacactcacaacaaaactaactaatactaacatctcagacgctcaggaaatggaaaccgtctgaactatcctgcccgccatcatcctagtcctcatcgccctcccatccctacgcatcctttacataacagacgaggtcaacgatccctcccttaccatcaaatcaattggccaccaatggtactgaacctacgagtacaccgactacggcggactaatcttcaactcctacatacttcccccattattcctagaaccaggcgacctgcgactccttgacgttgacaatcgagtagtactcccgattgaagcccccattcgtataataattacatcacaagacgtcttgcactcatgagctgtccccacattaggcttaaaaacagatgcaattcccggacgtctaaaccaaaccactttcaccgctacacgaccgggggtatactacggtcaatgctctgaaatctgtggagcaaaccacagtttcatgcccatcgtcctagaattaattcccctaaaaatctttgaaatagggcccgtatttaccctatagcaccccctctaccccctctagagcccactgtaaagctaacttagcattaaccttttaagttaaagattaagagaaccaacacctctttacagtgaaatgccccaactaaatactaccgtatggcccaccataattacccccatactccttacactattcctcatcacccaactaaaaatattaaacacaaactaccacctacctccctcaccaaagcccataaaaataaaaaattataacaaaccctgagaaccaaaatgaacgaaaatctgttcgcttcattcattgcccccacaatcctaggcctacccgccgcagtactgatcattctatttccccctctattgatccccacctccaaatatctcatcaacaaccgactaatcaccacccaacaatgactaatcaaactaacctcaaaacaaatgataaccatacacaacactaaaggacgaacctgatctcttatactagtatccttaatcatttttattgccacaactaacctcctcggactcctgcctcactcatttacaccaaccacccaactatctataaacctagccatggccatccccttatgagcgggcgcagtgattataggctttcgctctaagattaaaaatgccctagcccacttcttaccacaaggcacacctacaccccttatccccatactagttattatcgaaaccatcagcctactcattcaaccaatagccctggccgtacgcctaaccgctaacattactgcaggccacctactcatgcacctaattggaagcgccaccctagcaatatcaaccattaaccttccctctacacttatcatcttcacaattctaattctactgactatcctagaaatcgctgtcgccttaatccaagcctacgttttcacacttctagtaagcctctacctgcacgacaacacataatgacccaccaatcacatgcctatcatatagtaaaacccagcccatgacccctaacaggggccctctcagccctcctaatgacctccggcctagccatgtgatttcacttccactccataacgctcctcatactaggcctactaaccaacacactaaccatataccaatgatggcgcgatgtaacacgagaaagcacataccaaggccaccacacaccacctgtccaaaaaggccttcgatacgggataatcctatttattacctcagaaatttttttcttcgcaggatttttctgagccttttaccactccagcctagcccctaccccccaattaggagggcactggcccccaacaggcatcaccccgctaaatcccctagaagtcccactcctaaacacatccgtattactcgcatcaggagtatcaatcacctgagctcaccatagtctaatagaaaacaaccgaaaccaaataattcaagcactgcttattacaattttactgggtctctattttaccctcctacaagcctcagagtacttcgagtctcccttcaccatttccgacggcatctacggctcaacattttttgtagccacaggcttccacggacttcacgtcattattggctcaactttcctcactatctgcttcatccgccaactaatatttcactttacatccaaacatcactttggcttcgaagccgccgcctgatactggcattttgtagatgtggtttgactatttctgtatgtctccatctattgatgagggtcttactcttttagtataaatagtaccgttaacttccaattaactagttttgacaacattcaaaaaagagtaataaacttcgccttaattttaataatcaacaccctcctagccttactactaataattattacattttgactaccacaactcaacggctacatagaaaaatccaccccttacgagtgcggcttcgaccctatatcccccgcccgcgtccctttctccataaaattcttcttagtagctattaccttcttattatttgatctagaaattgccctccttttacccctaccatgagccctacaaacaactaacctgccactaatagttatgtcatccctcttattaatcatcatcctagccctaagtctggcctatgagtgactacaaaaaggattagactgaaccgaattggtatatagtttaaacaaaacgaatgatttcgactcattaaattatgataatcatatttaccaaatgcccctcatttacataaatattatactagcatttaccatctcacttctaggaatactagtatatcgctcacacctcatatcctccctactatgcctagaaggaataatactatcgctgttcattatagctactctcataaccctcaacacccactccctcttagccaatattgtgcctattgccatactagtctttgccgcctgcgaagcagcggtgggcctagccctactagtctcaatctccaacacatatggcctagactacgtacataacctaaacctactccaatgctaaaactaatcgtcccaacaattatattactaccactgacatgactttccaaaaaacacataatttgaatcaacacaaccacccacagcctaattattagcatcatccctctactattttttaaccaaatcaacaacaacctatttagctgttccccaaccttttcctccgaccccctaacaacccccctcctaatactaactacctgactcctacccctcacaatcatggcaagccaacgccacttatccagtgaaccactatcacgaaaaaaactctacctctctatactaatctccctacaaatctccttaattataacattcacagccacagaactaatcatattttatatcttcttcgaaaccacacttatccccaccttggctatcatcacccgatgaggcaaccagccagaacgcctgaacgcaggcacatacttcctattctacaccctagtaggctcccttcccctactcatcgcactaatttacactcacaacaccctaggctcactaaacattctactactcactctcactgcccaagaactatcaaactcctgagccaacaacttaatatgactagcttacacaatagcttttatagtaaagatacctctttacggactccacttatgactccctaaagcccatgtcgaagcccccatcgctgggtcaatagtacttgccgcagtactcttgaaactaggcggctatggtataatacgcctcacactcattctcaaccccctgacaaaacacatagcctaccccttccttgtactatccctatgaggcataattataacaagctccatctgcctacgacaaacagacctaaaatcgctcattgcatactcttcaatcagccacatagccctcgtagtaacagccattctcatccaaaccccctgaagcttcaccggcgcagtcattctcataatcgcccacggacttacatcctcattactattctgcctagcaaactcaaactacgaacgcactcacagtcgcatcataatcctctctcaaggacttcaaactctactcccactaatagctttttgatgacttctagcaagcctcgctaacctcgccttaccccccactattaacctactgggagaactctctgtgctagtaaccacgttctcctgatcaaatatcactctcctacttacaggactcaacatactagtcacagccctatactccctctacatatttaccacaacacaatggggctcactcacccaccacattaacaacataaaaccctcattcacacgagaaaacaccctcatgttcatacacctatcccccattctcctcctatccctcaaccccgacatcattaccgggttttcctcttgtaaatatagtttaaccaaaacatcagattgtgaatctgacaacagaggcttacgaccccttatttaccgagaaagctcacaagaactgctaactcatgcccccatgtctaacaacatggctttctcaacttttaaaggataacagctatccattggtcttaggccccaagaattttggtgcaactccaaataaaagtaataaccatgcacactactataaccaccctaaccctaacttccctaattccccccatccttaccaccctcgttaaccctaacaaaaaaaactcatacccccattatgtaaaatccattgtcgcatccacctttattatcagtctcttccccacaacaatattcatgtgcctagaccaagaagttattatctcgaactgacactgagccacaacccaaacaacccagctctccctaagcttcaaactagactacttctccataatattcatccctgtagcattgttcgttacatggtccatcatagaattctcactgtgatatataaactcagacccaaacattaatcagttcttcaaatatctactcatcttcctaattaccatactaatcttagttaccgctaacaacctattccaactgttcatcggctgagagggcgtaggaattatatccttcttgctcatcagttgatgatacgcccgagcagatgccaacacagcagccattcaagcaatcctatacaaccgtatcggcgatatcggtttcatcctcgccttagcatgatttatcctacactccaactcatgagacccacaacaaatagcccttctaaacgctaatccaagcctcaccccactactaggcctcctcctagcagcagcaggcaaatcagcccaattaggtctccacccctgactcccctcagccatagaaggccccaccccagtctcagccctactccactcaagcactatagttgtagcaggaatcttcttactcatccgcttccaccccctagcagaaaatagcccactaatccaaactctaacactatgcttaggcgctatcaccactctgttcgcagcagtctgcgcccttacacaaaatgacatcaaaaaaatcgtagccttctccacttcaagtcaactaggactcataatagttacaatcggcatcaaccaaccacacctagcattcctgcacatctgtacccacgccttcttcaaagccatactatttatgtgctccgggtccatcatccacaaccttaacaatgaacaagatattcgaaaaataggaggactactcaaaaccatacctctcacttcaacctccctcaccattggcagcctagcattagcaggaatacctttcctcacaggtttctactccaaagaccacatcatcgaaaccgcaaacatatcatacacaaacgcctgagccctatctattactctcatcgctacctccctgacaagcgcctatagcactcgaataatccttctcaccctaacaggtcgacctcgcttccccacccttactaacattaacgaaaataaccccaccctactaaaccccattaaacgcctggcagccggaagcctattcgcaggatttctcattactaacaacatttcccccgcatcccccttccaaacaacaatccccctctacctaaaactcacagccctcgctgtcactttcctaggacttctaacagccctagacctcaactacctaaccaacaaacttaaaataaaatccccactatgcacattttatttctccaacatactcggattctaccctagcatcacacaccgcacaatcccctatctaggccttcttacgagccaaaacctgcccctactcctcctagacctaacctgactagaaaagctattacctaaaacaatttcacagcaccaaatctccacctccatcatcacctcaacccaaaaaggcataattaaactttacttcctctctttcttcttcccactcatcctaaccctactcctaatcacataacctattcccccgagcaatctcaattacaatatacacaccaacaaacaatgttcaaccagtaactactactaatcaacgcccataatcatacaaagcccccgcaccaataggatcctcccgaatcaaccctgacccctctccttcataaattattcagcttcctacactattaaagtttaccacaaccaccaccccatcatactctttcacccacagcaccaatcctacctccatcgctaaccccactaaaacactcaccaagacctcaacccctgacccccatgcctcaggatactcctcaatagccatcgctgtagtatatccaaagacaaccatcattccccctaaataaattaaaaaaactattaaacccatataacctcccccaaaattcagaataataacacacccgaccacaccgctaacaatcaatactaaacccccataaataggagaaggcttagaagaaaaccccacaaaccccattactaaacccacactcaacagaaacaaagcatacatcattattctcgcacggactacaaccacgaccaatgatatgaaaaaccatcgttgtatttcaactacaagaacaccaatgaccccaatacgcaaaattaaccccctaataaaattaattaaccactcattcatcgacctccccaccccatccaacatctccgcatgatgaaacttcggctcactccttggcgcctgcctgatcctccaaatcaccacaggactattcctagccatgcactactcaccagacgcctcaaccgccttttcatcaatcgcccacatcacccgagacgtaaattatggctgaatcatccgctaccttcacgccaatggcgcctcaatattctttatctgcctcttcctacacatcgggcgaggcctatattacggatcatttctctactcagaaacctgaaacatcggcattatcctcctgcttgcaactatagcaacagccttcataggctatgtcctcccgtgaggccaaatatcattctgaggggccacagtaattacaaacttactatccgccatcccatacattgggacagacctagttcaatgaatctgaggaggctactcagtagacagtcccaccctcacacgattctttacctttcacttcatcttgcccttcattattgcagccctagcagcactccacctcctattcttgcacgaaacgggatcaaacaaccccctaggaatcacctcccattccgataaaatcaccttccacccttactacacaatcaaagacgccctcggcttacttctcttccttctctccttaatgacattaacactattctcaccagacctcctaggcgacccagacaattataccctagccaaccccttaaacacccctccccacatcaagcccgaatgatatttcctattcgcctacacaattctccgatccgtccctaacaaactaggaggcgtccttgccctattactatccatcctcatcctagcaataatccccatcctccatatatccaaacaacaaagcataatatttcgcccactaagccaatcactttattgactcctagccgcagacctcctcattctaacctgaatcggaggacaaccagtaagctacccttttaccatcattggacaagtagcatccgtactatacttcacaacaatcctaatcctaataccaactatctccctaattgaaaacaaaatactcaaatgggcctgtccttgtagtataaactaatacaccagtcttgtaaaccggagatgaaaacctttttccaaggacaaatcagagaaaaagtctttaactccaccattagcacccaaagctaagattctaatttaaactattctctgttctttcatggggaagcagatttgggtaccacccaagtattgactcacccatcaacaaccgctatgtatttcgtacattactgccagccaccatgaatattgtacggtaccataaatacttgaccacctgtagtacataaaaacccaatccacatcaaaaccccccccccatgcttacaagcaagtacagcaatcaaccctcaactatcacacatcaactgcaactccaaagccacccctcacccattaggataccaacaaacctacccacccttaacagtacatagtacataaagccatttaccgtacatagcacattacagtcaaatcccttctcgtccccatggatgacccccctcagataggggtcccttaaccaccatcctccgtgaaatcaatatcccgcacaagagtgctactctcctcgctccgggcccataacacttgggggtagctaaagtgaactgtatccgacatctggttcctacttcagggtcataaagcctaaatagcccacacgttccccttaaataagacatcacgatg

SEQ ID NO: 385 - DNA, 16570 bp, Homo sapiens mitochondrial
  3107: "n" refers to a nucleotide at position 3107 of the Cambridge Reference Sequence (CRS, Anderson et al. 1981 Nature 290:457-465), later determined to be absent from the human mtDNA sequence according to the revised CRS (rCRS, Andrews et al. 1999 Nature Genetics 23:147); "n" therefore represents a single nucleotide deletion at a position corresponding to nucleotide 3107 of SEQ ID NO:1 as provided herein.
gatcacaggtctatcaccctattaaccactcacgggagctctccatgcatttggtattttcgtctggggggtgtgcacgcgatagcattgcgagacgctggagccggagcaccctatgtcgcagtatctgtctttgattcctgcctcatcccattatttatcgcacctacgttcaatattacaggcgaacatacttactaaagtgtgttaattaattaatgcttgtaggacataataataacaattgatgtctgcacagccgctttccacacagacatcataacaaaatttccaccaaaccccccctccccccccgcttctggccacagcacttaaacacatctctgccaaaccccaaaaacaaagaaccctaacaccagcctaaccagatttcaaattttatcttttggcggtatgcacttttaacagtcaccccccaactaacacattattttcccctcccactcccatactactaatctcatcaacacaacccccgcccatcctacccagcacacacacaccgctgctaaccccataccccgaaccaaccaaaccccaaagacaccccccacagtttatgtagcttacctcctcaaagcaatacactgaaaatgtttagacgggctcacatcaccccataaacaaataggtttggtcctagcctttctattagctcttagtaagattacacatgcaagcatccccgttccagtgagttcaccctctaaatcaccacgatcaaaagggacaagcatcaagcacgcagcaatgcagctcaaaacgcttagcctagccacacccccacgggaaacagcagtgattaacctttagcaataaacgaaagtttaactaagctatactaaccccagggttggtcaatttcgtgccagccaccgcggtcacacgattaacccaagtcaatagaagccggcgtaaagagtgttttagatcaccccctccccaataaagctaaaactcacctgagttgtaaaaaactccagttgacacaaaatagactacgaaagtggctttaacatatctgaacacacaatagctaagacccaaactgggattagataccccactatgcttagccctaaacctcaacagttaaatcaacaaaactgctcgccagaacactacgagccacagcttaaaactcaaaggacctggcggtgcttcatatccctctagaggagcctgttctgtaatcgataaaccccgatcaacctcaccacctcttgctcagcctatataccgccatcttcagcaaaccctgatgaaggctacaaagtaagcgcaagtacccacgtaaagacgttaggtcaaggtgtagcccatgaggtggcaagaaatgggctacattttctaccccagaaaactacgatagcccttatgaaacttaagggtcgaaggtggatttagcagtaaactgagagtagagtgcttagttgaacagggccctgaagcgcgtacacaccgcccgtcaccctcctcaagtatacttcaaaggacatttaactaaaacccctacgcatttatatagaggagacaagtcgtaacatggtaagtgtactggaaagtgcacttggacgaaccagagtgtagcttaacacaaagcacccaacttacacttaggagatttcaacttaacttgaccgctctgagctaaacctagccccaaacccactccaccttactaccagacaaccttagccaaaccatttacccaaataaagtataggcgatagaaattgaaacctggcgcaatagatatagtaccgcaagggaaagatgaaaaattataaccaagcataatatagcaaggactaacccctataccttctgcataatgaattaactagaaataactttgcaaggagaaccaaagctaagacccccgaaaccagacgagctacctaagaacagctaaaagagcacacccgtctatgtagcaaaatagtgggaagatttataggtagaggcgacaaacctaccgagcctggtgatagctggttgtccaagatagaatcttagttcaactttaaatttgcccacagaaccctctaaatccccttgtaaatttaactgttagtccaaagaggaacagctctttggacactaggaaaaaaccttgtagagagagtaaaaaatttaacacccatagtaggcctaaaagcagccaccaattaagaaagcgttcaagctcaacacccactacctaaaaaatcccaaacatataactgaactcctcacacccaattggaccaatctatcaccctatagaagaactaatgttagtataagtaacatgaaaacattctcctccgcataagcctgcgtcagattaaaacactgaactgacaattaacagcccaatatctacaatcaaccaacaagtcattattaccctcactgtcaacccaacacaggcatgctcataaggaaaggttaaaaaaagtaaaaggaactcggcaaatcttaccccgcctgtttaccaaaaacatcacctctagcatcaccagtattagaggcaccgcctgcccagtgacacatgtttaacggccgcggtaccctaaccgtgcaaaggtagcataatcacttgttccttaaatagggacctgtatgaatggctccacgagggttcagctgtctcttacttttaaccagtgaaattgacctgcccgtgaagaggcgggcatgacacagcaagacgagaagaccctatggagctttaatttattaatgcaaacagtacctaacaaacccacaggtcctaaactaccaaacctgcattaaaaatttcggttggggcgacctcggagcagaacccaacctccgagcagtacatgctaagacttcaccagtcaaagcgaactactatactcaattgatccaataacttgaccaacggaacaagttaccctagggataacagcgcaatcctattctagagtccatatcaacaatagggtttacgacctcgatgttggatcaggacatcccgatggtgcagccgctattaaaggttcgtttgttcaacgattaaagtcctacgtgatctgagttcagaccggagtaatccaggtcggtttctatctacnttcaaattcctccctgtacgaaaggacaagagaaataaggcctacttcacaaagcgccttcccccgtaaatgatatcatctcaacttagtattatacccacacccacccaagaacagggtttgttaagatggcagagcccggtaatcgcataaaacttaaaactttacagtcagaggttcaattcctcttcttaacaacatacccatggccaacctcctactcctcattgtacccattctaatcgcaatggcattcctaatgcttaccgaacgaaaaattctaggctatatacaactacgcaaaggccccaacgttgtaggcccctacgggctactacaacccttcgctgacgccataaaactcttcaccaaagagcccctaaaacccgccacatctaccatcaccctctacatcaccgccccgaccttagctctcaccatcgcacttctactatgaacccccctccccatacccaaccccctggtcaacctcaacctaggcctcctatttattctagccacctctagcctagccgtttactcaatcctctgatcagggtgagcatcaaactcaaactacgccctgatcggcgcactgcgagcagtagcccaaacaatctcatatgaagtcaccctagccatcattctactatcaacattactaataagtggctcctttaacctctccacccttatcacaacacaagaacacctctgattactcctgccatcatgacccttggccataatatgatttatctccacactagcagagaccaaccgaacccccttcgaccttgccgaaggggagtccgaactagtctcaggcttcaacatcgaatacgccgcaggccccttcgccctattcttcatagccgaatacacaaacattattataataaacaccctcaccactacaatcttcctaggaacaacatatgacgcactctcccctgaactctacacaacatattttgtcaccaagaccctacttctaacctccctgttcttatgaattcgaacagcatacccccgattccgctacgaccaactcatacacctcctatgaaaaaacttcctaccactcaccctagcattacttatatgatatgtctccatacccattacaatctccagcattccccctcaaacctaagaaatatgtctgataaaagagttactttgatagagtaaataataggagcttaaacccccttatttctaggactatgagaatcgaacccatccctgagaatccaaaattctccgtgccacctatcacaccccatcctaaagtaaggtcagctaaataagctatcgggcccataccccgaaaatgttggttatacccttcccgtactaattaatcccctggcccaacccgtcatctactctaccatctttgcaggcacactcatcacagcgctaagctcgcactgattttttacctgagtaggcctagaaataaacatgctagcttttattccagttctaaccaaaaaaataaaccctcgttccacagaagctgccatcaagtatttcctcacgcaagcaaccgcatccataatccttctaatagctatcctcttcaacaatatactctccgggcaatgaaccataaccaatactaccaatcaatactcatcattaataatcataatggctatagcaataaaactaggaatagccccctttcacttctgagtcccagaggttacccaaggcacccctctgacatccggcctgcttcttctcacatgacaaaaactagcccccatctcaatcatataccaaatctctccctcactaaacgtaagccttctcctcactctctcaatcttatccatcatagcaggcagttgaggtggattaaaccaaacccagctacgcaaaatcttagcatactcctcaattacccacataggatgaataatagcagttctaccgtacaaccctaacataaccattcttaatttaactatttatattatcctaactactaccgcattcctactactcaacttaaactccagcaccacgaccctactactatctcgcacctgaaacaagctaacatgactaacacccttaattccatccaccctcctctccctaggaggcctgcccccgctaaccggctttttgcccaaatgggccattatcgaagaattcacaaaaaacaatagcctcatcatccccaccatcatagccaccatcaccctccttaacctctacttctacctacgcctaatctactccacctcaatcacactactccccatatctaacaacgtaaaaataaaatgacagtttgaacatacaaaacccaccccattcctccccacactcatcgcccttaccacgctactcctacctatctccccttttatactaataatcttatagaaatttaggttaaatacagaccaagagccttcaaagccctcagtaagttgcaatacttaatttctgtaacagctaaggactgcaaaaccccactctgcatcaactgaacgcaaatcagccactttaattaagctaagcccttactagaccaatgggacttaaacccacaaacacttagttaacagctaagcaccctaatcaactggcttcaatctacttctcccgccgccgggaaaaaaggcgggagaagccccggcaggtttgaagctgcttcttcgaatttgcaattcaatatgaaaatcacctcggagctggtaaaaagaggcctaacccctgtctttagatttacagtccaatgcttcactcagccattttacctcacccccactgatgttcgccgaccgttgactattctctacaaaccacaaagacattggaacactatacctattattcggcgcatgagctggagtcctaggcacagctctaagcctccttattcgagccgagctgggccagccaggcaaccttctaggtaacgaccacatctacaacgttatcgtcacagcccatgcatttgtaataatcttcttcatagtaatacccatcataatcggaggctttggcaactgactagttcccctaataatcggtgcccccgatatggcgtttccccgcataaacaacataagcttctgactcttacctccctctctcctactcctgctcgcatctgctatagtggaggccggagcaggaacaggttgaacagtctaccctcccttagcagggaactactcccaccctggagcctccgtagacctaaccatcttctccttacacctagcaggtgtctcctctatcttaggggccatcaatttcatcacaacaattatcaatataaaaccccctgccataacccaataccaaacgcccctcttcgtctgatccgtcctaatcacagcagtcctacttctcctatctctcccagtcctagctgctggcatcactatactactaacagaccgcaacctcaacaccaccttcttcgaccccgccggaggaggagaccccattctataccaacacctattctgatttttcggtcaccctgaagtttatattcttatcctaccaggcttcggaataatctcccatattgtaacttactactccggaaaaaaagaaccatttggatacataggtatggtctgagctatgatatcaattggcttcctagggtttatcgtgtgagcacaccatatatttacagtaggaatagacgtagacacacgagcatatttcacctccgctaccataatcatcgctatccccaccggcgtcaaagtatttagctgactcgccacactccacggaagcaatatgaaatgatctgctgcagtgctctgagccctaggattcatctttcttttcaccgtaggtggcctgactggcattgtattagcaaactcatcactagacatcgtactacacgacacgtactacgttgtagctcacttccactatgtcctatcaataggagctgtatttgccatcataggaggcttcattcactgatttcccctattctcaggctacaccctagaccaaacctacgccaaaatccatttcactatcatattcatcggcgtaaatctaactttcttcccacaacactttctaggcctatccggaatgccccgacgttactcggactaccccgatgcatacaccacatgaaacatcctatcatctgtaggctcattcatttctctaacagcagtaatattaataattttcatgatttgagaagccttcgcttcgaagcgaaaagtcctaatagtagaagaaccctccataaacctggagtgactatatggatgccccccaccctaccacacattcgaagaacccgtatacataaaatctagacaaaaaaggaaggaatcgaaccccccaaagctggtttcaagccaaccccatggcctccatgactttttcaaaaaggtattagaaaaaccatttcataactttgtcaaagttaaattataggctaaatcctatatatcttaatggcacatgcagcgcaagtaggtctacaagacgctacttcccctatcatagaagagcttatcacctttcatgatcacgccctcataatcattttccttatctgcttcctagtcctgtatgcccttttcctaacactcacaacaaaactaactaatactaacatctcagacgctcaggaaatagaaaccgtctgaactatcctgcccgccatcatcctagtcctcatcgccctcccatccctacgcatcctttacataacagacgaggtcaacgatccctcccttaccatcaaatcaattggccaccaatggtactgaacctacgagtacaccgactacggcggactaatcttcaactcctacatacttcccccattattcctagaaccaggcgacctgcgactccttgacgttgacaatcgagtagtactcccgattgaagcccccattcgtataataattacatcacaagacgtcttgcactcatgagctgtccccacattaggcttaaaaacagatgcaattcccggacgtctaaaccaaaccactttcaccgctacacgaccgggggtatactacggtcaatgctctgaaatctgtggagcaaaccacagtttcatgcccatcgtcctagaattaattcccctaaaaatctttgaaatagggcccgtatttaccctatagcaccccctctaccccctctagagcccactgtaaagctaacttagcattaaccttttaagttaaagattaagagaaccaacacctctttacagtgaaatgccccaactaaatactaccgtatggcccaccataattacccccatactccttacactattcctcatcacccaactaaaaatattaaacacaaactaccacctacctccctcaccaaagcccataaaaataaaaaattataacaaaccctgagaaccaaaatgaacgaaaatctgttcgcttcattcattgcccccacaatcctaggcctacccgccacagtactgatcattctatttccccctctattgatccccacctccaaatatctcatcaacaaccgactaatcaccacccaacaatgactaatcaaactaacctcaaaacaaatgatagccatacacaacactaaaggacgaacctgatctcttatactagtatccttaatcatttttattgccacaactaacctcctcggactcctgcctcactcatttacaccaaccacccaactatctataaacctagccatggccatccccttatgagcgggcgcagtgattataggctttcgctctaagattaaaaatgccctagcccacttcttaccacaaggcacacctacaccccttatccccatactagttattatcgaaaccatcagcctactcattcaaccaatagccctggccgtacgcctaaccgctaacattactgcaggccacctactcatgcacctaattggaagcgccaccctagcaatatcaaccattaaccttccctctacacttatcatcttcacaattctaattctactgactatcctagaaatcgctgtcgccttaatccaagcctacgttttcacacttctagtaagcctctacctgcacgacaacacataatgacccaccaatcacatgcctatcatatagtaaaacccagcccatgacccctaacaggggccctctcagccctcctaatgacctccggcctagccatgtgatttcacttccactccataacgctcctcatactaggcctactaaccaacacactaaccatataccaatgatggcgcgatgtaacacgagaaagcacataccaaggccaccacacaccacctgtccaaaaaggccttcgatacgggataatcctatttattacctcagaagtttttttcttcgcaggatttttctgagccttttaccactccagcctagcccctaccccccaactaggggggcactggcccccaacaggcatcaccccgctaaatcccctagaagtcccactcctaaacacatccgtattactcgcatcaggagtatcaatcacctgagctcaccatagtctaatagaaaacaaccgaaaccaaataattcaagcactgcttattacaattttactgggtctctattttaccctcctacaagcctcagagtacttcgagtctcccttcaccatttccgacggcatctacggctcaacattttttgtagccacaggcttccacggacttcacgtcattattggctcaactttcctcactatctgcttcatccgccaactaatatttcactttacatccaaacatcactttggcttcgaagccgccgcctgatactggcattttgtagatgtggtttgactatttctgtatgtctccatctattgatgagggtcttactcttttagtataaatagtaccgttaacttccaattaactagttttgacaacattcaaaaaagagtaataaacttcgccttaattttaataatcaacaccctcctagccttactactaataattattacattttgactaccacaactcaacggctacatagaaaaatccaccccttacgagtgcggcttcgaccctatatcccccgcccgcgtccctttctccataaaattcttcttagtagctattaccttcttattatttgatctagaaattgccctccttttacccctaccatgagccctacaaacaactaacctgccactaatagttatgtcatccctcttattaatcatcatcctagccctaagtctggcctatgagtgactacaaaaaggattagactgagctgaattggtatatagtttaaacaaaacgaatgatttcgactcattaaattatgataatcatatttaccaaatgcccctcatttacataaatattatactagcatttaccatctcacttctaggaatactagtatatcgctcacacctcatatcctccctactatgcctagaaggaataatactatcgctgttcattatagctactctcataaccctcaacacccactccctcttagccaatattgtgcctattgccatactagtctttgccgcctgcgaagcagcggtgggcctagccctactagtctcaatctccaacacatatggcctagactacgtacataacctaaacctactccaatgctaaaactaatcgtcccaacaattatattactaccactgacatgactttccaaaaaacacataatttgaatcaacacaaccacccacagcctaattattagcatcatccccctactattttttaaccaaatcaacaacaacctatttagctgttccccaaccttttcctccgaccccctaacaacccccctcctaatactaactacctgactcctacccctcacaatcatggcaagccaacgccacttatccagtgaaccactatcacgaaaaaaactctacctctctatactaatctccctacaaatctccttaattataacattcacagccacagaactaatcatattttatatcttcttcgaaaccacacttatccccaccttggctatcatcacccgatgaggcaaccagccagaacgcctgaacgcaggcacatacttcctattctacaccctagtaggctcccttcccctactcatcgcactaatttacactcacaacaccctaggctcactaaacattctactactcactctcactgcccaagaactatcaaactcctgagccaacaacttaatatgactagcttacacaatagcttttatagtaaagatacctctttacggactccacttatgactccctaaagcccatgtcgaagcccccatcgctgggtcaatagtacttgccgcagtactcttaaaactaggcggctatggtataatacgcctcacactcattctcaaccccctgacaaaacacatagcctaccccttccttgtactatccctatgaggcataattataacaagctccatctgcctacgacaaacagacctaaaatcgctcatcgcatactcttcaatcagccacatagccctcgtagtaacagccattctcatccaaaccccctgaagcttcaccggcgcagtcattctcataatcgcccacggacttacatcctcattactattctgcctagcaaactcaaactacgaacgcactcacagtcgcatcataatcctctctcaaggacttcaaactctactcccactaatagctttttgatgacttctagcaagcctcgctaacctcgccttaccccccactattaacctactgggagaactctctgtgctagtaaccacattctcctgatcaaatatcactctcctacttacaggactcaacatactagtcacagccctatactccctctacatatttaccacaacacaatggggctcactcacccaccacattaacaacataaaaccctcattcacacgagaaaacaccctcatgttcatacacctatcccccattctcctcctatccctcaaccccgacatcattaccgggttttcctcttgtaaatatagtttaaccaaaacatcagattgtgaatctgacaacagaggcttacgaccccttatttaccgagaaagctcacaagaactgctaactcatgcccccatgtctaacaacatggctttctcaacttttaaaggataacagctatccattggtcttaggccccaaaaattttggtgcaactccaaataaaagtaataaccatgcacactactataaccaccctaaccctgacttccctaattccccccatccttaccaccctcgttaaccctaacaaaaaaaactcatacccccattatgtaaaatccattgtcgcatccacctttattatcagtctcttccccacaacaatattcatgtgcctagaccaagaagttattatctcgaactgacactgagccacaacccaaacaacccagctctccctaagcttcaaactagactacttctccataatattcatccctgtagcattgttcgttacatggtccatcatagaattctcactgtgatatataaactcagacccaaacattaatcagttcttcaaatatctactcattttcctaattaccatactaatcttagttaccgctaacaacctattccaactgttcatcggctgagagggcgtaggaattatatccttcttgctcatcagttgatgatacgcccgagcagatgccaacacagcagccattcaagcaatcctatacaaccgtatcggcgatatcggtttcatcctcgccttagcatgatttatcctacactccaactcatgagacccacaacaaatagcccttctaaacgctaatccaagcctcaccccactactaggcctcctcctagcagcagcaggcaaatcagcccaattaggtctccacccctgactcccctcagccatagaaggccccaccccagtctcagccctactccactcaagcactatagttgtagcaggaatcttcttactcatccgcttccaccccctagcagaaaatagcccactaatccaaactctaacactatgcttaggcgctatcaccactctgttcgcagcagtctgcgcccttacacaaaatgacatcaaaaaaatcgtagccttctccacttcaagtcagctaggactcataatagttacaatcggcatcaaccaaccacacctagcattcctgcacatctgtacccacgccttcttcaaagccatactatttatatgctccgggtccatcatccacaaccttaacaatgaacaagatattcgaaaaataggaggactactcaaaaccatacctctcacttcaacctccctcaccattggcagcctagcattagcaggaatacctttcctcacaggtttctactccaaagaccacatcatcgaaaccgcaaacatatcatacacaaacgcctgagccctatctattactctcatcgctacctccctgacaagcgcctatagcactcgaataattcttctcaccctaacaggtcaacctcgcttccccacccttactaacattaacgaaaataaccccaccctactaaaccccattaaacgcctggcagccggaagcctattcgcaggatttctcattactaacaacatttcccccgcatcccccttccaaacaacaatccccctctacctaaaactcacagccctcgctgtcactttcctaggacttctaacagccctagacctcaactacctaaccaacaaacttaaaataaaatccccactatgcacattttatttctccaacatactcggattctaccctagcatcacacaccgcacaatcccctatctaggccttcttacgagccaaaacctgcccctactcctcctagacctaacctgactagaaaagctattacctaaaacaatttcacagcaccaaatctccacctccatcatcacctcaacccaaaaaggcataattaaactttacttcctctctttcttcttcccactcatcctaaccctactcctaatcacataacctattcccccgagcaatctcaattacaatatatacaccaacaaacaatgttcaaccagtaactactactaatcaacgcccataatcatacaaagcccccgcaccaataggatcctcccgaatcaaccctgacccctctccttcataaattattcagcttcctacactactaaagtttaccacaaccaccaccccatcatactctttcacccacagcaccaatcctacctccatcgctaaccccactaaaacactcaccaagacctcaacccctgacccccatgcctcaggatactcctcaatagccatcgctgtagtatatccaaagacaaccatcattccccctaaataaattaaaaaaactattaaacccatataacctcccccaaaattcagaataataacacacccgaccacaccgctaacaatcaatactaaacccccataaataggagaaggcttagaagaaaaccccacaaaccccattactaaacccacactcaacagaaacaaagcatacatcattattctcgcacggactacaaccacgaccaatgatatgaaaaaccatcgttgtatttcaactacaagaacaccaatgaccccaatacgcaaaattaaccccctaataaaactaattaaccactcattcatcgacctccccaccccatccaacatctccgcatgatgaaacttcggctcactccttggcgcctgcctgatcctccaaatcaccacaggactattcctagccatgcactactcaccagacgcctcaaccgccttttcatcaatcgcccacatcactcgagacgtaaattatggctgaatcatccgctaccttcacgccaatggcgcctcaatattctttatctgcctcttcctacacatcggacgaggcctatattacggatcatttctctactcagaaacctgaaacatcggcattatcctcctgcttgcaactatagcaacagccttcataggctatgtcctcccgtgaggccaaatatcattctgaggggccacagtaattacaaacttactatccgccatcccatacattgggacagacctagttcaatgaatctgaggaggctactcagtagacagtcccaccctcacacgattctttacctttcacttcatcttacccttcattattgcagccctagcagcactccacctcctattcttgcacgaaacgggatcaaacaaccccctaggaatcacctcccattccgataaaatcaccttccacccttactacacaatcaaagacgccctcggcttacttctcttccttctctccttaatgacattaacactattctcacctgacctcctaggcgacccagacaattataccctagccaaccccttaaacacccctccccacatcaagcccgaatgatatttcctattcgcctacacaattctccgatccgtccctaacaaactaggaggcgtccttgccctattactatccatcctcatcctagcaataatccccatcctccatatatccaaacaacaaagcataatatttcgcccactaagccaatcactttattgactcctagccgcagacctcctcattctaacctgaatcggaggacaaccagtaagctacccttttaccatcattggacaagtagcatccgtactatacttcacaacaatcctaatcctaataccaactatctccctaattgaaaacaaaatactcaaatgggcctgtccttgtagtataaactaatacaccagtcttgtaaaccggaaatgaaaacctttttccaaggacaaatcagagaaaaagtctttaactccaccattagcacccaaagctaagattctaatttaaactattctctgttctttcatggggaagcagatttgggtaccacccaagtattgactcacccatcaacaaccgctatgtatttcgtacattactgccagccaccatgaatattgtacggtaccataaatacttgaccacctgtagtacataaaaacccaatccacatcaaaaccccctcccccatgcttacaagcaagtacagcaatcaaccttcaactatcacacatcaactgcaactccaaagccacccctcacccactaggataccaacaaacctacccaccctcaacagtacatagtacataaagccattcatcgtacatagcacattacagtcaaatcccttctcgtccccatggatgacccccctcagataggggtcccttgaccaccatcctccgtgaaatcaatatcccgcacaagagtgctactctcctcgctccgggcccataacacttgggggtagctaaagtgaactgtatccgacatctggttcctacttcagggtcataaaacctaaatagcccacacgttccccttaaataagacatcacgatg

SEQ ID NO: 386 - DNA, 16571 bp, Homo sapiens mitochondrial
  3108: "n" refers to a nucleotide at position 3107 of the Cambridge Reference Sequence (CRS, Anderson et al. 1981 Nature 290:457-465), later determined to be absent from the human mtDNA sequence according to the revised CRS (rCRS, Andrews et al. 1999 Nature Genetics 23:147); "n" therefore represents a single nucleotide deletion at a position corresponding to nucleotide 3107 of SEQ ID NO:1 as provided herein.
gatcacaggtctatcaccctattaaccactcacgggagctctccatgcatttggtattttcgtctggggggtgtgcacgcgatagcattgcgagacgctggagccggagcaccctatgtcgcagtatctgtctttgattcctgccccattccattatttatcgcacctacgttcaatattataggcgaacatacctattaaagcgtattaattaattaatgcttgtaggacataataataacaattgaatgtctgcacagccgctttccacacagacatcataacaaaaaatttccaccaaaccccccctcccccgccttctggccacagcacttaaacacatctctgccaaaccccaaaaacaaagaaccctaacaccagcctaaccagatttcaaattttatcttttggcggtatgcacttttaacagtcaccccccaactaacacattattttcccctcccactcccatactactaatctcatcaatacaacccccgcccatcctacccagcacacacacaccgctgctaaccccataccccgaaccaaccaaaccccaaagacaccccccacagtttatgtagcttacctcctcaaagcaatacactgaaaatgtttagacgggctcacatcaccccataaacaaataggtttggtcctagcctttctattagctcttagtaagattacacatgcaagcatccccgttccagtgagttcaccctctaaatcaccacgatcaaaagggacaagcatcaagcacgcaacaatgcagctcaaaacgcttagcctagccacacccccacgggaaacagcagtgattaacctttagcaataaacgaaagtttaactaagctatactaaccccagggttggtcaatttcgtgccagccaccgcggtcacacgattaacccaagtcaatagaagccggcgtaaagagtgttttagatcaccccctccccaataaagctaaaactcacctgagttgtaaaaaactccagttgacacaaaataaactacgaaagtggctttaacatatctgaacacacaatagctaagacccaaactgggattagataccccactatgcttagccctaaacctcaacagttaaatcaacaaaactgctcgccagaacactacgagccacagcttaaaactcaaaggacctggcggtgcttcatatccctctagaggagcctgttctgtaatcgataaaccccgatcaacctcaccacctcttgctcagcctatataccgccatcttcagcaaaccctgatgaaggctacaaagtaagcgcaagtacccacgtaaagacgttaggtcaaggtgtagcccatgaggtggcaagaaatgggctacattttctaccccagaaaactacgatagcccttatgaaacttaagggtcgaaggtggatttagcagtaaactgagaatagagtgcttagttgaacagggccctgaagcgcgtacacaccgcccgtcaccctcctcaagtatacttcaaaggacatttaactaaaacccctacgcatttatatagaggagacaagtcgtaacatggtaagtgtactggaaagtgcacttggacgaaccagagtgtagcttaacacaaagcacccaacttacacttaggagatttcaacttaacttgaccgctctgagctaaacctagccccaaacccactccaccttactatcagacaaccttagccaaaccatttacccaaataaagtataggcgatagaaattgaaacctggcgcaatagatatagtaccgcaagggaaagatgaaaaattataaccaagcataatatagcaaggactaacccctataccttctgcataatgaattaactagaaataactttgcaaggagagccaaagctaagacccccgaaaccagacgagctacctaagaacagctaaaagagcacacccgtctatgtagcaaaatagtgggaagatttataggtagaggcgacaaacctaccgagcctggtgatagctggttgtccaagatagaatcttagttcaactttaaatttgcccacagaaccctctaaatccccttgtaaatttaactgttagtccaaagaggaacagctctttggacactaggaaaaaaccttgtagagagagtaaaaaatttaacacccatagtaggcctaaaagcagccaccaattaagaaagcgttcaagctcaacacccactacctaaaaaatcccaaacatataactgaactcctcacacccaattggaccaatctatcaccctatagaagaactaatgttagtataagtaacatgaaaacattctcctctgcataagcctgcgtcagattaaaacgctgaactgacaattaacagcccaatatctacaatcaaccaacaagtcattattacccccactgtcaacccaacacaggcatgctcataaggaaaggttaaaaaaagtaaaaggaactcggcaaatcttaccccgcctgtttaccaaaaacatcacctctagcatcaccagtattagaggcaccgcctgcccagtgacacatgtttaacggccgcggtaccctaaccgtgcaaaggtagcataatcacttgttccttaaatagggacctgtatgaatggctccacgagggttcagctgtctcttacttttaaccagtgaaattgacctgcccgtgaagaggcgggcatgacacagcaagacgagaagaccctatggagctttaatttattaatgcaaacagtacctaacaaacccacaggtcctaaactaccaaacctgcattaaaaatttcggttggggcgacctcggagcagaacccaacctccgagcagtacatgctaagacttcaccagtcaaagcgaactactatactcaattgatccaataacttgaccaacggaacaagttaccctagggataacagcgcaatcctattctagagtccatatcaacaatagggtttacgacctcgatgttggatcaggacatcccgatggtgcagccgctattaaaggttcgtttgttcaacgattaaagtcctacgtgatctgagttcagaccggagtaatccaggtcggtttctatctacnttcaaattcctccctgtacgaaaggacaagagaaataaggcctacttcacaaagcgccttcccccgtaaatgatatcatctcaacttagtattatacccacacccacccaagaacagggtttgttaagatggcagagcccggtaatcgcataaaacttaaaactttacagtcagaggttcaattcctcttcttaacaacatacccatggccaacctcctactcctcattgtacccattctaatcgcaatggcattcctaatgcttaccgaacgaaaaattctaggctatatacaactacgcaaaggccccaacgttgtaggcccctacgggctactacaacccttcgctgacgccataaaactcttcaccaaagagcccctaaaacccgccacatctaccatcaccctctacatcaccgccccgaccttagctctcaccatcgctcttctactatgaacccccctccccatacccaaccccctggttaacctcaacctaggcctcctatttattctagccacctctagcctagccgtttactcaatcctctgatcagggtgagcatcaaactcaaactacgccctgatcggcgcactgcgagcagtagcccaaacaatctcatatgaagtcaccctagccatcattctactatcaacattactaataagtggctcctttaacctctccacccttatcacaacacaagaacacctctgattactcctgccatcatgacccttggccataatatgatttatctccacactagcagagaccaaccgaacccccttcgaccttgccgaaggggagtccgaactagtctcaggcttcaacatcgaatacgccgcaggccccttcgccctattcttcatagccgaatacacaaacattattataataaacaccctcaccactacaatcttcctaggaacaacatatgacgcactctcccctgaactctacacaacatattttgtcaccaagaccctacttctgacctccctgttcttatgaattcgaacagcatacccccgattccgctacgaccagctcatacacctcctatgaaaaaactttctaccactcaccctagcattacttatatgatatgtctccatacccattacaatctccagcattccccctcaaacctaagaaatatgtctgataaaagagttactttgatagagtaaataataggagcttaaacccccttatttctaggactatgagaatcgaacccatccctgagaatccaaaactctccgtgccacctatcacaccccatcctaaagtaaggtcagctaaataagctatcgggcccataccccgaaaatgttggttatacccttcccgtactaattaatcccctggcccaacccgtcatctactctaccatctttgcaggcacactcatcacagcgctaagctcgcactgattttttacctgagtaggcctagaaataaacatgctagcttttattccagttctaaccaaaaaaataaaccctcgttccacagaagctgccatcaagtatttcctcacgcaagcaaccgcatccataatccttctaatagctatcctcttcaacaatatactctccggacaatgaaccataaccaatactaccaatcaatactcatcattaataatcatagtggctatagcaataaaactaggaatagccccctttcacttctgagtcccagaggttacccaaggcacccctctgacatccggcctgcttcttctcacatgacaaaaactagcccccatctcaatcatataccaaatctctccctcactaaacgtaagccttctcctcactctctcaatcttatccatcatagcaggcagttgaggtggattaaaccaaacccagctacgcaaaatcttagcatactcctcaattacccatataggatgaataatagcagttctaccgtacaaccctaacataaccattcttaatttaactatttatattatcctaactactaccgcattcctactactcaacttaaactccagcaccacgaccctactactatctcgcacctgaaacaagctaacatgactaacacccttaattccatccaccctcctctccctaggaggcctgcccccgctaaccggctttttgcccaaatgggccattatcgaagaattcacaaaaaacaatagcctcatcatccccaccatcatagccaccatcaccctcattaacctctacttctacctacgcctaatctactccacctcaatcacactactccccatatctaacaacgtaaaaataaaatgacagtttgaacatacaaaacccaccccattcctccccacactcatcgcccttaccacgctactcctacctatctccccttttatactaataatcttatagaaatttaggttaaatacagaccaagagccttcaaagccctcagtaagttgcaatacttaatttctgtaacagctaaggactgcaaaaccccactctgcatcaactgaacgcaaatcagccactttaattaagctaagcccttactagaccaatgggacttaaacccacaaacacttagttaacagctaagcaccctaatcaactggcttcaatctacttctcccgccgccaggaaaaaaggcgggagaagccccggcaggtttgaagctgcttcttcgaatttgcaattcaatatgaaaaccacctcggagctggtaaaaagaggcctaacccctgtctttagatttacagtccaatgcttcactcagccattttacctcacccccactgatgttcgccgaccgttgactattctctacaaaccacaaagacattggaacactatacctattattcggcgcatgagctggagtcctaggcacagctctaagcctccttattcgagccgagctgggccagccaggcaaccttctaggtaacgaccacatctacaacgttatcgtcacagcccatgcatttgtaataatcttcttcatagtaatacccatcataatcggaggctttggcaactgactagttcccctaataatcggtgcccccgatatggcgtttccccgcataaacaacataagcttctgactcttacctccctctctcctactcctgctcgcatctgctatagtggaggccggagcaggaacaggttgaacagtctaccctcccttagcagggaactactcccaccctggagcctccgtagacctaaccatcttctccttacacctagcaggtgtctcctctatcttaggggccatcaatttcatcacaacaattatcaatataaaaccccctgccataacccaataccaaacgcccctcttcgtctgatccgtcctaatcacagcagtcctacttctcctatctctcccagtcctagctgctggcatcactatactactaacagaccgcaacctcaacaccaccttcttcgaccccgccggaggaggagaccccattctataccaacacctattctgatttttcggtcaccctgaagtttatattcttatcctaccaggcttcggaataatctcccatattgtaacttactactccggaaaaaaagaaccatttggatatataggtatggtctgagctatgatatcaattggcttcctagggtttatcgtgtgagcacaccatatatttacagtaggaatagacgtagacacacgagcatatttcacctccgctaccataatcatcgctatccccaccggcgtcaaagtatttagctgactcgccacactccacggaagcaatatgaaatgatctgctgcagtgctctgagccctaggattcatctttcttttcaccgtaggtggcctgactggcattgtattagcaaactcatcactagacatcgtactacacgacacgtactacgttgtagctcacttccactatgtcctatcaataggagctgtatttgccatcataggaggcttcattcactgatttcccctattctcaggctacaccctagaccaaacctacgccaaaatccatttcactatcatattcatcggcgtaaatctaactttcttcccacaacactttctcggcctatccggaatgccccgacgttactcggactaccccgatgcatacaccacatgaaatatcctatcatctgtaggctcattcatttctctaacagcagtaatattaataattttcatgatttgagaagccttcgcttcgaagcgaaaagtcctaatagtagaagaaccctccataaacctggagtgactatatggatgccccccaccctaccacacattcgaagaacccgtatacataaaatctagacaaaaaaggaaggaatcgaaccccccaaagctggtttcaagccaaccccatggcctccatgactttttcaaaaagatattagaaaaaccatttcataactttgtcaaagttaaattataggctaaatcctatatatcttaatggcacatgcagcgcaagtaggtctacaagacgctacatcccctatcatagaagagcttatcacctttcatgatcacgccctcataatcattttccttatctgcttcctagtcctgtatgcccttttcctaacactcacaacaaaactaactaatactaacatctcagacgctcaggaaatagaaaccgtctgaactatcctgcccgccatcatcctagtcctcatcgccctcccatccctacgcatcctttacataacagacgaggtcaacgatccctcccttaccatcaaatcaattggccaccaatggtactgaacctacgagtacaccgactacggcggactaatcttcaactcctacatacttcccccattattcctagaaccaggcgacctgcgactccttgacgttgacaatcgagtagtactcccgattgaagcccccattcgtataataattacatcacaagacgtcttgcactcatgagctgttcccacattaggcttaaaaacagatgcaattcccggacgtctaaaccaaaccactttcaccgctacacgaccgggggtatactacggtcaatgctctgaaatctgtggagcaaaccacagtttcatacccatcgtcctagaattaattcccctaaaaatctttgaaatagggcccgtatttaccctatagcaccccctctaccccctctagagcccactgtaaagctaacttagcattaaccttttaagttaaagattaagagaaccaacacctctttacagtgaaatgccccaactaaatactaccatatggcccaccataattacccccatactccttacactattcctcatcacccaactaaaaatattaaacacaaactaccacctacctccctcaccaaagcccataaaaataaaaaattataacaaaccctgagaaccaaaatgaacgaaaatctgttcgcttcattcattgcccccacaatcctaggcctacccgccgcagtactgatcattctatttccccctctattgatccccacctccaaatatctcatcaacaaccgactaatcaccacccaacaatgactaatcaaactaacctcaaaacaaatgatagccatacacaacactaaaggacgaacctgatctcttatactagtatccttaatcatttttattgccacaactaacctcctcggactcctgcctcactcatttacaccaaccacccaactatctataaacctagccatggccatccccttatgagcgggcgcagtgattataggctttcgctctaagattaaaaatgccctagcccacttcttaccacaaggcacgcctacaccccttatccccatactagttattatcgaaaccatcagcctactcattcaaccaatagccctggccgtacgcctaaccgctaacattactgcaggccacctactcatgcacctaattggaagcgccaccctagcaatatcaaccattaaccttccctctacacttatcatcttcacaattctaattctactgactatcctagaaatcgctgtcgccttaatccaagcctacgttttcacacttctagtaagcctctacctgcacgacaacacataatgacccaccaatcgcatgcctatcatatagtaaaacccagcccatgacccctaacaggggccctctcagccctcctaatgacctccggcctagccatgtgatttcacttccactccataacgctcctcatactaggcctactaaccaacacactaaccatataccaatgatggcgcgatgtaacacgagaaagcacataccaaggccaccacacaccacctgtccaaaaaggccttcgatacgggataatcctatttattacctcagaagtttttttcttcgcaggatttttctgagccttttaccactccagcctagcccctaccccccaactaggagggcactggcccccaacaggcatcaccccgctaaatcccctagaagtcccactcctaaacacatccgtattactcgcatcaggagtatcaatcacctgagctcaccatagtctaatagaaaacaaccgaaaccaaataattcaagcactgcttattacaattttactgggtctctattttaccctcctacaagcctcagagtacttcgagtctcccttcaccatttccgacggcatctacggctcaacattttttgtagccacaggcttccacggacttcacgtcattattggctcaactttcctcactatctgcttcatccgccaactaatatttcactttacatccaaacatcactttggcttcgaagccgccgcctgatactggcattttgtagatgtggtttgactatttctgtatgtctccatctattgatgagggtcttactcttttagtataaatagtaccgttaacttccaattaactagttttgacaacattcaaaaaagagtaataaacttcgccttaattttaataatcaacaccctcctagccttactactaataatcattacattttgactaccacaactcaacggctacatagaaaaatccaccccttacgagtgcggcttcgaccctatatcccccgcccgcgtccctttctccataaaattcttcttagtagctattaccttcttattatttgatctagaaattgccctccttttacccctaccatgagccctacaaacaactaacctgccactaatagttatgtcatccctcttattaatcatcatcctagccctaagtctggcctatgagtgactacaaaaaggattagactgagccgaattggtatatagtttaaacaaaacgaatgatttcgactcattaaattatgataatcatatttaccaaatgcccctcatttacataaatattatactagcatttaccatctcacttctaggaatactagtatatcgctcacacctcatatcctccctactatgcctagaaggaataatactatcgctgttcattatagctactctcataaccctcaacacccactccctcttagccaatattgtgcctattgccatactagtctttgccgcctgcgaagcagcggtgggcctagccctactagtctcaatctccaacacatatggcctagactacgtacataacctaaacctactccaatgctaaaactaatcgtcccaacaattatattactaccactgacatgactttccaaaaaacacataatttgaatcaacacaaccacccacagcctaattattagcatcatccccctactattttttaaccaaatcaacaacaacctatttagctgttccccaaccttttcctccgaccccctaacaacccccctcctaatactaactacctgactcctacccctcacaatcatggcaagccaacgccacttatccagtgaaccactatcacgaaaaaaactctacctctctatactaatctccctacaaatctccttaattataacattcacagccacagaactaatcatattttatatcttcttcgaaaccacacttatccccaccttggctatcatcacccgatgaggcaaccagccagaacgcctgaacgcaggcacatacttcctattctacaccctagtaggctcccttcccctactcatcgcactaatttacactcacaacaccctaggctcactaaacattctactactcactctcactgcccaagaactatcaaactcctgagccaacaacttaatatgactagcttacacaatagcttttatagtaaagatacctctttacggactccacttatgactccctaaagcccatgtcgaagcccccatcgctgggtcaatagtacttgccgcagtactcttaaaactaggcggctatggtataatacgcctcacactcattctcaaccccctgacaaaacacatagcctaccccttccttgtactatccctatgaggcataattataacaagctccatctgcctacgacaaacagacctaaaatcgctcattgcatactcttcaatcagccacatagccctcgtagtaacagccattctcatccaaaccccctgaagcttcaccggcgcagtcattctcataatcgcccacggacttacatcctcattactattctgcctagcaaactcaaactacgaacgcactcacagtcgcatcataatcctctctcaaggacttcaaactctactcccactaatagctttttgatgacttctagcaagcctcgctaacctcgccttaccccccactattaacctactgggagaactctctgtgctagtaaccacgttctcctgatcaaatatcactctcctactcacaggactcaacatactagtcacagccctatactccctctacatatttaccacaacacaatggggctcactcacccaccacattaacaacataaaaccctcattcacacgagaaaacaccctcatgttcatacacctatcccccattctcctcctatccctcaaccccgacatcattaccgggttttcctcttgtaaatatagtttaaccaaaacatcagattgtgaatctgacaacagaggcttacgaccccttatttaccgagaaagctcacaagaactgctaactcatacccccatgtctaacaacatggctttctcaacttttaaaggataacagctatccattggtcttaggccccaaaaattttggtgcaactccaaataaaagtaataaccatgcacactactataaccaccctaaccctgacttccctaattccccccatccttaccaccctcgttaaccctaacaaaaaaaactcatacccccattatgtaaaatccattgtcgcatccacctttattatcagtctcttccccacaacaatattcatgtgcctagaccaagaagttattatctcgaactgacactgagccacaacccaaacaacccagctctccctaagcttcaaactagactacttctccataatattcatccctgtagcattgttcgttacatggtccatcatagaattctcactgtgatatataaactcagacccaaacattaatcagttcttcaaatatctactcattttcctaattaccatactaatcttagttaccgctaacaacctattccaactgttcatcggctgagagggcgtaggaattatatccttcttgctcatcagttgatgatacgcccgagcagatgccaacacagcagccattcaagcaatcctatacaaccgtatcggcgatatcggtttcatcctcgccttagcatgatttatcctacactccaactcatgagacccacaacaaatagcccttctgaacgctaatccaagcctcaccccactactaggcctcctcctagcagcagcaggcaaatcagcccaattaggtctccacccctgactcccctcagccatagaaggccccaccccagtctcagccctactccactcaagcactatagttgtagcaggaatcttcttactcatccgcttccaccccctagcagaaaatagcccactaatccaaactctaacactatgcttaggcgctatcaccactctgttcgcagcagtctgcgcccttacacaaaatgacatcaaaaaaatcgtagccttctccacttcaagtcaactaggactcataatagttacaatcggcatcaaccaaccacacctagcattcctgcacatctgtacccacgccttcttcaaagccatactatttatgtgctccgggtccatcatccacaaccttaacaatgaacaagatattcgaaaaataggaggactactcaaaaccatacctctcacttcaacctccctcaccattggcagcctagcattagcaggaatacctttcctcacaggtttctactccaaagaccacatcatcgaaaccgcaaacatatcatacacaaacgcctgagccctatctattactctcatcgctacctccctaacaagcgcctatagcactcgaataattcttctcaccctaacaggtcaacctcgcttccctacccttactaacattaacgaaaataaccccaccctactaaaccccattaaacgcctggcagccggaagcctattcgcaggatttctcattactaacaacatttcccccgcatcccccttccaaacaacaatccccctctacctaaaactcacagccctcgctgtcactttcctaggacttctaacagccctagacctcaactacctaaccaacaaacttaaaataaaatccccactatgcacattttatttctccaacatactcggattctaccctagcatcacacaccgcacaatcccctatctaggccttcttacgagccaaaacctgcccctactcctcctagacctaacctgactagaaaagctattacctaaaacaatttcacagcaccaaatctccacctccgtcatcacctcaacccaaaaaggcataattaaactttacttcctctctttcttcttcccactcatcctaaccctactcctaatcacataacctattcccccgagcaatctcaattacaatatatacaccaacaaacaatgttcaaccagtaactactactaatcaacgcccataatcatacaaagcccccgcaccaataggatcctcccgaatcaaccctgacccctctccttcataaattattcagcttcctacactattaaagtttaccacaaccaccaccccatcatactctttcacccacagcaccaatcctacctccatcgctaaccccactaaaacactcaccaagacctcaacccctgacccccatgcctcaggatactcctcaatagccatcgctgtagtatatccaaagacaaccatcattccccctaaataaattaaaaaaactattaaacccatataacctcccccaaaattcaaaataataacacacccgaccacaccgctaacaatcaatactaaacccccataaataggagaaggcttagaagaaaaccccacaaaccccattactaaacccacactcaacagaaacaaagcatacatcattattctcgcacggactacaaccacgaccaatgatatgaaaaaccatcgttgtatttcaactacaagaacaccaatgaccccaatacgcaaaattaaccccctaataaaattaattaaccactcattcatcgacctccccaccccatccaacatctccgcatgatgaaacttcggctcactccttggcgcctgcctgatcctccaaatcaccacaggactattcctagccatgcactactcaccagacgcctcaaccgccttttcatcaatcgcccacatcactcgagacgtaaattatggctgaatcatccgctaccttcacgccaatggcgcctcaatattctttatctgcctcttcctacacatcgggcgaggcctatattacggatcatttctctactcagaaacctgaaacatcggcattatcctcctgcttacaactatagcaacagccttcataggctatgtcctcccgtgaggccaaatatcattctgaggggccacagtaattacaaacttactatccgccatcccatacattggaacagacctagttcaatgagtctgaggaggctactcagtagacagtcccaccctcacacgattctttacctttcacttcatcttacccttcattattgcagccctagcaacactccacctcctattcttgcacgaaacgggatcaaacaaccccctaggaatcacctcccattccgataaaatcaccttccacccttactacacaatcaaagacgccctcggcttacttctcttccttctctccttaatgacattaacactattctcaccagacctcctaggcgacccagacaattataccctagccaaccccttaaacacccctccccacatcaagcccgaatgatatttcctattcgcctacacaattctccgatccgtccctaacaaactaggaggcgtccttgccctattactatccatcctcatcctagcaataatccccatcctccatatatccaaacaacaaagcataatatttcgcccactaagccaatcactttattgactcctagccgcagacctcctcattctaacctgaatcggaggacaaccagtaagctacccttttaccatcattggacaagtagcatccgtactatacttcacaacaatcctaatcctaataccaactatctccctaattgaaaacaaaatactcaaatgggcctgtccttgtagtataaactaatacaccagtcttgtaaaccggagatgaaaacctttttctcaaggacaaatcagagaaaaagtctttaactccaccattagcacccaaagctaagattctaatttaaactattctctgttctttcatggggaagcagatttgggtaccacccaagtattgactcacccatcaacaaccgctatgtatttcgtacattactgccagccaacatgaatattgtacagtaccataaatacttgaccacctgtagtacataaaaacccaatccacatcaaaaccccctccccatgcttacaagcaagtacgacaatcaaccttcaactatcacacatcaactgcaactccaaagccacccctcacccactaggatatcaacaaacctacccacccttaacagtacatagtacataaagccatttaccgtacatagcacattacagtcaaatcccttctcgtccccatggatgacccccctcagataggagtcccttgaccaccatcctccgtgaaatcaatatcccgcacaagagtgctactctcctcgctccgggcccataacacttgggggtagctaaagtgaactgtatccgacatctggttcctacttcagggtcataaagcctaaatagcccacacgttccccttaaataagacatcacgatg

SEQ ID NO: 387 - DNA, 16568 bp, Homo sapiens mitochondrial
  3106: "n" refers to a nucleotide at position 3107 of the Cambridge Reference Sequence (CRS, Anderson et al. 1981 Nature 290:457-465), later determined to be absent from the human mtDNA sequence according to the revised CRS (rCRS, Andrews et al. 1999 Nature Genetics 23:147); "n" therefore represents a single nucleotide deletion at a position corresponding to nucleotide 3107 of SEQ ID NO:1 as provided herein.
gatcacaggtctatcaccctattaaccactcacgggagctctccatgcatttggtattttcgtctggggggtgtgcacgcgatagcattgcgagacgctggagccggagcaccctatgtcgcagtatctgtctttgattcctgcctcatcccattatttatcgcacctacgttcaatattatagtcgagcatacctactaaagcgtgttaattaattaatgcttgtaggacataataataacaattaaatgtctgcacagccgctttccacacagacatcataacaaaaaatttccaccaaaccccccctcccccgccttctggccacagcacttaaacacatctctgccaaaccccgaaaacaaagaaccctaacaccagcctaaccagatttcaaattttatcttttggcggtatgcacttttaacagtcaccccccaactaacacattattttcccctcccactcccatactactaatctcatcaatacaacccccgcccatcctacccagcacacacaccgctgctaaccccataccccgaaccaaccaaaccccaaagacaccccccacagtttatgtagcttacctcctcaaagcaatacactgaaaatgtttagacgggctcacatcaccccataaacaaataggtttggtcctagcctttctattagctcttagtaagattacacatgcaagcatccccactccagtgagttcaccctctaaatcaccacgatcaaaagggacaagcatcaagcacgcaacaatgcagctcaaaacgcttagcctagccacacccccacgggaaacagcagtgataaacctttagcaataaacgaaagtttaactaagctatactaaccccagggttggtcaatttcgtgccagccaccgcggtcacacgattaacccaagtcaatagaagccggcgtaaagagtgttttagatcaccccctccccaataaagctaaaactcacctgagttgtaaaaaactccagttgacacaaaataaactacgaaagtggctttaacatatctgaacacacaatagctaagacccaaactgggattagataccccactatgcttagccctaaacctcaacagttaaatcaacaaaactgctcgccagaacactacgagccacagcttaaaactcaaaggacctggcggtgcttcatatccctctagaggagcctgttctgtaatcgataaaccccgatcaacctcaccacctcttgctcagcctatataccgccatcttcagcaaaccctgatgaaggctacaaagtaagcgcaagtacccacgtaaagacgttaggtcaaggtgtagcccatgaggtggcaagaaatgggctacattttctaccccagaaaactacgatagcccttatgaaacttaagggtcgaaggtggatttagcagtaaactaagagtagagtgcttagttgaacagggccctgaagcgcgtacacaccgcccgtcaccctcctcaagtatacttcaaaggacatttaactaaaacccctacgcatttatatagaggagacaagtcgtaacatggtaagtgtactggaaagtgcacttggacgaaccagagtgtagcttaacacaaagcacccaacttacacttaggagatttcaacttaacttgaccgctctgagctaaacctagccccaaacccactccaccttactaccagacaaccttagccaaaccatttacccaaacaaagtataggcgatagaaattgaaacctggcgcaatagatatagtaccgcaagggaaagatgaaaaattataaccaagcataatatagcaaggactaacccctataccttctgcataatgaattaactagaaataactttgcaaggagagccaaagctaagacccccgaaaccagacgagctacctaagaacagctaaaagagcacacccgtctatgtagcaaaatagtgggaagatttataggtagaggcgacaaacctaccgagcctggtgatagctggttgtccaagatagaatcttagttcaactttaaatttgcccacagaaccctctaaatccccttgtaaatttaactgttagtccaaagaggaacagctctttggacactaggaaaaaaccttgtagagagagtaaaaaatttaacacccatagtaggcctaaaagcagccaccaattaagaaagcgttcaagctcaacacccactacctaaaaaatcccaaacatataactgaactcctcacacccaattggaccaatctatcaccctatagaagaactaatgttagtataagtaacatgaaaacattctcctccgcataagcctgcgtcagatcaaaacactgaactgacaattaacagcccaatatctacaatcaaccaacaagtcattattaccctcactgtcaacccaacacaggcatgctcataaggaaaggttaaaaaaagtaaaaggaactcggcaaatcttaccccgcctgtttaccaaaaacatcacctctagcatcaccagtattagaggcaccgcctgcccagtgacacatgtttaacggccgcggtaccctaaccgtgcaaaggtagcataatcacttgttccttaaatagggacctgtatgaatggctccacgagggttcagctgtctcttacttttaaccagtgaaattgacctgcccgtgaagaggcgggcatgacacagcaagacgagaagaccctatggagctttaatttattaatgcaaacaatacctaacagacccacaggtcctaaactaccaaacctgcattaaaaatttcggttggggcgacctcggagcagaacccaacctccgagcagtacatgctaagacttcaccagtcaaagcgaactaccatactcaattgatccaataacttgaccaacggaacaagttaccctagggataacagcgcaatcctattctagagtccatatcaacaatagggtttacgacctcgatgttggatcaggacatcccgatggtgcagccgctattaaaggttcgtttgttcaacgattaaagtcctacgtgatctgagttcagaccggagtaatccaggtcggtttctatctacnttcaaattcctccctgtacgaaaggacaagagaaataaggcctacttcacaaagcgccttcccccgtaaatgatatcatctcaacttagtattatacccacacccacccaagaacagggtttgttaagatggcagagcccggtaatcgcataaaacttaaaactttacagtcagaggttcaattcctcttcttaacaacacacccatggccaacctcctactcctcattgtacccattctaatcgcaatggcattcctaatgcttaccgaacgaaaaattctaggctatatacaactacgcaaaggccccaacgttgtaggcccctacgggctactacaacccttcgctgacgccataaaactcttcaccaaagagcccctaaaacccgccacatctaccatcaccctctacatcaccgccccgaccttagctctcaccatcgctcttctactatgaacccccctccccatacccaaccccctggttaacctcaacctaggcctcctatttattctagccacctctagcctagccgtttactcaatcctctgatcaggatgagcatcaaactcaaactacgccctaatcggcgcactgcgagcagtagcccaaacaatctcatatgaagtcaccctagccatcattctactatcaacattactaataagtggctcctttaacctctccacccttatcacaacacaagaacacctctgattactcctgccatcatgacccttggccataatatgatttatctccacactagcagagaccaaccgaacccccttcgaccttgccgaaggggagtccgaactagtctcaggcttcaacatcgaatacgccgcaggccccttcgccctattcttcatagccgaatacacaaacattattataataaacaccctcaccactacaatcttcctaggaacaacatatgacgcactctcccctgaactctacacaacatattttgtcaccaagaccctacttctgacctccctgttcttatgaattcgaacagcatacccccgattccgctacgaccaactcatacacctcctatgaaaaaacttcctaccactcaccctagcattacttatatgatatgtctccatacccattacaatctccagcattccccctcaaacctaagaaatatgtctgataaaagagttactttgatagagtaaataataggagcttaaacccccttatttctaggactatgagaatcgaacccatccctgagaatccaaaattctccgtgccacctatcacaccccatcctaaagtaaggtcagctaaataagctatcgggcccataccccgaaaatgttggttatacccttcccgtactaattaatcccctggcccaacccgtcatctactctaccatctttgcaggcacactcatcacagcgctaagctcgcactgattttttacctgagtaggcctagaaataaacatgctagcttttattccagttctaaccaaaaaaataaaccctcgttccacagaagctgccatcaagtatttcctcacgcaagcaaccgcatccataatccttctaatagctatcctcttcaacaatatactctccggacaatgaaccataaccaatactaccaatcaatactcatcattaataatcataatggctatagcaataaaactaggaatagccccctttcacttctgagtcccagaggttacccaaggcacccctctgacatccggcctgcttcttctcacatgacaaaaactagcccccatctcaatcatataccaaatctctccctcactaaacgtaagccttctcctcactctctcaatcttatccatcatagcaggcagttgaggtggattaaaccaaacccagctacgcaaaatcttagcatactcctcaattacccacataggatggataatagcaattctaccgtacaaccctaacataaccattcttaatttaactatttatattatcctaactactaccgcattcctactactcaacttaaactccagcaccacgaccctactactatctcgcacctgaaacaagctaacatgactaacacccttaattccatccaccctcctctccctaggaggcctgcccccgctaaccggctttttgcccaaatgggccattatcgaagaattcacaaaaaacaatagcctcatcatccccaccatcatagccaccatcaccctccttaacctctacttctacctacgcctaatctactccacctcaatcacactactccccatatccaacaacgtaaaaataaaatgacagtttgaacatacaaaacccaccccattcctccccacactcatcgcccttaccacgctactcctacctatctccccttttatactaataatcttatagaaatttaggttaaatacagaccaagagccttcaaagccctcagtaagttgcaatacttaatttctgtaacagctaaggactgcaaaaccccactctgcatcaactgaacgcaaatcagccactttaattaagctaagccctcactagaccaatgggacttaaacccacaaacacttagttaacagctaagcaccctaatcaactggcttcaatctacttctcccgccgccgggaaaaaaggcgggagaagccccggcaggtttgaagctgcttcttcgaatttgcaattcaatatgaaaatcacctcggagctggtaaaaagaggcctaacccctgtctttagatttacagtccaatgcttcactcagccattttacctcacccccactgatgttcgccgaccgttgactattctctacaaaccacaaagacattggaacactatacctattattcggcgcatgagctggagtcctaggcacagctctaagcctccttattcgagccgagctgggccagccaggcaaccttctaggtaacgaccacatctacaacgttatcgtcacagcccatgcatttgtaataatcttcttcatagtaatacccatcataatcggaggctttggcaactgactagttcccctaataatcggtgcccccgatatggcgtttccccgcataaacaacataagcttctgactcttacctccctctctcctactcctgctcgcatctgctatagtggaggccggagcaggaacaggttgaacagtctaccctcccttagcagggaactactcccaccctggagcctccgtagacctaaccatcttctccttacacctagcaggtgtctcctctatcttaggggccatcaatttcatcacaacaattatcaatataaaaccccctgccataacccaataccaaacgcccctcttcgtctgatccgtcctaatcacagcagtcctacttctcctatctctcccagtcctagctgctggcatcactatactactaacagaccgcaaccttaacaccaccttcttcgaccccgccggaggaggagaccccattctataccaacacctattctgatttttcggtcaccctgaagtttatattcttatcctaccaggcttcggaataatctcccatattgtaacttactactccggaaaaaaagaaccatttggatacataggtatggtctgagctatgatatcaattggcttcctagggtttatcgtgtgagcacaccatatatttacagtaggaatagacgtagacacacgagcatatttcacctccgccaccataatcatcgctatccccaccggcgtcaaagtatttagctgactcgccacactccacggaagcaatatgaaatgatctgctgcagtgctctgagccctaggattcatctttcttttcaccgtaggtggcctgactggcattgtattagcaaactcatcgctagacatcgtactacacgacacgtactacgttgtagctcacttccactatgtcctatcaataggggctgtatttgccatcataggaggcttcattcactgatttcccctattctcaggctacaccctagaccaaacctacgccaaaatccatttcgctatcatattcatcggcgtaaatctaactttcttcccacaacactttctcggcctatccggaatgccccgacgttactcggactaccccgatgcatacaccacatgaaatatcctatcatctgtaggctcattcatttctctaacagcagtaatattaataattttcatgatttgagaagccttcgcttcgaagcgaaaagtcctaatagtagaagaaccctccataaacctggagtgactacatggatgccccccaccctaccacacattcgaagaacccgtatacataaaatctagacaaaaaaggaaggaatcgaaccccccaaagctggtttcaagccaaccccatggcctccatgactttttcaaaaagatattagaaaaaccatttcataactttgtcaaagttaaattataggctaaatcctatatatcttaatggcacatgcagcgcaagtaggtctacaagacgctacttcccctatcatagaagagcttatcacctttcatgatcacgccctcataatcattttccttatctgcttcctagtcctgtatgcccttttcctaacactcacaacaaaactaactaatactaacatctcagacgctcaggaaatagaaaccgtctgaactatcctgcccgccatcatcctagtcctcatcgccctcccatccctacgcatcctttacataacagacgaggtcaacgatccctctcttaccatcaaatcaattggccaccaatggtactgaacctacgagtacaccgactacggcggactaatcttcaactcctacatacttcccccattattcctagaaccaggcgacctgcgactccttgacgttgacaatcgagtagtactcccgattgaagcccccattcgtataataattacatcacaagacgtcttgcactcatgagctgtccccacattaggcttaaaaacagatgcaattcccggacgtctaaaccaaaccactttcaccgctacacgaccgggggtatactacggtcaatgctctgaaatctgtggagcaaaccacagtttcatgcccatcgtcctagaattaattcccctaaaaatctttgaaatggggcccgtatttaccctatagcaccccctctaccccctctagagcccactgtaaagctaacttagcattaaccttttaagttaaagattaagagaaccaacacctctttacagtgaaatgccccaactaaatactaccgtatggcccaccataattacccccatactccttacactattcctcatcacccaactaaaaatattaaacacaaactaccacttacctccctcaccaaagcccataaaaataaaaaattataacaaaccctgagaaccaaaatgaacgaaaatctgttcgcttcattcattgcccccacaatcctaggcctacccgccgcagtactgatcattctatttccccctctattgatccccacctccaaatatctcatcaacaaccgactaattaccacccaacaatgactaatcaaactaacctcaaaacaaatgatagccatacacaacactaaaggacgaacctgatctcttatactagtatccttaatcatttttattgccacaactaacctcctcggactcctgcctcactcatttacaccaaccacccaactatctataaacctagccatggccatccccttatgagcgggcgcagtgattataggctttcgctctaagattaaaaatgccctagcccacttcttaccacaaggcacacctacaccccttatccccatactagttattatcgaaaccatcagcctactcattcaaccaatagccctggccgtacgcctaaccgctaacattactgcaggccacctactcatgcacctaattggaagcgccaccctagcaatatcaaccattaaccttccctctacacttagcatcttcacaattctaattctactgactatcctagaaatcgctgtcgccttaatccaagcctacgttttcacacttctagtaagcctctacctgcacgacaacacataatgacccaccaatcacatgcctatcatatagtaaaacccagcccatgacccctaacaggggccctctcagccctcctaatgacctccggcctagccatgtgatttcacttccactccataacgctcctcatactaggcctactaaccaacacactaaccatataccaatgatggcgcgatgtaacacgagaaagcacataccaaggccaccacacaccacctgtccaaaaaggccttcgatacgggataatcctatttattacctcagaagtttttttcttcgcaggatttttctgagccttttaccactccagcctagcccctaccccccaactaggagggcactggcccccaacaggcatcaccccgctaaatcccctagaagtcccactcctaaacacatccgtattactcgcatcaggagtatcaatcacctgagctcaccatagtctaatagaaaacaaccgaaaccaaataattcaagcactgcttattacaattttactgggtctctattttaccctcctacaagcctcagagtacttcgagtctcccttcaccatttccgacggcatctacggctcaacattttttgtagccacaggcttccacggacttcacgtcattattggctcaactttcctcactatctgcttcatccgccaactaatatttcactttacatccaaacatcactttggcttcgaagccgccgcctgatactggcattttgtagatgtggtttgactatttctgtatgtctccatctattgatgagggtcttactcttttagtataaatagtaccgttaacttccaattaactagttttgacaacattcaaaaaagagtaataaacttcgccttaattttaataatcaacaccctcctagccttactactaataattattacattttgactaccacaactcaacggctacatagaaaaatccaccccttacgagtgcggcttcgaccctatatcccccgcccgcgtccctttctccataaaattcttcttagtagctattaccttcttattatttgatctagaaattgccctccttttacccctaccatgagccctacaaacaactaacctgccactaatagttatgtcatccctcttattaatcatcatcctagccctaagtctggcctatgagtgactacaaaaaggattagactgagccgaattggtatatagtttaaacaaaacgaatgatttcgactcattaaattatgataatcatatttaccaaatgcccctcatttacataaatattatactagcatttaccatctcacttctaggaatactagtatatcgctcacacctcatatcctccctactatgcctagaaggaataatactatcgctgttcattatagctactctcataaccctcaacacccactccctcttagccaatattgtgcctattgccatactagtctttgccgcctgcgaagcagcggtaggcctagccctactagtctcaatctccaacacatatggcctagactacgtacataacctaaacctactccaatgctaaaactaatcgtcccaacaattatattactaccactgacatgactctccaaaaaacacataatttgaatcaacacaaccacccacagcctaattattagcatcatccccctactattttttaaccaaatcaacaacaacctatttagctgttccccaaccttttcctccgaccccctaacaacccccctcctaatactaactacctgactcctacccctcacaatcatggcaagccaacgccacttatccagtgaaccactatcacgaaaaaaactctacctctctatactaatctccctacaaatctccttaattataacattcacagccacagaactaatcatattttatatcttcttcgaaaccacacttatccccaccttggctatcatcacccgatgaggcaaccagccagaacgcctgaacgcaggcacatacttcctattctacaccctagtaggctcccttcccctactcatcgcactaatttacactcacaacaccctaggctcactaaacattctactactcactctcactgcccaagaactatcaaactcctgagccaacaacttaatatgactagcttacacaatagcttttatagtaaagatacctctttacggactccacttatgactccctaaagcccatgtcgaagcccccatcgctgggtcaatagtacttgccgcagtactcttaaaactaggcggctatggtataatacgcctcacactcattctcaaccccctgacaaaacacatagcctaccccttccttgtactatccctatgaggcataattataacaagctccatctgcctacgacaaacagacctaaaatcgctcattgcatactcttcaatcagccacatagccctcgtagtaacagccattctcatccaaaccccctgaagcttcaccggcgcagtcattctcataatcgcccacggacttacatcctcattactattctgcctagcaaactcaaactacgaacgcactcacagtcgcatcataatcctctctcaaggacttcaaactctactcccactaatagctttttgatgacttctagcaagcctcgctaacctcgccttaccccccactattaacctactgggagaactctctgtgctagtaaccacgttctcctgatcaaatatcactctcctacttacaggactcaacatactagtcacagccctatactccctctacatatttaccacaacacaatggggctcactcacccaccacattaacaacataaaaccctcattcacacgagaaaacaccctcatgttcatacacctatcccccattctcctcctatccctcaaccccgacatcattaccgggttttcctcttgtaaatatagtttaaccaaaacatcagattgtgaatctgacaacagaggcttacgaccccttatttaccgagaaagctcacaagaactgctaactcatgcccccatgtctaacaacatggctttctcaacttttaaaggataacagctatccattggtcttaggccccaaaaattttggtgcaactccaaataaaagtaataaccatgcacactactataaccaccctaaccctgacttccctaattccccccatccttaccaccctcgttaaccctaacaaaaaaaactcatacccccattatgtaaaatccattgtcgcatccacctttattatcagtctcttccccacaacaatattcatgtgcctagaccaagaagtcattatctcgaactgacactgagccacaacccaaacaacccagctctccctaagcttcaaactagactacttctccataatattcatccctgtagcattgttcgttacatggtccatcatagaattctcactgtgatatataaactcagacccaaacattaatcagttcttcaaatatctactcattttcctaattaccatactaatcttagttaccgctaacaacctattccaactgttcatcggctgagagggcgtaggaattatatccttcttgctcatcagttgatgatacgcccgagcagatgccaacacagcagccattcaagcaatcctatacaaccgtatcggcgatatcggtttcatcctcgccttagcatgatttatcctacactccaactcatgagacccacaacaaatagcccttctaaacgctaatccaagcctcaccccactactaggcctcctcctagcagcagcaggcaaatcagcccaattaggtctccacccctgactcccctcagccatagaaggccccaccccagtctcagccctactccactcaagcactatagttgtagcaggagtcttcttactcatccgcttccaccccctagcagaaaatagcccactaatccaaactctaacactatgcttaggcgctatcaccactctgttcgcagcagtctgcgcccttacacaaaatgacatcaaaaaaatcgtagccttctccacttcaagtcaactaggactcataatagttacaatcggcatcaaccaaccacacctagcattcctgcacatctgtacccacgccttcttcaaagccatactatttatgtgctccgggtccatcatccacaaccttaacaatgaacaagatattcgaaaaataggaggactactcaaaaccatacctctcacttcaacctccctcaccattggcagcctagcattagcaggaatacctttcctcacaggtttctattccaaagaccacatcatcgaaaccgcaaacatatcatacacaaacgcctgagccctatctattactctcatcgctacctccctgacaagcgcctatagcactcgaataattcttctcaccctaacaggtcaacctcgcttccctacccttactaacattaacgaaaataaccccaccctactaaaccccattaaacgcctggcagccggaagcctattcgcaggatttctcattactaacaacatttcccccgcatcccccttccaaacaacaatccccctccacctaaaactcacagccctcgctgtcactttcctaggacttctaacagccctagacctcaactacctaaccaacaaacttaaaataaaatacccactatgcacattttatttctccaacatactcggattctaccctagcatcacacaccgcacaatcccctatctaggccttcttacgagccaaaacctacccctactcctcctagacctaacctgactagaaaagctattacctaaaacaatttcacagcaccaaatctccacctccatcatcacctcaacccaaaaaggcataattaaactttacttcctctctttcttcttcccactcatcctaaccctactcctaatcacataacctattcccccgagcaatctcaattacaacatatacaccaacaaacaatgttcagccagtaactactactaatcaacgcccataatcatacaaagcccccgcaccaataggatcctcccgaatcaaccctgacccctctccttcataaattattcagcttcctacactattaaagtttaccacaaccaccaccccatcatactctttcacccacagcaccaatcctacctccatcgctaaccccactaaaacactcaccaagacctcaacccctgacccccatgcctcaggatactcctcaatagccatcgctgtagtatatccaaagacaaccatcattccccctaaataaattaaaaaaactattaaacccatataacctcccccaaaattcagaataataacacacccaaccacaccgctaacaatcaatactaaacccccataaataggagaaggcttagaagaaaaccccacaaaccccattactaaacccacactcaacagaaacaaagcatacatcattattctcgcacggactacaaccacgaccaatgatatgaaaaaccatcgttgtatttcaactacaagaacaccaatgaccccaatacgcaaaattagccccctaataaaattaattaaccactcattcatcgacctccccaccccatccaacatctccgcatgatgaaacttcggctcactccttggcgcctgcctgatcctccaaatcaccacaggactattcctagccatgcactactcaccagacgcctcaaccgccttttcatcaatcgcccacatcactcgagacgtaaattatggctgaatcatccgctaccttcacgccaatggcgcctcaatattctttatctgcctcttcctacacatcgggcgaggcctatattacggatcatttctctactcagaaacctgaaacatcggcattatcctcctgcttgcaaccatagcaacagccttcataggctatgtcctcccgtgaggccaaatatcattctgaggggccacagtaattacaaacttactatccgccatcccatacattgggacagacctagttcaatgaatctgaggaggctactcagtagacagtcccaccctcacacgattctttacctttcacttcatcttgcccttcattattgcagccctagcagcactccacctcctattcttgcacgaaacgggatcaaacaaccccctaggaatcacctcccattccgataaaatcaccttccacccttactacacaatcaaagacgccctcggcttacttctcttccttctctccttaatgacattaacactattctcaccagacctcctaggcgacccagacaattataccctagccaaccccttaaacacccctccccacatcaagcccgaatgatatttcctattcgcctacacaattctccgatccgtccctaacaaactaggaggcgtccttgccctattactatccatcctcatcctagcaataatccccatcctccatatatccaaacaacaaagcataatatttcgcccactaagccaatcactttattgactcctagccgcagacctcctcattctaacctgaatcggaggacaaccagtaagctacccttttaccatcattggacaagtagcatccgtactatacttcacaacaatcctaatcctaataccaactatctccctaattgaaaacaaaatactcaaatgggcctgtccttgtagtataaactaatacaccagtcttgtaaaccggagatgaaaacctttttccaaggacaaatcagagaaaaagtctttaactccaccattagcacccaaagctaagattctaatttaaactattctctgttctttcatggggaagcagatttgggtaccacccaagtattgactcacccatcaacaaccgctatgtatttcgtacattactgccagccaccatgaatattgcacggtaccataaatacttgaccacctgtagtacataaaaacccaatccacatcaaaaccctccccccatgcttacaagcaagtacagcaatcaaccttcaactatcacacatcaactgcaactccaaagccaccccttacccattaggatatcaacaaacctacccgcccttaacagtacatagcacataaagccatttaccgtacatagcacattacagtcaaatcccttctcgtccccatggatgacccccctcagataggggtcccttgaccaccatcctccgtgaaatcaatatcccgcacaagagtgctactctcctcgctccgggcccataacacttgggggtagctaaagtgaactgtatccgacatctggttcctacttcagggccataaagcctaaatagcccacacgttccccttaaataagacatcacgatg

SEQ ID NO: 388 - DNA, 16570 bp, Homo sapiens mitochondrial
  3108: "n" refers to a nucleotide at position 3107 of the Cambridge Reference Sequence (CRS, Anderson et al. 1981 Nature 290:457-465), later determined to be absent from the human mtDNA sequence according to the revised CRS (rCRS, Andrews et al. 1999 Nature Genetics 23:147); "n" therefore represents a single nucleotide deletion at a position corresponding to nucleotide 3107 of SEQ ID NO:1 as provided herein.
gatcacaggtctatcaccctattaaccactcacgggagctctccatgcatttggtattttcgtctggggggtgtgcacgcgatagcattgcgagacgctggagccggagcaccctatgtcgcagtatctgtctttgattcctgcctcattctattatttatcgcacctacgttcaatattacagacgagcatacttactgaagtgtgttaattaattaatgcttgtaggacataataataacaattgaatgtctgcacagccgctttccacacagacatcataacaaaaaatttccaccaaaccccccctcccccgccttctggccacagcacttaaacacatctctgccaaaccccaaaaacaaagaaccctaacaccagcctaaccagatttcaaattttatcttttggcggtatgcacttttaacagtcaccccccaactaacacattattttcccctcccactcccatactactaatctcatcaatacaacccccgcccatcctacccagcacacacacaccgctgctaaccccataccccgaaccaaccaaaccccaaagacaccccccacagtttatgtagcttacctcctcaaagcaatacactgaaaatgtttagacgggctcacatcaccccataaacaaataggtttggtcctagcctttctattagctcttagtaagattacacatgcaagcatccccgttccagtgagttcaccctctaaatcaccacgatcaaaagggacaagcatcaagcacgcagcaatgcagctcaaaacgcttagcctagccacacccccacgggaaacagcagtgattaacctttagcaataaacgaaagtttaactaagctatactaaccccagggttggtcaatttcgtgccagccaccgcggtcacacgattaacccaagtcaatagaagccggcgtaaagagtgttttagatcaccccctccccaataaagctaaaactcacctgagttgtaaaaaactccagttgacacaaaatagactacgaaagtggctttaacatatctgaacacacaatagctaagacccaaactgggattagataccccactatgcttagccctaaacctcaacagttaaatcaacaaaactgctcgccagaacactacgagccacagcttaaaactcaaaggacctggcggtgcttcatatccctctagaggagcctgttctgtaatcgataaaccccgatcaacctcaccacctcttgctcagcctatataccgccatcttcagcaaaccctgatgaaggctacaaagtaagcgcaagtacccacgtaaagacgttaggtcaaggtgtagcccatgaggtggcaagaaatgggctacattttctaccccagaaaactacgatagcccttatgaaacttaagggtcgaaggtggatttagcagtaaactgagagtagagtgcttagttgaacagggccctgaagcgcgtacacaccgcccgtcaccctcctcaagtatacttcaaaggacatttaactaaaacccctacgcatttatatagaggagacaagtcgtaacatggtaagtgtactggaaagtgcacttggacgaaccagagtgtagcttaacacaaagcacccaacttacacttaggagatttcaacttaacttgaccgctctgagctaaacctagccccaaacccactccaccttactaccagacaaccttagccaaaccatttacccaaataaagtataggcgatagaaattgaaacctggcgcaatagatatagtaccgcaagggaaagatgaaaaattataaccaagcataatatagcaaggactaacccctataccttctgcataatgaattaactagaaataactttgcaaggagagccaaagctaagacccccgaaaccagacgagctacctaagaacagctaaaagagcacacccgtctatgtagcaaaatagtgggaagatttataggtagaggcgacaaacctaccgagcctggtgatagctggttgtccaagatagaatcttagttcaactttaaatttgcccacagaaccctctaaatccccttgtaaatttaactgttagtccaaagaggaacagctctttggacactaggaaaaaaccttgtagagagagtaaaaaatttaacacccatagtaggcctaaaagcagccaccaattaagaaagcgttcaagctcaacacccactacctaaaaaatcccaaacatataactgaactcctcacacccaattggaccaatctatcaccctatagaagaactaatgttagtataagtaacatgaaaacattctcctccgcataagcctgcgtcagatcaaaacactgaactgacaattaacagcccaatatctacaatcaaccaacaagtcattattaccctcactgtcaacccaacacaggcatgctcataaggaaaggttaaaaaaagtaaaaggaactcggcaaatcttaccccgcctgtttaccaaaaacatcacctctagcatcaccagtattagaggcaccgcctgcccagtgacacatgtttaacggccgcggtaccctaaccgtgcaaaggtagcataatcacttgttccttaaatagggacctgtatgaatggctccacgagggttcagctgtctcttacttttaaccagtgaaattgacctgcccgtgaagaggcgggcatgacacagcaagacgagaagaccctatggagctttaatttattaatgcaaacagtacctaacaaacccacaggtcctaaactaccaaacctgcattaaaaatttcggttggggcgacctcggagcagaacccaacctccgagcagtacatgctaagacttcaccagtcaaagcgaactactatactcaattgatccaataacttgaccaacggaacaagttaccctagggataacagcgcaatcctattctagagtccatatcaacaatagggtttacgacctcgatgttggatcaggacatcccgatggtgcagccgctattaaaggttcgtttgttcaacgattaaagtcctacgtgatctgagttcagaccggagtaatccaggtcggtttctatctacnttcaaattcctccctgtacgaaaggacaagagaaataaggcctacttcacaaagcgccttcccccgtaaatgatatcatctcaacttagtattatacccacacccacccaagaacagggtttgttaagatggcagagcccggtaatcgcataaaacttaaaactttacagtcagaggttcaattcctcttcttaacaacatacccatggccaacctcctactcctcattgtacccattctaatcgcaatggcattcctaatgcttaccgaacgaaaaattctaggctatatacaactacgcaaaggccccaacgttgtaggcccctacggactactacaacccttcgctgacgccataaaactcttcaccaaagagcccctaaaacccgccacatctaccatcaccctctacatcaccgccccgaccttagctctcaccatcgctcttctactatgaacccccctccccatacccaaccccctggtcaacctcaacctaggcctcctatttattctagccacctctagcctagccgtttactcaatcctctgatcagggtgagcatcaaactcaaactacgccctgatcggcgcactgcgagcagtagcccaaacaatctcatatgaagtcaccctagccatcattctactatcaacattactaataagtggctcctttaacctctccacccttatcacaacacaagaacacctctgattactcctgccatcatgacccttggccataatatgatttatctccacactagcagagaccaaccgaacccccttcgaccttgccgaaggggagtccgaactagtctcaggcttcaacatcgaatacgccgcaggccccttcgccctattcttcatagccgaatacacaaacattattataataaacaccctcaccactacaatcttcctaggaacaacatatgacgcactctcccctgaactctacacaacatattttgtcaccaagaccctacttctaacctccctgttcttatgaattcgaacagcatacccccgattccgctacgaccaactcatacacctcctatgaaaaaacttcctaccactcaccctagcattacttatatgatatgtctccatacccattacaatctccagcattccccctcaaacctaagaaatatgtctgataaaagagttactttgatagagtaaataataggagcttaaacccccttatttctaggactatgagaatcgaacccatccctgagaatccaaaattctccgtgccacctatcacactccatcctaaagtaaggtcagctaaataagctatcgggcccataccccgaaaatgttggttatacccttcccgtactaattaatcccctggcccaacccgtcatctactctaccatctttgcaggcacactcatcacagcgctaagctcgcactgattttttacctgagtaggcctagaaataaacatgctagcttttattccagttctaaccaaaaaaataaaccctcgttccacagaagctgccatcaagtatttcctcacgcaagcaaccgcatccataatccttctaatagctatcctcttcaacaatatactctccggacaatgaaccataaccaatactaccaatcaatactcatcattaataatcataatggctatagcaataaaactaggaatagccccctttcacttctgagtcccagaggttacccaaggcacccctctgacatccggcctgcttcttctcacatgacaaaaactagcccccatctcaatcatataccaaatctctccctcactaaacgtaagccttctcctcactctctcaatcttatccatcatagcaggcagttgaggtggattaaaccaaacccagctacgcaaaatcttagcatactcctcaattacccacataggatgaataatagcagttctaccgtacaaccctaacataaccattcttaatttaactatttatattatcctaactactaccgcattcctactactcaacttaaactccagcaccacgaccctactactatctcgcacctgaaacaagctaacatgactaacacccttaattccatccaccctcctctccctaggaggcctgcccccgctaaccggctttttgcccaaatgggccattatcgaagaattcacaaaaaacaatagcctcatcatccccaccatcatagccaccatcaccctccttaacctctacttctacctacgcctaatctactccacctcaatcacactactccccatatctaacaacgtaaaaataaaatgacagtttgaacatacaaaacccaccccattcctccccacactcatcgcccttaccacgctactcctacctatctccccttttatactaataatcttatagaaatttaggttaaatacagaccaagagccttcaaagccctcagtaagttgcaatacttaatttctgtaacagctaaggactgcaaaaccccactctgcatcaactgaacgcaaatcagccactttaattaagctaagcccttactagaccaatgggacttaaacccacaaacacttagttaacagctaagcaccctaatcaactggcttcaatctacttctcccgccgccgggaaaaaaggcgggagaagccccggcaggtttgaagctgcttcttcgaatttgcaattcaatatgaaaatcacctcggagctggtaaaaagaggcctaacccctgtctttagatttacagtccaatgcttcactcagccattttacctcacccccactgatgttcgccgaccgttgactattctctacaaaccacaaagacattggaacactatacctattattcggcgcatgagctggagtcctaggcacagctctaagcctccttattcgagccgagctgggccagccaggcaaccttctaggtaacgaccacatctacaacgttatcgtcacagcccatgcatttgtaataatcttcttcatagtaatacccatcataatcggaggctttggcaactgactagttcccctaataatcggtgcccccgatatggcgtttccccgcataaacaacataagcttctgactcttacccccctctctcctactcctgctcgcatctgctatagtggaggccggagcaggaacaggttgaacagtctaccctcccttagcagggaactactcccaccctggagcctccgtagacctaaccatcttctccttacacctagcaggtgtctcctctatcttaggggccatcaatttcatcacaacaattatcaatataaaaccccctgccataacccaataccaaacgcccctcttcgtctgatccgtcctaatcacagcagtcctacttctcctatctctcccagtcctagctgctggcatcactatactactaacagaccgcaacctcaacaccaccttcttcgaccccgccggaggaggagaccctattctataccaacacctattctgatttttcggtcaccctgaagtttatattcttatcctaccaggcttcggaataatctcccatattgtaacttactactccggaaaaaaagaaccatttggatacataggtatggtctgagctatgatatcaattggcttcctagggtttatcgtgtgagcacaccatatatttacagtaggaatagacgtagacacacgagcatatttcacctccgctaccataatcatcgctatccccaccggcgtcaaagtatttagctgactcgccacactccacggaagcaatatgaaatgatctgctgcagtgctctgagccctaggattcatctttcttttcaccgtaggtggcctgactggcattgtattagcaaactcatcactagacatcgtactacacgacacgtactacgttgtagctcacttccactatgtcctatcaataggagctgtatttgccatcataggaggcttcattcactgatttcccctattctcaggctacaccctagaccaaacctacgccaaaatccatttcactatcatattcatcggcgtaaatctaactttcttcccacaacactttctcggcctatccggaatgccccgacgttactcggactaccccgatgcatacaccacatgaaacatcctatcatctgtaggctcattcatttctctaacagcagtaatattaataattttcatgatttgagaagccttcgcttcgaagcgaaaagtcctaatagtagaagaaccctccataaacctggagtgactatatggatgccccccaccctaccacacattcgaagaacccgtatacataaaatctagacaaaaaaggaaggaatcgaaccccccaaagctggtttcaagccaaccccatggcctccatgactttttcaaaaaggtattagaaaaaccatttcataactttgtcaaagttaaattataggctaaatcctatatatcttaatggcacatgcagcgcaagtaggtctacaagacgctacttcccctatcatagaagagcttatcacctttcatgatcacgccctcataatcattttccttatctgcttcctagtcctgtatgcccttttcctaacactcacaacaaaactaactaatactaacatctcagacgctcaggaaatagaaaccgtctgaactatcctgcccgccatcatcctagtcctcatcgccctcccatccctacgcatcctttacataacagacgaggtcaacgatccctcccttaccatcaaatcaattggccaccaatggtactgaacctacgagtacaccgactacggcggactaatcttcaactcctacatacttcccccattattcctagaaccaggcgacctgcgactccttgacgttgacaatcgagtagtactcccgattgaagcccccattcgtataataattacatcacaagacgtcttgcactcatgagctgtccccacattaggcttaaaaacagatgcaattcccggacgtctaaaccaaaccactttcaccgctacacgaccgggggtatactacggtcaatgctctgaaatctgtggagcaaaccacagtttcatgcccatcgtcctagaattaattcccctaaaaatctttgaaatagggcccgtatttaccctatagcaccccctctaccccctctagagcccactgtaaagctaacttagcattaaccttttaagttaaagattaagagaaccaacacctctttacagtgaaatgccccaactaaatactaccgtatggcccaccataattacccccatactccttacactattcctcatcacccaactaaaaatattaaacacaaactaccacctacctccctcaccaaagcccataaaaataaaaaattataacaaaccctgagaaccaaaatgaacgaaaatctgttcgcttcattcattgcccccacaatcctaggcctacccgccgcagtactgatcattctatttccccctctattgatccccacctccaaatatctcatcaacaaccgattaatcaccacccaacaatgactaatcaaactaacctcaaaacaaatgatagccatacacaacactaaaggacgaacctgatctcttatactagtatccttaatcatttttattgccacaactaacctcctcggactcctgcctcactcatttacaccaaccacccaactatctataaacctagccatggccatccccttatgagcgggcgcagtgattataggctttcgctctaagattaaaaatgccctagcccacttcttaccacaaggcacacctacaccccttatccccatactagttattatcgaaaccatcagcctactcattcaaccaatagccctggccgtacgcctaaccgctaacattactgcaggccacctactcatgcacctaattggaagcgccaccctagcaatatcaaccattaaccttccctctacacttatcatcttcacaattctaattctactgactatcctagaaatcgctgtcgccttaatccaagcctacgttttcacacttctagtaagcctctacctgcacgacaacacataatgacccaccaatcacatgcctatcatatagtaaaacccagcccatgacccctaacaggggccctctcagccctcctaatgacctccggcctagccatgtgatttcacttccactccataacgctcctcatactaggcctactaaccaacacactaaccatataccaatgatggcgcgatgtaacacgagaaagcacataccaaggccaccacacaccacctgtccaaaaaggccttcgatacgggataatcctatttattacctcagaagtttttttcttcgcaggatttttctgagccttttaccactccagcctagcccctaccccccaactaggagggcactggcccccaacaggcatcaccccgctaaatcccctagaagtcccactcctaaacacatccgtattactcgcatcaggagtatcaatcacctgagctcaccatagtctaatagaaaacaaccgaaaccaaataattcaagcactgcttattacaattttactgggtctctattttaccctcctacaagcctcagagtacttcgagtctcccttcaccatttccgacggcatctacggctcaacattttttgtagccacaggcttccacggacttcacgtcattattggctcaactttcctcactatctgcttcatccgccaactaatatttcactttacatccaaacatcactttggcttcgaagccgccgcctgatactggcattttgtagatgtggtttgactatttctgtatgtctccatctattgatgagggtcttactcttttagtataaatagtaccgttaacttccaattaactagttttgacaacattcaaaaaagagtaataaacttcgccttaattttaataatcaacaccctcctagccttactactaataattattacattttgactaccacaactcaacggctacatagaaaaatccaccccttacgagtgcggcttcgaccctatatcccccgcccgcgtccctttctccataaaattcttcttagtagctattaccttcttattatttgatctagaaattgccctccttttacccctaccatgagccctacaaacaactaacctgccactaatagttatgtcatccctcttattaatcatcatcctagccctaagtctggcctatgagtgactacaaaaaggattagactgagccgaattggtatatagtttaaacaaaacgaatgatttcgactcattaaattatgataatcatatttaccaaatgcccctcatttacataaatattatactagcatttaccatctcacttctaggaatactagtatatcgctcacacctcatatcctccctactatgcctagaaggaataatactatcgctgttcattatagctactctcataaccctcaacacccactccctcttagccaatattgtgcctattgccatactagtctttgccgcctgcgaagcagcggtgggcctagccctactagtctcaatctccaacacatatggcctagactacgtacataacctaaacctactccaatgctaaaactaatcgtcccaacaattatattactaccactgacatgactttccaaaaagcacataatttgaatcaacacaaccacccacagcctaattattagcatcatccccctactattttttaaccaaatcaacaacaacctatttagctgttccccaaccttttcctccgaccccctaacaacccccctcctaatactaactacctgactcctacccctcacaatcatggcaagccaacgccacttatccagtgaaccactatcacgaaaaaaactctacctctctatactaatctccctacaaatctccttaattataacattcacagccacagaactaatcatattttatatcttcttcgaaaccacacttatccccaccttggctatcatcacccgatgaggcaaccagccagaacgcctgaacgcaggcacatacttcctattctacaccctagtaggctcccttcccctactcatcgcactaatttacactcacaacaccctaggctcactaaacattctactactcactctcactgcccaagaactatcaaactcctgagccaacaacttaatatgactagcttacacaatagcttttatagtaaagatacctctttacggactccacttatgactccctaaagcccatgtcgaagcccccatcgctgggtcaatagtacttgccgcagtactcttaaaactaggcggctatggtataatacgcctcacactcattctcaaccccctgacaaaacacatagcctaccccttccttgtactatccctatgaggcataattataacaagctccatctgcctacgacaaacagacctaaaatcgctcattgcatactcttcaatcagccacatagccctcgtagtaacagccattctcatccaaaccccctgaagcttcaccggcgcagtcattctcataatcgcccacggacttacatcctcattactattctgcctagcaaactcaaactacgaacgcactcacagtcgcatcataatcctctctcaaggacttcaaactctactcccactaatagctttttgatgacttctagcaagcctcgctaacctcgccttaccccccactattaacctactgggagaactctctgtgctagtaaccacattctcctgatcaaatatcactctcctacttacaggactcaacatactagtcacagccctatactccctctacatatttaccacaacacaatggggctcactcacccaccacattaacaacataaaaccctcattcacacgagaaaacaccctcatgttcatacacctatcccccattctcctcctatccctcaaccccgacatcattaccgggttttcctcttgtaaatatagtttaaccaaaacatcagattgtgaatctgacaacagaggcttacgaccccttatttaccgagaaagctcacaagaactgctaactcatgcccccatgtctaacaacatggctttctcaacttttaaaggataacagctatccattggtcttaggccccaaaaattttggtgcaactccaaataaaagtaataaccatgcacactactataaccaccctaaccctgacttccctaattccccccatccttaccaccctcgttaaccctaacaaaaaaaactcatacccccattatgtaaaatccattgtcgcatccacctttattatcagtctcttccccacaacaatattcatgtgcctagaccaagaagttattatctcgaactgacactgagccacaacccaaacaacccagctctccctaagcttcaaactagactacttctccataatattcatccctgtagcattgttcgttacatggtccatcatagaattctcactgtgatatataaactcagacccaaacattaatcagttcttcaaatatctactcattttcctaattaccatactaatcttagttaccgctaacaacctattccaactgttcatcggctgagagggcgtaggaattatatccttcttgctcatcagttgatgatacgcccgagcagatgccaacacagcagccattcaagcaatcctatacaaccgtatcggcgatatcggtttcatcctcgccttagcatgatttatcctacactccaactcatgagacccacaacaaatagcccttctaaacgctaatccaagcctcaccccactactaggcctcctcctagcagcagcaggcaaatcagcccaattaggtctccacccctgactcccctcagccatagaaggccccaccccagtctcagccctactccactcaagcactatagttgtagcaggaatcttcttactcatccgcttccaccccctagcagaaaatagcccactaatccaaactctaacactatgcttaggcgctatcaccactctgttcgcagcagtctgcgcccttacacaaaatgacatcaaaaaaatcgtagccttctccacttcaagtcaactaggactcataatagttacaatcggcatcaaccaaccacacctagcattcctgcacatctgtacccacgccttcttcaaagccatactatttatgtgctccgggtccatcatccacaaccttaacaatgaacaagatattcgaaaaataggaggactactcaaaaccatacctctcacttcaacctccctcaccattggcagcctagcattagcaggaatacctttcctcacaggtttctactccaaagaccacatcatcgaaaccgcaaacatatcatacacaaacgcctgagccctatctattactctcatcgctacctccctgacaagcgcctatagcactcgaataattcttctcaccctaacaggtcaacctcgcttccccacccttactaacattaacgaaaataaccccaccctactaaaccccattaaacgcctggcagccggaagcctattcgcaggatttctcattactaacaacatttcccccgcatcccccttccaaacaacaatccccctctacctaaaactcacagccctcgctgtcactttcctaggacttctaacagccctagacctcaactacctaaccaacaaacttaaaataaaatccccactatgcacattttatttctccaacatactcggattctaccctagcatcacacaccgcacaatcccctatctaggccttcttacgagccaaaacctgcccctactcctcctagacctaacctgactagaaaagctattacctaaaacaatttcacagcaccaaatctccacctccatcatcacctcaacccaaaaaggcataattaaactttacttcctctctttcttcttcccactcatcctaaccctactcctaatcacataacctgttcccccgagcaatctcaattacaatatatacaccaacaaacaatgttcaaccagtaaccactactaatcaacgcccataatcatacaaagcccccgcaccaataggatcctcccgaatcaaccctgacccctctccttcataaattattcagcttcctacactattaaagtttaccacaaccaccaccccatcatactctttcacccacagcaccaatcctacctccatcgctaaccccactaaaacactcaccaagacctcaacccctgacccccatgcctcaggatactcctcaatagccatcgctgtagtatatccaaagacaaccatcattccccctaaataaattaaaaaaactattaaacccatataacctcccccaaaattcagaataataacacacccgaccacaccgctaacaatcaatactaaacccccataaataggagaaggcttagaagaaaaccccacaaaccccattactaaacccacactcaacagaaacaaagcatacatcattattctcgcacggactacaaccacgaccaatgatatgaaaaaccatcgttgtatttcaactacaagaacaccaatgaccccaatacgcaaaattaaccccctaataaaattaattaaccactcattcatcgacctccccaccccatccaacatctccgcatgatgaaacttcggctcactccttggcgcctgcctgatcctccaaatcaccacaggactattcctagccatgcactactcaccagacgcctcaaccgccttttcatcaatcgcccacatcactcgagacgtaaattatggctgaatcatccgctaccttcacgccaatggcgcctcaatattctttatctgcctcttcctacacatcgggcgaggcctatattacggatcatttctctactcagaaacctgaaacatcggcattatcctcctgcttgcaactatagcaacagccttcataggctatgtcctcccgtgaggccaaatatcattctgaggggccacagtaattacaaacttactatccgccatcccatacattgggacagacctagttcaatgaatctgaggaggctactcagtagacagtcccaccctcacacgattctttacctttcacttcatcttacccttcattattgcagccctagcagcactccacctcctattcttgcacgaaacgggatcaaacaaccccctaggaatcacctcccattccgataaaatcaccttccacccttactacacaatcaaagacgccctcggcttacttctcttccttctctccttaatgacattaacactattctcaccagacctcctaggcgacccagacaattataccctagccaaccccttaaacacccctccccacatcaagcccgaatgatatttcctattcgcctacacaattctccgatccgtccctaacaaactaggaggcgtccttgccctattactatccatcctcatcctagcaataatccccatcctccacatatccaaacaacaaagcataatatttcgcccactaagccaatcactttattgactcctagccgcagacctcctcattctaacctgaatcggaggacaaccagtaagctacccttttaccatcattggacaagtagcatccgtactatacttcacaacaatcctaatcctaataccaactatctccctaattgaaaacaaaatactcaaatgggcctgtccttgtagtataaactaatacaccagtcttgtaaaccggagatgaaaaccttcttccaaggacaaatcagagaaaaagtctttaactccaccattagcacccaaagctaagattctaatttaaactattctctgttctttcatggggaagcagatttgggtaccacccaagtattgactcacccatcaacaaccgctatgtatttcgtacattactgccagccaccatgaatattgtacggtaccataaatacttgaccacctgtagtacataaaaacccaatccacatcaaaactccctccccatgcttacaagcaagtacagcaatcaaccttcaactatcacacatcaactgcaactccaaagccacccctcacccactaggataccaacaaacctacccacccttaacagtacatagcacataaagccatttatcgtacatagcacattacagtcaaatcccttctcgtccccatggatgacccccctcagataggggtcccttgaccaccatcctccgtgaaatcaatatcccgcacaagagtgctactctcctcgctccgggcccataacacttgggggtagctaaagtgaactgtatccgacatctggttcctacttcagggtcataaagcctaaatagcccacacgttccccttaaataagacatcacgatg

SEQ ID NO: 389 - DNA, 16570 bp, Homo sapiens mitochondrial
  3108: "n" refers to a nucleotide at position 3107 of the Cambridge Reference Sequence (CRS, Anderson et al. 1981 Nature 290:457-465), later determined to be absent from the human mtDNA sequence according to the revised CRS (rCRS, Andrews et al. 1999 Nature Genetics 23:147); "n" therefore represents a single nucleotide deletion at a position corresponding to nucleotide 3107 of SEQ ID NO:1 as provided herein.
gatcacaggtctatcaccctattaaccactcacgggagctctccatgcatttggtattttcgtctggggggtgtgcacgcgatagcattgcgagacgctggagccggagcaccctatgtcgcagtatctgtctttgattcctaccccatcccattatttatcgcacctacgttcaatattacaggcgaacatacctactaaagtgtgttaattaattaatgcttgtaggacataataataacaattgaatgtctgcacagccgctttccacacagacatcataacaaaaaatttccaccaaaccccccctcccccgccttctggccacagcacttaaacacatctctgccaaaccccaaaaacaaagaaccctaacaccagcctaaccagatttcaaattttatcttttggcggtatgcacttttaacagtcaccccccaactaacacattattttcccctcccactcccatactactaatctcatcaatacaacccccgcccatcctacccagcacacacacaccgctgctaaccccataccccgaaccaaccaaaccccaaagacaccccccacagtttatgtagcttacctcctcaaagcaatacactgaaaatgtttagacgggctcacatcaccccataaacaaataggtttggtcctagcctttctattagctcttagtaagattacacatgcaagcatccccgttccagtgagttcaccctctaaatcaccacgatcaaaagggacaagcatcaagcacgcaacaatgcagctcaaaacgcttagcctagccacacccccacgggaaacagcagtgattaacctttagcaataaacgaaagtttaactaagctatactaaccccagggttggtcaatttcgtgccagccaccgcggtcacacgattaacccaagtcaatagaagccggcgtaaagagtgttttagatcaccccctccccaataaagctaaaactcacctgagttgtaaaaaactccagttgacacaaaataaactacgaaagtggctttaacatatctgaacacacaatagctaagacccaaactgggattagataccccactatgcttagccctaaacctcaacagttaaatcaacaaaactgctcgccagaacactacgagccacagcttaaaactcaaaggacctggcggtgcttcatatccctctagaggagcctgttctgtaatcgataaaccccgatcaacctcaccacctcttgctcagcctatataccgccatcttcagcaaaccctgatgaaggctacaaagtaagcgcaagtacccacgtaaagacgttaggtcaaggtgtagcccatgaggtggcaagaaatgggctacattttctaccccagaaaactacgatagcccttatgaaacttaagggtcgaaggtggatttagcagtaaactgagagtagagtgcttagttgaacagggccctgaagcgcgtacacaccgcccgtcaccctcctcaagtatacttcaaaggacatttaactaaaacccctacgcatttatatagaggagacaagtcgtaacatggtaagtgtactggaaagtgcacttggacgaaccagagtgtagcttaacacaaagcacccaacttacacttaggagatttcaacttaacttgaccgctctgagctaaacctagccccaaacccactccaccttactaccagacaaccttagccaaaccatttacccaaataaagtataggcgatagaaattgaaacctggcgcaatagatatagtaccgcaagggaaagatgaaaaattataaccaagcataatatagcaaggactaacccctataccttctgcataatgaattaactagaaataactttgcaaggagagccaaagctaagacccccgaaaccagacgagctacctaagaacagctaaaagagcacacccgtctatgtagcaaaatagtgggaagatttataggtagaggcgacaaacctaccgagcctggtgatagctggttgtccaagatagaatcttagttcaactttaaatttgcccacagaaccctctaaatccccttgtaaatttaactgttagtccaaagaggaacagctctttggacactaggaaaaaaccttgtagagagagtaaaaaatttaacacccatagtaggcctaaaagcagccaccaattaagaaagcgttcaagctcaacacccactacctaaaaaatcccaaacatataactgaactcctcacacccaattggaccaatctatcaccctatagaagaactaatgttagtataagtaacatgaaaacattctcctccgcataagcctgcgtcagattaaaacactgaactgacaattaacagcccaatatctacaatcaaccaacaagtcattattacccccactgtcaacccaacacaggcatgctcataaggaaaggttaaaaaaagtaaaaggaactcggcaaatcttaccccgcctgtttaccaaaaacatcacctctagcatcaccagtattagaggcaccgcctgcccagtgacacatgtttaacggccgcggtaccctaaccgtgcaaaggtagcataatcacttgttccttaaatagggacctgtatgaatggctccacgagggttcagctgtctcttacttttaaccagtgaaattgacctgcccgtgaagaggcgggcatgacacagcaagacgagaagaccctatggagctttaatttattaatgcaaacagtacctaacaaacccacaggtcctaaactactaaacctgcattaaaaatttcggttggggcgacctcggagcagaacccaacctccgagcagtacatgctaagacttcaccagtcaaagcgaactactatactcaattgatccaataacttgaccaacggaacaagttaccctagggataacagcgcaatcctattctagagtccatatcaacaatagggtttacgacctcgatgttggatcaggacatcccgatggtgcagccgctattaaaggttcgtttgttcaacgattaaagtcctacgtgatctgagttcagaccggagtaatccaggtcggtttctatctacnttcaaattcctccctgtacgaaaggacaagagaaataaggcctacttcacaaagcgccttcccccgtaaatgatatcatctcaacttagtattatacccacacccacccaagaacagggtttgttaagatggcagagcccggtaatcgcataaaacttaaaactttacagtcagaggttcaattcctcttcttaacaacatacccatggccaacctcctactcctcattgtacccattctaatcgcaatggcattcctaatgcttaccgaacgaaaaattctaggctatatacaactacgcaaaggccccaacgttgtaggcccctacgggctactacaacccttcgctgacgccataaaactcttcaccaaagagcccctaaaacccgccacatctaccatcaccctctacatcaccgccccgaccttagctctcaccatcgctcttctactatgaacccccctccccatacccaaccccctggttaacctcaacctaggcctcctatttattctagccacctctagcctagccgtttactcaatcctctgatcagggtgagcatcaaactcaaactacgccctgatcggcgcactgcgagcagtagcccaaacaatctcatatgaagtcaccctagccatcattctactatcaacattactaataagtggctcctttaacctctccacccttatcacaacacaagaacacctctgattactcctgccatcatgacccttggccataatatgatttatctccacactagcagagaccaaccgaacccccttcgaccttgccgaaggggagtccgaactagtctcaggcttcaacatcgaatacgccgcaggccccttcgccctattcttcatagccgaatacacaaacattattataataaacaccctcaccactacaatcttcctaggaacaacatatgacgcactctcccctgaactctacacaacatattttgtcaccaagaccctacttctgacctccctgttcttatgaattcgaacagcatacccccgattccgctacgaccaactcatacacctcctatgaaaaaacttcctaccactcaccctagcattacttatatgatatgtctccatacccattacaatctccagcattccccctcaaacctaagaaatatgtctgataaaagagttactttgatagagtaaataataggagcttaaacccccttatttctaggactatgagaatcgaacccatccctgagaatccaaaattctccgtgccacctatcacaccccatcctaaagtaaggtcagctaaataagctatcgggcccataccccgaaaatgttggttatacccttcccgtactaattaatcccctggcccaacccgtcatctactctaccatctttgcaggcacactcatcacagcgctaagctcgcactgattttttacctgagtaggcctagaaataaacatgctagcttttattccagttctaaccaaaaaaataaaccctcgttccacagaagctgccatcaagtatttcctcacgcaagcaaccgcatccataatccttctaatagctatcctcttcaacaatatactctccggacaatgaaccataaccaatactaccaatcaatactcatcattaataatcataatggctatagcaataaaactaggaatagccccctttcacttctgagtcccagaggttacccaaggcacccctctgacatccggcctgcttcttctcacatgacaaaaactagcccccatctcaatcatataccaaatctctccctcactaaacgtaagccttctcctcactctctcaatcttatccatcatagcaggcagttgaggtggattaaaccaaacccagctacgcaaaatcttagcatactcctcaattacccacataggatgaataatagcagttctaccgtacaaccctaacataaccattcttaatttaactatttatattatcctaactactaccgcattcctactactcaacttaaactccagcaccacgaccctactactatctcgcacctgaaacaagctaacatgactaacacccttaattccatccaccctcctctccctaggaggcctgcccccgctaaccggctttttgcccaaatgggccattatcgaagaattcacaaaaaacaatagcctcatcatccccaccatcatagccaccatcaccctccttaacctctacttctacctacgcctaatctactccacctcaatcacactactccccatatctaacaacgtaaaaataaaatgacagtttgaacatacaaaacccaccccattcctccccacactcatcgcccttaccacgctactcctacctatctccccttttatactaataatcttatagaaatttaggttaaatacagaccaagagccttcaaagccctcagtaagttgcaatacttaatttctgtaacagctaaggactgcaaaaccccactctgcatcaactgaacgcaaatcagccactttaattaagctaagcccttactagaccaatgggacttaaacccacaaacacttagttaacagctaagcaccctaatcaactggcttcaatctacttctcccgccgccgggaaaaaaggcgggagaagccccggcaggtttgaagctgcttcttcgaatttgcaattcaatatgaaaatcacctcggagctggtaaaaagaggcctaacccctgtctttagatttacagtccaatgcttcactcagccattttacctcacccccactgatgttcgccgaccgttgactattctctacaaaccacaaagacattggaacactatacctattattcggcgcatgagctggagtcctaggcacagctctaagcctccttattcgagccgagctgggccagccaggcaaccttctaggtaacgaccacatctacaacgttatcgtcacagcccatgcatttgtaataatcttcttcatagtaatacccatcataatcggaggctttggcaactgactagttcccctaataatcggtgcccccgatatggcgtttccccgcataaacaacataagcttctgactcttacctccctctctcctactcctgctcgcatctgctatagtggaggccggagcaggaacaggttgaacagtctaccctcccttagcagggaactactcccaccctggagcctccgtagacctaaccatcttctccttacacctagcaggtgtctcctctatcttaggggccatcaatttcatcacaacaattatcaatataaaaccccctgccataacccaataccaaacgcccctcttcgtctgatccgtcctaatcacagcagtcctacttctcctatctctcccagtcctagctgctggcatcactatactactaacagaccgcaacctcaacaccaccttcttcgaccccgccggaggaggagaccccattctataccaacacctattctgatttttcggtcaccctgaagtttatattcttatcctaccaggcttcggaataatctcccatattgtaacttactactccggaaaaaaagaaccatttggatacataggtatggtctgagctatgatatcaattggcttcctagggtttatcgtgtgagcacaccatatatttacagtaggaatagacgtagacacacgagcatatttcacctccgctaccataatcatcgctatccccaccggcgtcaaagtatttagctgactcgccacactccacggaagcaatatgaaatgatctgctgcagtgctctgagccctaggattcatctttcttttcaccgtaggtggcctgactggcattgtattagcaaactcatcactagacatcgtactacacgacacgtactacgttgtagctcacttccactatgtcctatcaataggagctgtatttgccatcataggaggcttcattcactgatttcccctattctcaggctacaccctagaccaaacctacgccaaaatccatttcactatcatattcatcggcgtaaatctaaccttcttcccacaacactttctcggcctatccggaatgccccgacgttactcggactaccccgatgcatacaccacatgaaatatcctatcatctgtaggttcattcatttctctaacagcagtaatattaataattttcatgatttgagaagccttcgcttcgaagcgaaaagtcctaatagtagaagaaccctccataaacctggagtgactatatggatgccccccaccctaccacacattcgaagaacccgtatacataaaatctagacaaaaaaggaaggaatcgaaccccccaaagctggtttcaagccaaccccatggcctccatgactttttcaaaaagatattagaaaaaccatttcataactttgtcaaagttaaattataggctaaatcctatatatcttaatggcacatgcagcgcaagtaggtctacaagacgctacttcccctatcatagaagagcttatcacctttcatgatcacgccctcataatcattttccttatctgcttcctagtcctgtatgcccttttcctaacactcacaacaaaactaactaatactaacatctcagacgctcaggaaatagagaccgtctgaactatcctgcccgccatcatcctagtcctcatcgccctcccatccctacgcatcctttacataacagacgaggtcaacgatccctcccttaccatcaaatcaattggccaccaatggtactgaacctacgagtacaccgactacggcggactaatcttcaactcctacatacttcccccattattcctagaaccaggcgacctgcgactccttgacgttgacaatcgagtagtactcccgattgaagcccccattcgtataataattacatcacaagacgtcttgcactcatgagctgtccccacattaggcttaaaaacagatgcaattcccggacgtctaaaccaaaccactttcaccgctacacgaccgggggtatactacggtcaatgctctgaaatctgtggagcaaaccacagtttcatacccatcgtcctagaattaattcccctaaaaatctttgaaatagggcccgtatttaccctatagcaccccctctaccccctctagagcccactgtaaagctaacttagcattaaccttttaagttaaagattaagagaaccaacacctctttacagtgaaatgccccaactaaatactaccgtatggcccaccataattacccccatactccttacactattcctcatcacccaactaaaaatattaaacacaaactaccacctacctccctcaccaaagcccataaaaataaaaaattataacaaaccctgagaaccaaaatgaacgaaaatctgttcgcttcattcattgcccccacaatcctaggcctacccgccgcagtactgatcattctatttccccctctattgatccccacctccaaatatctcatcaacaaccgactaatcaccacccaacaatgactaatcaaactaacctcaaaacaaatgatagccatacacaacactaaaggacgaacctgatctcttatactagtatccttaatcatttttattgccacaactaacctcctcggactcctgcctcactcatttacaccaaccacccaactatctataaacctagccatggccatccccttatgagcgggcgcagtgattataggctttcgctctaagattaaaaatgccctagcccacttcttaccacaaggcacacctacaccccttatccccatactagttattatcgaaaccatcagcctactcattcaaccaatagccctggccgtacgcctaaccgctaacattactgcaggccacctactcatgcacctaattggaagcgccaccctagcaatatcaaccattaaccttccctctacacttatcatcttcacaattctaattctactgactatcctagaaatcgctgtcgccttaatccaagcctacgttttcacacttctagtaagcctctacctgcacgacaacacataatgacccaccaatcgcatgcctatcatatagtaaaacccagcccatgacccctaacaggggccctctcagccctcctaatgacctccggcctagccatgtgatttcacttccactccataacgctcctcatactaggcctactaaccaacacactaaccatataccaatgatggcgcgatgtaacacgagaaagcacataccaaggccaccacacaccacctgtccaaaaaggccttcgatacgggataatcctatttattacctcagaagtttttttcttcgcaggatttttctgagccttttaccactccagcctagcccctaccccccaactaggagggcactggcccccaacaggcatcaccccgctaaatcccctagaagtcccactcctaaacacatccgtattactcgcatcaggagtatcaatcacctgagctcaccatagtctaatagaaaacaaccgaaaccaaataattcaagcactgcttattacaattttactgggtctctattttaccctcctacaagcctcagagtacttcgagtctcccttcaccatttccgacggcatctacggctcaacattttttgtagccacaggcttccacggacttcacgtcattattggctcaactttcctcactatctgcttcatccgccaactaatatttcactttacatccaaacatcactttggcttcgaagccgccgcctgatactggcattttgtagatgtggtttgactatttctgtatgtctccatctattgatgagggtcttactcttttagtataaatagtaccgttaacttccaattaactagttttgacaacattcaaaaaagagtaataaacttcgccttaattttaataatcaacaccctcctagccttactactaataatcattacattttgactaccacaactcaacggctacatagaaaaatccaccccttacgagtgcggcttcgaccctatatcccccgcccgcgtccctttctccataaaattcttcttagtagctattaccttcttattatttgatctagaaattgccctccttttacccctaccatgagccctacaaacaactaacctgccactaatagttatgtcatccctcttattaatcatcatcctagccctaagtctggcctatgagtgactacaaaaaggattagactgagccgaattggtatatagtttaaacaaaacgaatgatttcgactcattaaattatgataatcatatttaccaaatgcccctcatttacataaatattatactagcatttaccatctcacttctaggaatactagtatatcgctcacacctcatatcctccctactatgcctagaaggaataatactatcgctgttcattatagctactctcataaccctcaacacccactccctcttagccaatattgtgcctattgccatactagtctttgccgcctgcgaagcagcggtgggcctagccctactagtctcaatctccaacacatatggcctagactacgtacataacctaaacctactccaatgctaaaactaatcgtcccaacaattatattactaccactgacatgactttccaaaaaacacataatttgaatcaacacaaccacccacagcctaattattagcatcatccccctactattttttaaccaaatcaacaacaacctatttagctgttccccaaccttttcctccgaccccctaacaacccccctcctaatactaactacctgactcctacccctcacaatcatggcaagccaacgccacttatccagtgaaccactatcacgaaaaaaactctacctctctatactaatctccctacaaatctccttaattataacattcacagccacagaactaatcatattttatatcttcttcgaaaccacacttatccccaccttggctatcatcacccgatgaggcaaccagccagaacgcctgaacgcaggcacatacttcctattctacaccctagtaggctcccttcccctactcatcgcactaatttacactcacaacaccctaggctcactaaacattctactactcactctcactgcccaagaactatcaaactcctgagccaacaacttaatatgactagcttacacaatagcttttatagtaaagatacctctttacggactccacttatgactccctaaagcccatgtcgaagcccccatcgctgggtcaatagtacttgccgcagtactcttaaaactaggcggctatggtataatacgcctcacactcattctcaaccccctgacaaaacacatagcctaccccttccttgtactatccctatgaggcataattataacaagctccatctgcctacgacaaacagacctaaaatcgctcattgcatactcttcaatcagccacatagccctcgtagtaacagccattctcatccaaaccccctgaagcttcaccggcgcagtcattctcataatcgcccacggacttacatcctcattactattctgcctagcaaactcaaactacgaacgcactcacagtcgcatcataatcctctctcaaggacttcaaactctactcccactaatagctttttgatgacttctagcaagcctcgctaacctcgccttaccccccactattaacctactgggagaactctctgtgctagtaaccacattctcctgatcaaatatcactctcctactcacaggactcaacatactagtcacagccctatactccctctacatatttaccacaacacaatggggctcactcacccaccacattaacaacataaaaccctcattcacacgagaaaacaccctcatgttcatacacctatcccccattctcctcctatccctcaaccccgacatcattaccgggttttcctcttgtaaatatagtttaaccaaaacatcagattgtgaatctgacaacagaggcttacgaccccttatttaccgagaaagctcacaagaactgctaactcatgcccccatgtctaacaacatggctttctcaacttttaaaggataacagctatccattggtcttaggccccaaaaattttggtgcaactccaaataaaagtaataaccatgcacactactataaccaccctaaccctgacttccctaattccccccatccttaccaccctcgttaaccctaacaaaaaaaactcatacccccattatgtaaaatccattgtcgcatccacctttattatcagtctcttccccacaacaatattcatgtgcctagaccaagaagttattatctcgaactgacactgagccacaacccaaacaacccagctctccctaagcttcaaactagactacttctccataatattcatccctgtagcattgttcgttacatggtccatcatagaattctcactgtgatatataaactcagacccaaacattaatcagttcttcaagtatctactcattttcctaattaccatactaatcttagttaccgctaacaacctattccaactgttcatcggctgagagggcgtaggaattatatccttcttgctcatcagttgatgatacgcccgagcagatgccaacacagcagccattcaagcaatcctatacaaccgtatcggcgatatcggtttcatcctcgccttagcatgatttatcctacactccaactcatgagacccacaacaaatagcccttctaaacgctaatccaagcctcaccccactactaggcctcctcctagcagcagcaggcaaatcagcccaattaggtctccacccctgactcccctcagccatagaaggccccaccccagtctcagccctactccactcaagcactatagttgtagcaggaatcttcttactcatccgcttccaccccctagcagaaaatagcccactaatccaaactctaacactatgcttaggcgctatcaccactctgttcgcagcagtctgcgcccttacacaaaatgacatcaaaaaaatcgtagccttctccacttcaagtcaactaggactcataatagttacaatcggcatcaaccaaccacacctagcattcctgcacatctgtacccacgccttcttcaaagccatactatttatgtgctccgggtccatcatccacaaccttaacaatgaacaagatattcgaaaaataggaggactactcaaaaccatacctctcacttcaacctccctcaccattggcagcctagcattagcaggaatacctttcctcacaggtttctactccaaagaccacatcatcgaaaccgcaaacatatcatacacaaacgcctgagccctatctattactctcatcgctacctccctaacaagcgcctatagcactcgaataattcttctcaccctaacaggtcaacctcgcttccctacccttactaacattaacgaaaataaccccaccctactaaaccccattaaacgcctggcagccggaagcctattcgcaggatttctcattactaacaacatttcccccgcatcccccttccaaacaacaatccccctctacctaaaactcacggccctcgctgtcactttcctaggacttctaacagccctagacctcaactacctaaccaacaaacttaaaataaaatccccactatgcacattttatttctccaacatactcggattctaccctagcatcacacaccgcacaatcccctatctaggccttcttacgagccaaaacctgcccctactcctcctagacctaacctgactagaaaagctattacctaaaacaatttcacagcaccaaatctccacctccatcatcacctcaacccaaaaaggcataattaaactttacttcctctctttcttcttcccactcatcctaaccctactcctaatcacataacctattcccccgagcaatctcaattacaatatatacaccaacaaacaatgttcaaccagtaactactactaatcaacgcccataatcatacaaagcccccgcaccaataggatcctcccgaatcaaccctgacccctctccttcataaattattcagcttcctacactattaaagtttaccacaaccaccaccccatcatactctttcacccacagcaccaatcctacctccatcgctaaccccactaaaacactcaccaagacctcaacccctgacccccatgcctcaggatactcctcaatagccatcgctgtagtatatccaaagacaaccatcattccccctaaataaattaaaaaaactattaaacccatataacctcccccaaaattcagaataataacacacccgaccacgccgctaacaatcaatactaaacccccataaataggagaaggcttagaagaaaaccccacaaaccccattactaaacccacactcaacagaaacaaagcatacatcattattctcgcacggactacaaccacgaccaatgatatgaaaaaccatcgttgtatttcaactacaagaacaccaatgaccccaatacgcaaaattaaccccctaataaaattaattaaccactcattcatcgacctccccaccccatccaacatctccgcatgatgaaacttcggctcactccttggcgcctgcctgatcctccaaatcaccacaggactattcctagccatgcactactcaccagacgcctcaaccgccttttcatcaatcgcccacatcactcgagacgtaaattatggctgaatcatccgctaccttcacgccaatggcgcctcaatattctttatctgcctcttcctacacatcgggcgaggcctatattacggatcatttctctactcagaaacctgaaacatcggcattatcctcctgcttgcaactatagcaacagccttcataggctatgtcctcccgtgaggccaaatatcattctgaggggccacagtaattacaaacttactatccgccatcccatacattgggacagacctagtccaatgaatctgaggaggctactcagtagacagtcccaccctcacacgattctttacctttcacttcatcttacccttcattattgcagccctagcagcactccacctcctattcttgcacgaaacgggatcaaacaaccccctaggaatcacctcccattccgataaaatcaccttccacccttactacacaatcaaagacgccctcggcttacttctcttccttctctccttaatgacattaacactattctcaccagacctcctaggcgacccagacaattataccctagccaaccccttaaacacccctccccacatcaagcccgaatgatatttcctattcgcctacacaattctccgatccgtccctaacaaactaggaggcgtccttgccctattactatccatcctcatcctagcaataatccccatcctccatatatccaaacaacaaagcataatatttcgcccactaagccaatcactttattgactcctagccgcagacctcctcattctaacctgaatcggaggacaaccagtaagctacccctttaccatcattggacaagtagcatccgtactatacttcacaacaatcctaatcctaataccaactatctccctaattgaaaacaaaatactcaaatgggcctgtccttgtagtataaactaatacaccagtcttgtaaaccggagatgaaaacctttttccaaggacaaatcagagaaaaagtctttaactccaccattagcacccaaagctaagattctaatttaaactattctctgttctttcatggggaagcagatttgggtaccacccaagtattgactcacccatcaacaaccgctatgtatttcgtacattactgccagccaccatgaatattgtacggtaccataaatacttgaccacctgtagtacataaaaacccaatccacatcaaaacccccccctcatgcttacaagcaagtacagcaatcaaccttcaactatcacacatcaactgcaactccaaagccacccctcacccactaggatatcaacaaacctacccatccttaacagtacatagtacataaagccatttaccgtacatagcacattacagtcaaatcccttctcgcccccatggatgacccccctcagataggagtcccttgaccaccatcctccgtgaaatcaatatcccgcacaagagtgctactctcctcgctccgggcccataacacttgggggtagctaaagtgaactgtatccgacatctggttcctacttcagggtcataaagcctaaatagcccacacgttccccttaaataagacatcacgatg

SEQ ID NO: 390 - DNA, 16572 bp, Homo sapiens mitochondrial
  3110: "n" refers to a nucleotide at position 3107 of the Cambridge Reference Sequence (CRS, Anderson et al. 1981 Nature 290:457-465), later determined to be absent from the human mtDNA sequence according to the revised CRS (rCRS, Andrews et al. 1999 Nature Genetics 23:147); "n" therefore represents a single nucleotide deletion at a position corresponding to nucleotide 3107 of SEQ ID NO:1 as provided herein.
gatcacaggtctatcaccctattaaccactcacgggagctctccatgcatttggtattttcgtctggggggtgtgcacgcgatagcattgcgagacgctggagccggagcaccctatgtcgcagtatctgtctttgattcctaccccatcccattatttatcgcacctacgttcaatattacaggcgaacatacctactaaagtgtgttaattaattaatgcttgtaggacataataataacaattgaatgtctgcacagccgctttccacacagacatcataacaaaaaatttccaccaaaccccccctccccccccgcttctggccacagcacttaaacacatctctgccaaaccccaaaaacaaagaaccctaacaccagcctaaccagatttcaaattttatcttttggcggtatgcacttttaacagtcaccccccaactaacacattattttcccctcccactcccatactactaatctcatcaatacaacccccgcccatcctacccagcacacacacaccgctgctaaccccataccccgaaccaaccaaaccccaaagacaccccccacagtttatgtagcttacctcctcaaagcaatacactgaaaatgtttagacgggctcacatcaccccataaacaaataggtttggtcctagcctttctattagctcttagtaagattacacatgcaagcatccccgttccagtgagttcaccctctaaatcaccacgatcaaaagggacaagcatcaagcacgcaacaatgcagctcaaaacgcttagcctagccacacccccacgggaaacagcagtgattaacctttagcaataaacgaaagtttaactaagctatactaaccccagggttggtcaatttcgtgccagccaccgcggtcacacgattaacccaagtcaatagaagccggcgtaaagagtgttttagatcaccccctccccaataaagctaaaactcacctgagttgtaaaaaactccagttgacacaaaataaactacgaaagtggctttaacatatctgaacacacaatagctaagacccaaactgggattagataccccactatgcttagccctaaacctcaacagttaaatcaacaaaactgctcgccagaacactacgagccacagcttaaaactcaaaggacctggcggtgcttcatatccctctagaggagcctgttctgtaatcgataaaccccgatcaacctcaccacctcttgctcagcctatataccgccatcttcagcaaaccctaatgaaggctacaaagtaagcgcaagtacccacgtaaagacgttaggtcaaggtgtagcccatgaggtggcaagaaatgggctacattttctaccccagaaaactacgatagcccttatgaaacttaagggtcgaaggtggatttagcagtaaactgagagtagagtgcttagttgaacagggccctgaagcgcgtacacaccgcccgtcaccctcctcaagtatacttcaaaggacatttaactaaaacccctacgcatttatatagaggagacaagtcgtaacatggtaagtgtactggaaagtgcacttggacgaaccagagtgtagcttaacacaaagcacccaacttacacttaggagatttcaacttaacttgaccgctctgagctaaacctagccccaaacccactccaccttactaccagacaaccttagccaaaccatttacccaaataaagtataggcgatagaaattgaaacctggcgcaatagatatagtaccgcaagggaaagatgaaaaattataaccaagcataatatagcaaggactaacccctataccttctgcataatgaattaactagaaataactttgcaaggagagccaaagctaagacccccgaaaccagacgagctacctaagaacagctaaaagagcacacccgtctatgtagcaaaatagtgggaagatttataggtagaggcgacaaacctaccgagcctggtgatagctggttgtccaagatagaatcttagttcaactttaaatttgcccacagaaccctctaaatccccttgtaaatttaactgttagtccaaagaggaacagctctttggacactaggaaaaaaccttgtagagagagtaaaaaatttaacacccatagtaggcctaaaagcagccaccaattaagaaagcgttcaagctcaacacccactacctaaaaaatcccaaacatataactgaactcctcacacccaattggaccaatctatcaccctatagaagaactaatgttagtataagtaacatgaaaacattctcctccgcataagcctgcgtcagattaaaacactgaactgacaattaacagcccaatatctacaatcaaccaacaagtcattattacccccactgtcaacccaacacaggcatgctcataaggaaaggttaaaaaaagtaaaaggaactcggcaaatcttaccccgcctgtttaccaaaaacatcacctctagcatcaccagtattagaggcaccgcctgcccagtgacacatgtttaacggccgcggtaccctaaccgtgcaaaggtagcataatcacttgttccttaaatagggacctgtatgaatggctccacgagggttcagctgtctcttacttttaaccagtgaaattgacctgcccgtgaagaggcgggcatgacacagcaagacgagaagaccctatggagctttaatttattaatgcaaacagtacctaacaaacccacaggtcctaaactactaaacctgcattaaaaatttcggttggggcgacctcggagcagaacccaacctccgagcagtacatgctaagacttcaccagtcaaagcgaactactatactcaattgatccaataacttgaccaacggaacaagttaccctagggataacagcgcaatcctattctagagtccatatcaacaatagggtttacgacctcgatgttggatcaggacatcccgatggtgcagccgctattaaaggttcgtttgttcaacgattaaagtcctacgtgatctgagttcagaccggagtaatccaggtcggtttctatctacnttcaaattcctccctgtacgaaaggacaagagaaataaggcctacttcacaaagcgccttcccccgtaaatgatatcatctcaacttagtattatacccacacccacccaagaacagggtttgttaagatggcagagcccggtaatcgcataaaacttaaaactttacagtcagaggttcaattcctcttcttaacaacatacccatggccaacctcctactcctcattgtacccattctaatcgcaatggcattcctaatgcttaccgaacgaaaaattctaggctatatacaactacgcaaaggccccaacgttgtaggcccctacgggctactacaacccttcgctgacgccataaaactcttcaccaaagagcccctaaaaccagccacatctaccatcaccctctacatcaccgccccgaccttagctctcaccatcgctcttctactatgaacccccctccccatacccaaccccctggttaacctcaacctaggcctcctatttattctagccacctctagcctagccgtttactcaatcctctgatcagggtgagcatcaaactcaaactacgccctgatcggcgcactgcgagcagtagcccaaacaatctcatatgaagtcaccctagccatcattctactatcaacattactaataagtggctcctttaacctctccacccttatcacaacacaagaacacctctgattactcctgccatcatgacccttggccataatatgatttatctccacactagcagagaccaaccgaacccccttcgaccttgccgaaggggagtccgaactagtctcaggcttcaacatcgaatacgccgcaggccccttcgccctattcttcatagccgaatacacaaacattattataataaacaccctcaccactacaatcttcctaggaacaacatatgacgcactctcccctgaactctacacaacatattttgtcaccaagaccctacttctgacctccctgttcttatgaattcgaacagcatacccccgattccgctacgaccaactcatacacctcctatgaaaaaacttcctaccactcaccctagcattacttatatgatatgtctccatacccattacaatctccagcattccccctcaaacctaagaaatatgtctgataaaagagttactttgatagagtaaataataggagcttaaacccccttatttctaggactatgagaatcgaacccatccctgagaatccaaaattctccgtgccacctatcacaccccatcctaaagtaaggtcagctaaataagctatcgggcccataccccgaaaatgttggttatacccttcccgtactaattaatcccctggcccaacccgtcatctactctaccatctttgcaggcacactcatcacagcgctaagctcgcactgattttttacctgagtaggcctagaaataaacatgctagcttttattccagttctaaccaaaaaaataaaccctcgttccacagaagctgccatcaagtatttcctcacgcaagcaaccgcatccataatccttctaatagctatcctcttcaacaatatactctccggacaatgaaccataaccaatactaccaatcaatactcatcattaataatcataatggctatagcaataaaactaggaatagccccctttcacttctgagtcccagaggttacccaaggcacccctctgacatccggcctgcttcttctcacatgacaaaaactagcccccatctcaatcatataccaaatctctccctcactaaacgtaagccttctcctcactctctcaatcttatccatcatagcaggcagttgaggtggattaaaccaaacccagctacgcaaaatcttagcatactcctcaattacccacataggatgaataatagcagttctaccgtacaaccctaacataaccattcttaatttaactatttatattatcctaactactaccgcattcctactactcaacttaaactccagcaccacgaccctactactatctcgcacctgaaacaagctaacatgactaacacccttaattccatccaccctcctctccctaggaggcctgcccccgctaaccggctttttgcccaaatgggccattatcgaagaattcacaaaaaacaatagcctcatcatccccaccatcatagccaccatcaccctccttaacctctacttctacctacgcctaatctactccacctcaatcacactactccccatatctaacaacgtaaaaataaaatgacagtttgaacatacaaaacccaccccattcctccccacactcatcgcccttaccacgctactcctacctatctccccttttatactaataatcttatagaaatttaggttaaatacagaccaagagccttcaaagccctcagtaagttgcaatacttaatttctgtaacagctaaggactgcaaaaccccactctgcatcaactgaacgcaaatcagccactttaattaagctaagcccttactagaccaatgggacttaaacccacaaacacttagttaacagctaagcaccctaatcaactggcttcaatctacttctcccgccgccgggaaaaaaggcgggagaagccccggcaggtttgaagctgcttcttcgaatttgcaattcaatatgaaaatcacctcggagctggtaaaaagaggcctaacccctgtctttagatttacagtccaatgcttcactcagccattttacctcacccccactgatgttcgccgaccgttgactattctctacaaaccacaaagacattggaacactatacctattattcggcgcatgagctggagtcctaggcacagctctaagcctccttattcgagccgagctgggccagccaggcaaccttctaggtaacgaccacatctacaacgttatcgtcacagcccatgcatttgtaataatcttcttcatagtaatacccatcataatcggaggctttggcaactgactagttcccctaataatcggtgcccccgatatggcgtttccccgcataaacaacataagcttctgactcttacctccctctctcctactcctgctcgcatctgctatagtggaggccggagcaggaacaggttgaacagtctaccctcccttagcagggaactactcccaccctggagcctccgtagacctaaccatcttctccttacacctagcaggtgtctcctctatcttaggggccatcaatttcatcacaacaattatcaatataaaaccccctgccataacccaataccaaacgcccctcttcgtctgatccgtcctaatcacagcagtcctacttctcctatctctcccagtcctagctgctggcatcactatactactaacagaccgcaacctcaacaccaccttcttcgaccccgccggaggaggagaccccattctataccaacacctattctgatttttcggtcaccctgaagtttatattcttatcctaccaggcttcggaataatctcccatattgtaacttactactccggaaaaaaagaaccatttggatacataggtatggtctgagctatgatatcaattggcttcctagggtttatcgtgtgagcacaccatatatttacagtaggaatagacgtagacacacgagcatatttcacctccgctaccataatcatcgctatccccaccggcgtcaaagtatttagctgactcgccacactccacggaagcaatatgaaatgatctgctgcagtgctctgagccctaggattcatctttcttttcaccgtaggtggcctgactggcattgtattagcaaactcatcactagacatcgtactacacgacacgtactacgttgtagctcacttccactatgtcctatcaataggagctgtatttgccatcataggaggcttcattcactgatttcccctattctcaggctacaccctagaccaaacctacgccaaaatccatttcactatcatattcatcggcgtaaatctaaccttcttcccacaacactttctcggcctatccggaatgccccgacgttactcggactaccccgatgcatacaccacatgaaatatcctatcatctgtaggttcattcatttctctaacagcagtaatattaataattttcatgatttgagaagccttcgcttcgaagcgaaaagtcctaatagtagaagaaccctccataaacctggagtgactatatggatgccccccaccctaccacacattcgaagaacccgtatacataaaatctagacaaaaaaggaaggaatcgaaccccccaaagctggtttcaagccaaccccatggcctccatgactttttcaaaaagatattagaaaaaccatttcataactttgtcaaagttaaattataggctaaatcctatatatcttaatggcacatgcagcgcaagtaggtctacaagacgctacttcccctatcatagaagagcttatcacctttcatgatcacgccctcataatcattttccttatctgcttcctagtcctgtatgcccttttcctaacactcacaacaaaactaactaatactaacatctcagacgctcaggaaatagagaccgtctgaactatcctgcccgccatcatcctagtcctcatcgccctcccatccctacgcatcctttacataacagacgaggtcaacgatccctcccttaccatcaaatcaattggccaccaatggtactgaacctacgagtacaccgactacggcggactaatcttcaactcctacatacttcccccattattcctagaaccaggcgacctgcgactccttgacgttgacaatcgagtagtactcccgattgaagcccccattcgtataataattacatcacaagacgtcttgcactcatgagctgtccccacattaggcttaaaaacagatgcaattcccggacgtctaaaccaaaccactttcaccgctacacgaccgggggtatactacggtcaatgctctgaaatctgtggagcaaaccacagtttcatacccatcgtcctagaattaattcccctaaaaatctttgaaatagggcccgtatttaccctatagcaccccctctaccccctctagagcccactgtaaagctaacttagcattaaccttttaagttaaagattaagagaaccaacacctctttacagtgaaatgccccaactaaatactaccgtatggcccaccataattacccccatactccttacactattcctcatcacccaactaaaaatattaaacacaaactaccacctacctccctcaccaaagcccataaaaataaaaaattataacaaaccctgagaaccaaaatgaacgaaaatctgttcgcttcattcattgcccccacaatcctaggcctacccgccgcagtactgatcattctatttccccctctattgatccccacctccaaatatctcatcaacaaccgactaatcaccacccaacaatgactaatcaaactaacctcaaaacaaatgatagccatacacaacactaaaggacgaacctgatctcttatactagtatccttaatcatttttattgccacaactaacctcctcggactcctacctcactcatttacaccaaccacccaactatctataaacctagccatggccatccccttatgagcgggcgcagtgattataggctttcgctctaagattaaaaatgccctagcccacttcttaccacaaggcacacctacaccccttatccccatactagttattatcgaaaccatcagcctactcattcaaccaatagccctggccgtacgcctaaccgctaacattactgcaggccacctactcatgcacctaattggaagcgccaccctagcaatatcaaccattaaccttccctctacacttatcatcttcacaattctaattctactgactatcctagaaatcgctgtcgccttaatccaagcctacgttttcacacttctagtaagcctctacctgcacgacaacacataatgacccaccaatcgcatgcctatcatatagtaaaacccagcccatgacccctaacaggggccctctcagccctcctaatgacctccggcctagccatgtgatttcacttccactccataacgctcctcatactaggcctactaaccaacacactaaccatataccaatgatggcgcgatgtaacacgagaaagcacataccaaggccaccacacaccacctgtccaaaaaggccttcgatacgggataatcctatttattacctcagaagtttttttcttcgcaggatttttctgagccttttaccactccagcctagcccctaccccccaactaggagggcactggcccccaacaggcatcaccccgctaaatcccctagaagtcccactcctaaacacatccgtattactcgcatcaggagtatcaatcacctgagctcaccatagtctaatagaaaacaaccgaaaccaaataattcaagcactgcttattacaattttactgggtctctattttaccctcctacaagcctcagagtacttcgagtctcccttcaccatttccgacggcatctacggctcaacattttttgtagccacaggcttccacggacttcacgtcattattggctcaactttcctcactatctgcttcatccgccaactaatatttcactttacatccaaacatcactttggcttcgaagccgccgcctgatactggcattttgtagatgtggtttgactatttctgtatgtctccatctattgatgagggtcttactcttttagtataaatagtaccgttaacttccaattaactagttttgacaacattcaaaaaagagtaataaacttcgccttaattttaataatcaacaccctcctagccttactactaataatcattacattttgactaccacaactcaacggctacatagaaaaatccaccccttacgagtgcggcttcgaccctatatcccccgcccgcgtccctttctccataaaattcttcttagtagctattaccttcttattatttgatctagaaattgccctccttttacccctaccatgagccctacaaacaactaacctgccactaatagttatgtcatccctcttattaatcatcatcctagccctaagtctggcctatgagtgactacaaaaaggattagactgagccgaattggtatatagtttaaacaaaacgaatgatttcgactcattaaattatgataatcatatttaccaaatgcccctcatttacataaatattatactagcatttaccatctcacttctaggaatactagtatatcgctcacacctcatatcctccctactatgcctagaaggaataatactatcgctgttcattatagctactctcataaccctcaacacccactccctcttagccaatattgtgcctattgccatactagtctttgccgcctgcgaagcagcggtgggcctagccctactagtctcaatctccaacacatatggcctagactacgtacataacctaaacctactccaatgctaaaactaatcgtcccaacaattatattactaccactgacatgactttccaaaaaacacataatttgaatcaacacaaccacccacagcctaattattagcatcatccccctactattttttaaccaaatcaacaacaacctatttagctgttccccaaccttttcctccgaccccctaacaacccccctcctaatactaactacctgactcctacccctcacaatcatggcaagccaacgccacttatccagtgaaccactatcacgaaaaaaactctacctctctatactaatctccctacaaatctccttaattataacattcacagccacagaactaatcatattttatatcttcttcgaaaccacacttatccccaccttggctatcatcacccgatgaggcaaccagccagaacgcctgaacgcaggcacatacttcctattctacaccctagtaggctcccttcccctactcatcgcactaatttacactcacaacaccctaggctcactaaacattctactactcactctcactgcccaagaactatcaaactcctgagccaacaacttaatatgactagcttacacaatagcttttatagtaaagatacctctttacggactccacttatgactccctaaagcccatgtcgaagcccccatcgctgggtcaatagtacttgccgcagtactcttaaaactaggcggctatggtataatacgcctcacactcattctcaaccccctgacaaaacacatagcctaccccttccttgtactatccctatgaggcataattataacaagctccatctgcctacgacaaacagacctaaaatcgctcattgcatactcttcaatcagccacatagccctcgtagtaacagccattctcatccaaaccccctgaagcttcaccggcgcagtcattctcataatcgcccacggacttacatcctcattactattctgcctagcaaactcaaactacgaacgcactcacagtcgcatcataatcctctctcaaggacttcaaactctactcccactaatagctttttgatgacttctagcaagcctcgctaacctcgccttaccccccactattaacctactgggagaactctctgtgctagtaaccacattctcctgatcaaatatcactctcctactcacaggactcaacatactagtcacagccctatactccctctacatatttaccacaacacaatggggctcactcacccaccacattaacaacataaaaccctcattcacacgagaaaacaccctcatgttcatacacctatcccccattctcctcctatccctcaaccccgacatcattaccgggttttcctcttgtaaatatagtttaaccaaaacatcagattgtgaatctgacaacagaggcttacgaccccttatttaccgagaaagctcacaagaactgctaactcatgcccccatgtctaacaacatggctttctcaacttttaaaggataacagctatccattggtcttaggccccaaaaattttggtgcaactccaaataaaagtaataaccatgcacactactataaccaccctaaccctgacttccctaattccccccatccttaccaccctcgttaaccctaacaaaaaaaactcatacccccattatgtaaaatccattgtcgcatccacctttattatcagtctcttccccacaacaatattcatgtgcctagaccaagaagttattatctcgaactgacactgagccacaacccaaacaacccagctctccctaagcttcaaactagactacttctccataatattcatccctgtagcattgttcgttacatgatccatcatagaattctcactgtgatatataaactcagacccaaacattaatcagttcttcaagtatctactcattttcctaattaccatactaatcttagttaccgctaacaacctattccaactgttcatcggctgagagggcgtaggaattatatccttcttgctcatcagttgatgatacgcccgagcagatgccaacacagcagccattcaagcaatcctatacaaccgtatcggcgatatcggtttcatcctcgccttagcatgatttatcctacactccaactcatgagacccacaacaaatagcccttctaaacgctaatccaagcctcaccccactactaggcctcctcctagcagcagcaggcaaatcagcccaattaggtctccacccctgactcccctcagccatagaaggccccaccccagtctcagccctactccactcaagcactatagttgtagcaggaatcttcttactcatccgcttccaccccctagcagaaaatagcccactaatccaaactctaacactatgcttaggcgctatcaccactctgttcgcagcagtctgcgcccttacacaaaatgacatcaaaaaaatcgtagccttctccacttcaagtcaactaggactcataatagttacaatcggcatcaaccaaccacacctagcattcctgcacatctgtacccacgccttcttcaaagccatactatttatgtgctccgggtccatcatccacaaccttaacaatgaacaagatattcgaaaaataggaggactactcaaaaccatacctctcacttcaacctccctcaccattggcagcctagcattagcaggaatacctttcctcacaggtttctactccaaagaccacatcatcgaaaccgcaaacatatcatacacaaacgcctgagccctatctattactctcatcgctacctccctaacaagcgcctatagcactcgaataattcttctcaccctaacaggtcaacctcgcttccctacccttactaacattaacgaaaataaccccaccctactaaaccccattaaacgcctggcagccggaagcctattcgcaggatttctcattactaacaacatttcccccgcatcccccttccaaacaacaatccccctctacctaaaactcacggccctcactgtcactttcctaggacttctaacagccctagacctcaactacctaaccaacaaacttaaaataaaatccccactatgcacattttatttctccaacatactcggattctaccctagcatcacacaccgcacaatcccctatctaggccttcttacgagccaaaacctgcccctactcctcctagacctaacctgactagaaaagctattacctaaaacaatttcacagcaccaaatctccacctccatcatcacctcaacccaaaaaggcataattaaactttacttcctctctttcttcttcccactcatcctaaccctactcctaatcacataacctattcccccgagcaatctcaattacaatatatacaccaacaaacaatgttcaaccagtaactactactaatcaacgcccataatcatacaaagcccccgcaccaataggatcctcccgaatcaaccctgacccctctccttcataaattattcagcttcctacactattaaagtttaccacaaccaccaccccatcatactctttcacccacagcaccaatcctacctccatcgctaaccccactaaaacactcaccaagacctcaacccctgacccccatgcctcaggatactcctcaatagccatcgctgtagtatatccaaagacaaccatcattccccctaaataaattaaaaaaactattaaacccatataacctcccccaaaattcagaataataacacacccgaccacgccgctaacaatcaatactaaacccccataaataggagaaggcttagaagaaaaccccacaaaccccattactaaacccacactcaacagaaacaaagcatacatcattattctcgcacggactacaaccacgaccaatgatatgaaaaaccatcgttgtatttcaactacaagaacaccaatgaccccaatacgcaaaattaaccccctaataaaattaattaaccactcattcatcgacctccccaccccatccaacatctccgcatgatgaaacttcggctcactccttggcgcctgcctgatcctccaaatcaccacaggactattcctagccatgcactactcaccagacgcctcaaccgccttttcatcaatcgcccacatcactcgagacgtaaattatggctgaatcatccgctaccttcacgccaatggcgcctcaatattctttatctgcctcttcctacacatcgggcgaggcctatattacggatcatttctctactcagaaacctgaaacatcggcattatcctcctgcttgcaactatagcaacagccttcataggctatgtcctcccgtgaggccaaatatcattctgaggggccacagtaattacaaacttactatccgccatcccatacattgggacagacctagttcaatgaatctgaggaggctactcagtagacagtcccaccctcacacgattctttacctttcacttcatcttacccttcattattgcagccctagcagcactccacctcctattcttgcacgaaacgggatcaaacaaccccctaggaatcacctcccattccgataaaatcaccttccacccttactacacaatcaaagacgccctcggcttacttctcttccttctctccttaatgacattaacactattctcaccagacctcctaggcgacccagacaattataccctagccaaccccttaaacacccctccccacatcaagcccgaatgatatttcctattcgcctacacaattctccgatccgtccctaacaaactaggaggcgtccttgccctattactatccatcctcatcctagcaataatccccatcctccatatatccaaacaacaaagcataatatttcgcccactaagccaatcactttattgactcctagccgcagacctcctcattctaacctgaatcggaggacaaccagtaagctacccctttaccatcattggacaagtagcatccgtactatacttcacaacaatcctaatcctaataccaactatctccctaattgaaaacaaaatactcaaatgggcctgtccttgtagtataaactaatacaccagtcttgtaaaccggagatgaaaacctttttccaaggacaaatcagagaaaaagtctttaactccaccattagcacccaaagctaagattctaatttaaactattctctgttctttcatggggaagcagatttgggtaccacccaagtattgactcacccatcaacaaccgctatgtatttcgtacattactgccagccaccatgaatattgtacggtaccataaatacttgaccacctgtagtacataaaaacccaatccacatcaaaaccccctccccatgcttacaagcaagtacagcaatcaaccttcaactatcacacatcaactgcaactccaaagccacccctcacccactaggatatcaacaaacctacccatccttaacagtacatagtacataaagccatttaccgtacatagcacattacagtcaaatcccttctcgtccccatggatgacccccctcagataggagtcccttgaccaccatcctccgtgaaatcaatatcccgcacaagagtgctactctcctcgctccgggcccataacacttgggggtagctaaagtgaactgtatccgacatctggttcctacttcagggtcataaagcctaaatagcccacacgttccccttaaataagacatcacgatg

SEQ ID NO: 391 - DNA, 16570 bp, Homo sapiens mitochondrial
  3108: "n" refers to a nucleotide at position 3107 of the Cambridge Reference Sequence (CRS, Anderson et al. 1981 Nature 290:457-465), later determined to be absent from the human mtDNA sequence according to the revised CRS (rCRS, Andrews et al. 1999 Nature Genetics 23:147); "n" therefore represents a single nucleotide deletion at a position corresponding to nucleotide 3107 of SEQ ID NO:1 as provided herein.
gatcacaggtctatcaccctattaaccactcacgggagctctccatgcatttggtattttcgtctggggggtgtgcacgcgatagcattgcgagacgctggagccggagcaccctatgtcgcagtatctgtctttgattcctgcctcatcccattatttatcgcacctacgttcaatattacaggcgaacatacctactaaagtgtgttaattaattaatgcttgtaggacataataataacaattgaatgtctgcacagccgctttccacacagacatcataacaaaaaatttccaccaaaccccccctcccccgccttctggccacagcacttaaacacatctctgccaaaccccaaaaacaaagaaccctaacaccagcctaaccagatttcaaattttatcttttggcggtatgcacttttaacagtcaccccccaactaacacattattttcccctcccactcccatactactaatctcatcaatacaacccccgcccatcctacccagcacacacacaccgctgctaaccccataccccgaaccaaccaaaccccaaagacaccccccacagtttatgtagcttacctcctcaaagcaatacactgaaaatgtttagacgggctcacatcaccccataaacaaataggtttggtcctagcctttctattagctcttagtaagattacacatgcaagcatccccattccagtgagttcaccctctaaatcaccacgatcaaaagggacaagcatcaagcacgcagcaatgcagctcaaaacgcttagcctagccacacccccacgggaaacagcagtgattaacctttagcaataaacgaaagtttaactaagctatactaaccccagggttggtcaatttcgtgccagccaccgcggtcacacgattaacccaagtcaatagaagccggcgtaaagagtgttttagatcaccccctccccaataaagctaaaactcacctgagttgtaaaaaactccagttgacacaaaatagactacgaaagtggctttaacatatctgaacacacaatagctaagacccaaactgggattagataccccactatgcttagccctaaacctcaacagttaaatcaacaaaactgctcgccagaacactacgagccacagcttaaaactcaaaggacctggcggtgcttcatatccctctagaggagcctgttctgtaatcgataaaccccgatcaacctcaccacctcttgctcagcctatataccgccatcttcagcaaaccctgatgaaggctacaaagtaagcgcaagtacccacgtaaagacgttaggtcaaggtgtagcccatgaggtggcaagaaatgggctacattttctaccccagaaaactacgatagcccttatgaaacttaagggtcgaaggtggatttagcagtaaactgagagtagagtgcttagttgaacagggccctgaagcgcgtacacaccgcccgtcaccctcctcaagtatacttcaaaggacatttaactaaaacccctacgcatttatatagaggagacaagtcgtaacatggtaagtgtactggaaagtgcacttggacgaaccagagtgtagcttaacacaaagcacccaacttacacttaggagatttcaacttaacttgaccgctctgagctaaacctagccccaaacccactccaccttactaccagacaaccttagccaaaccatttacccaaataaagtataggcgatagaaattgaaacctggcgcaatagatatagtaccgcaagggaaagatgaaaaattataaccaagcataatatagcaaggactaacccctataccttctgcataatgaattaactagaaataactttgcaaggagaaccaaagctaagacccccgaaaccagacgagctacctaagaacagctaaaagagcacacccgtctatgtagcaaaatagtgggaagatttataggtagaggcgacaaacctaccgagcctggtgatagctggttgtccaagatagaatcttagttcaactttaaatttgcccacagaaccctctaaatccccttgtaaatttaactgttagtccaaagaggaacagctctttggacactaggaaaaaaccttgtagagagagtaaaaaatttaacacccatagtaggcctaaaagcagccaccaattaagaaagcgttcaagctcaacacccactacctaaaaaatcccaaacatataactgaactcctcacacccaattggaccaatctatcaccctatagaagaactaatgttagtataagtaacatgaaaacattctcctccgcataagcctgcgtcagattaaaacactgaactgacaattaacagcccaatatctacaatcaaccaacaagtcattattaccctcactgtcaacccaacacaggcatgctcataaggaaaggttaaaaaaagtaaaaggaactcggcaaatcttaccccgcctgtttaccaaaaacatcacctctagcatcaccagtattagaggcaccgcctgcccagtgacacatgtttaacggccgcggtaccctaaccgtgcaaaggtagcataatcacttgttccttaaatagggacctgtatgaatggctccacgagggttcagctgtctcttacttttaaccagtgaaattgacctgcccgtgaagaggcgggcatgacacagcaagacgagaagaccctatggagctttaatttattaatgcaaacagtacctaacaaacccacaggtcctaaactaccaaacctgcattaaaaatttcggttggggcgacctcggagcagaacccaacctccgagcagtacatgctaagacttcaccagtcaaagcgaactactatactcaattgatccaataacttgaccaacggaacaagttaccctagggataacagcgcaatcctattctagagtccatatcaacaatagggtttacgacctcgatgttggatcaggacatcccgatggtgcagccgctattaaaggttcgtttgttcaacgattaaagtcctacgtgatctgagttcagaccggagtaatccaggtcggtttctatctacnttcaaattcctccctgtacgaaaggacaagagaaataaggcctacttcacaaagcgccttcccccgtaaatgatatcatctcaacttagtattatacccacacccacccaagaacagggtttgttaagatggcagagcccggtaatcgcataaaacttaaaactttacagtcagaggttcaattcctcttcttaacaacatacccatggccaacctcctactcctcattgtacccattctaatcgcaatggcattcctaatgcttaccgaacgaaaaattctaggctatatacaactacgcaaaggccccaacgttgtaggcccctacgggctactacaacccttcgctgacgccataaaactcttcaccaaagagcccctaaaacccgccacatctaccatcaccctctacatcaccgccccgaccttagctctcaccatcgctcttctactatgaacccccctccccatacccaaccccctggtcaacctcaacctaggcctcctatttattctagccacctctagcctagccgtttactcaatcctctgatcagggtgagcatcaaactcaaactacgccctgatcggcgcactgcgagcagtagcccaaacaatctcatatgaagtcaccctagccatcattctactatcaacattactaataagtggctcctttaacctctccacccttatcacaacacaagaacacctctgattactcctgccatcatgacccttggccataatatgatttatctccacactagcagagaccaaccgaacccccttcgaccttgccgaaggggagtccgaactagtctcaggcttcaacatcgaatacgccgcaggccccttcgccctattcttcatagccgaatacacaaacattattataataaacaccctcaccactacaatcttcctaggaacaacatatgacgcactctcccctgaactctacacaacatattttgtcaccaagaccctacttctaacctccctgttcttatgaattcgaacagcatacccccgattccgctacgaccaactcatacacctcctatgaaaaaacttcctaccactcaccctagcattacttatatgacatgtctccatacccattacaatctccagcattccccctcaaacctaagaaatatgtctgataaaagagttactttgatagagtaaataataggagcttaaacccccttatttctaggactatgagaatcgaacccatccctgagaatccaaaattctccgtgccacctatcacaccccatcctaaagtaaggtcagctaaataagctatcgggcccataccccgaaaatgttggttatacccttcccgtactaattaatcccctggcccaacccgtcatctactctaccatctttgcaggcacactcatcacagcgctaagctcgcactgattttttacctgagtaggcctagaaataaacatgctagcttttattccagttctaaccaaaaaaataaaccctcgttccacagaagctgccatcaagtatttcctcacgcaagcaaccgcatccataatccttctaatagctatcctcttcaacaatatactctccggacaatgaaccataaccaatactaccaatcaatactcatcattaataatcataatggctatagcaataaaactaggaatagccccctttcacttctgagtcccagaggttacccaaggcacccctctgacatccggcctgcttcttctcacatgacaaaaactagcccccatctcaatcatataccaaatctctccctcactagacgtaagccttctcctcactctctcaatcttatccatcatagcaggcagttgaggtggattaaaccaaacccagctacgcaaaatcttagcatactcctcaattacccacataggatgaataatagcagttctaccgtacaaccctaacataaccattcttaatttaactatttatattatcctaactactaccgcattcctactactcaacttaaactccagcaccacgaccctactactatctcgcacctgaaacaagctaacatgactaacacccttaattccatccaccctcctctccctaggaggcctgcccccgctaaccggctttttgcccaaatgggccattatcgaagaattcacaaaaaacaatagcctcatcatccccaccatcatagccaccatcaccctccttaacctctacttctacctacgcctaatctactccacctcaatcacactactccccatatctaacaacgtaaaaataaaatgacagtttgaacatacaaaacccaccccattcctccccacactcatcgcccttaccacgctactcctacctatctccccttttatactaataatcttatagaaatttaggttaaatacagaccaagagccttcaaagccctcagtaagttgcaatacttaatttctgtaacagctaaggactgcaaaaccccactctgcatcaactgaacgcaaatcagccactttaattaagctaagcccttactagaccaatgggacttaaacccacaaacacttagttaacagctaagcaccctaatcaactggcttcaatctacttctcccgccgccgggaaaaaaggcgggagaagccccggcaggtttgaagctgcttcttcgaatttgcaattcaatatgaaaatcacctcggagctggtaaaaagaggcctaacccctgtctttagatttacagtccaatgcttcactcagccattttacctcacccccactgatgttcgccgaccgttgactattctctacaaaccacaaagacattggaacactatacctattattcggcgcatgagctggagtcctaggcacagctctaagcctccttattcgagccgagctgggccagccaggcaaccttctaggtaacgaccacatctacaacgttatcgtcacagcccatgcatttgtaataatcttcttcatagtaatacccatcataatcggaggctttggcaactgactagttcccctaataatcggtgcccccgatatggcgtttccccgcataaacaacataagcttctgactcttacctccctctctcctactcctgctcgcatctgctatagtggaggccggagcaggaacaggttgaacagtctaccctcccttagcagggaactactcccaccctggagcctccgtagacctaaccatcttctccttacacctagcaggtgtctcctctatcttaggggccatcaatttcatcacaacaattatcaatataaaaccccctgccataacccaataccaaacgcccctcttcgtctgatccgtcctaatcacagcagtcctacttctcctatctctcccagtcctagctgctggcatcactatactactaacagaccgcaacctcaacaccaccttcttcgaccccgccggaggaggagaccccattctataccaacacctattctgatttttcggtcaccctgaagtttatattcttatcctaccaggcttcggaataatctcccatattgtaacttactactccggaaaaaaagaaccatttggatacataggtatggtctgagctatgatatcaattggcttcctagggtttatcgtgtgagcacaccatatatttacagtaggaatagacgtagacacacgagcatatttcacctccgctaccataatcatcgctatccccaccggcgtcaaagtatttagctgactcgccacactccacggaagcaatatgaaatgatctgctgcagtgctctgagccctaggattcatctttcttttcaccgtaggtggcctgactggcattgtattagcaaactcatcactagacatcgtactacacgacacgtactacgttgtagctcacttccactatgtcctatcaataggagctgtatttgccatcataggaggcttcattcactgatttcccctattctcaggctacaccctagaccaaacctacgccaaaatccatttcactatcatattcatcggcgtaaatctaactttcttcccacaacactttctcggcctatccggaatgccccgacgttactcggactaccccgatgcatacaccacatgaaacatcctatcatctgtaggctcattcatttctctaacagcagtaatattaataattttcatgatttgagaagccttcgcttcgaagcgaaaagtcctaatagtagaagaaccctccataaacctggagtgactatatggatgccccccaccctaccacacattcgaagaacccgtatacataaaatctagacaaaaaaggaaggaatcgaaccccccaaagctggtttcaagccaaccccatggcctccatgactttttcaaaaaggtattagaaaaaccatttcataactttgtcaaagttaaattataggctaaatcctatatatcttaatggcacatgcagcgcaagtaggtctacaagacgctacttcccctatcatagaagagcttatcacctttcatgatcacgccctcataatcattttccttatctgcttcctagtcctgtatgcccttttcctaacactcacaacaaaactaactaatactaacatctcagacgctcaggaaatagaaaccgtctgaactatcctgcccgccatcatcctagtcctcatcgccctcccatccctacgcatcctttacataacagacgaggtcaacgatccctcccttaccatcaaatcaattggccaccaatggtactgaacctacgagtacaccgactacggcggactaatcttcaactcctacatacttcccccattattcctagaaccaggcgacctgcgactccttgacgttgacaatcgagtagtactcccgattgaagcccccattcgtataataattacatcacaagacgtcttgcactcatgagctgtccccacattaggcttaaaaacagatgcaattcccggacgtctaaaccaaaccactttcaccgctacacgaccgggggtatactacggtcaatgctctgaaatctgtggagcaaaccacagtttcatgcccatcgtcctagaattaattcccctaaaaatctttgaaatagggcccgtatttaccctatagcaccccctctaccccctctagagcccactgtaaagctaacttagcattaaccttttaagttaaagattaagagaaccaacacctctttacagtgaaatgccccaactaaatactaccgtatggcccaccataattacccccatactccttacactattcctcatcacccaactaaaaatattaaacacaaactaccacctacctccctcaccaaagcccataaaaataaaaaattataacaaaccctgagaaccaaaatgaacgaaaatctgttcgcttcattcattgcccccacaatcctaggcctacccgccgcagtactgatcattctatttccccctctattgatccccacctccaaatatctcatcaacaaccgactaatcaccacccaacaatgactaatcaaactaacctcaaaacaaataataaccatacacaacactaaaggacgaacctgatctcttatactagtatccttaatcatttttattgccacaactaacctcctcggactcctgcctcactcatttacaccaaccacccaactatctataaacctagccatggccatccccttatgagcgggcgcagtgattataggctttcgctctaagattaaaaatgccctagcccacttcttaccacaaggcacacctacaccccttatccccatactagttattatcgaaaccatcagcctactcattcaaccaatagccctggccgtacgcctaaccgctaacattactgcaggccacctactcatgcacctaattggaagcgccaccctagcaatatcaaccattaaccttccctctacacttatcatcttcacaattctaattctactgactatcctagaaatcgctgtcgccttaatccaagcctacgttttcacacttctagtaagcctctacctgcacgacaacacataatgacccaccaatcacatgcctatcatatagtaaaacccagcccatgacccctaacaggggccctctcagccctcctaatgacctccggcctagccatgtgatttcacttccactccataacgctcctcatactaggcctactaaccaacacactaaccatataccaatgatggcgcgatgtaacacgagaaagcacataccaaggccaccacacaccacctgtccaaaaaggccttcgatacgggataatcctatttattacctcagaagtttttttcttcgcaggatttttctgagccttttaccactccagcctagcccctaccccccaattaggagggcactggcccccaacaggcatcaccccgctaaatcccctagaagtcccactcctaaacacatccgtattactcgcatcaggagtatcaatcacctgagctcaccatagtctaatagaaaacaaccgaaaccaaataattcaagcactgcttattacaattttactgggtctctattttaccctcctacaagcctcagagtacttcgagtctcccttcaccatttccgacggcatctacggctcaacattttttgtagccacaggcttccacggacttcacgtcattattggctcaactttcctcactatctgcttcatccgccaactaatatttcactttacatccaaacaccactttggcttcgaagccgccgcctgatactggcattttgtagatgtggtttgactatttctgtatgtctccatctattgatgagggtcttactcttttagtataaatagtaccgttaacttccaattaactagttttgacaacattcaaaaaagagtaataaacttcgccttaattttaataatcaacaccctcctagccttactactaataattattacattttgactaccacaactcaacggctacatagaaaaatccaccccttacgagtgcggcttcgaccctatatcccccgcccgcgtccctttctccataaaattcttcttagtagctattaccttcttattatttgatctagaaattgccctccttttacccctaccatgagccctacaaacaactaacctgccactaatagttatgtcatccctcttattaatcatcatcctagccctaagtctggcctatgagtgactacaaaaaggattagactgaaccgaattggtatatagtttaaacaaaacgaatgatttcgactcattaaattatgataatcatatctaccaaatgcccctcatttacataaatattatactagcatttaccatctcacttctaggaatactagtatatcgctcacacctcatatcctccctactatgcctagaaggaataatactatcgctgttcattatagctactctcataaccctcaacacccactccctcttagccaatattgtgcctattgccatactagtctttgccgcctgcgaagcagcggtgggcctagccctactagtctcaatctccaacacatatggcctagactacgtacataacctaaacctactccaatgctaaaactaatcgtcccaacaattatattactaccactgacatgactttccaaaaaacacataatttgaatcaacacaaccacccacagcctaattattagcatcatccctctactattttttaaccaaatcaacaacaacctatttagctgttccccaaccttttcctccgaccccctaacaacccccctcctaatactaactacctgactcctacccctcacaatcatggcaagccaacgccacttatccagtgaaccactatcacgaaaaaaactctacctctctatactaatctccctacaaatctccttaattataacattcacagccacagaactaatcatattttatatcttcttcgaaaccacacttatccccaccttggctatcatcacccgatgaggcaaccagccagaacgcctgaacgcaggcacatacttcctattctacaccctagtaggctcccttcccctactcatcgcactgatttacactcacaacaccctaggctcactaaacattctactactcactctcactgcccaagaactatcaaactcctgagccaacaacttaatatgactagcttacacaatagcttttatagtaaagatacctctttacggactccacttatgactccctaaagcccatgtcgaagcccccatcgctgggtcaatagtacttgccgcagtactcttaaaactaggcggctatggtataatacgcctcacactcattctcaaccccctgacaaaacacatagcctaccccttccttgtactatccctatgaggcataattataacaagctccatctgcctacgacaaacagacctaaaatcgctcattgcatactcttcaatcagccacatagccctcgtagtaacagccattctcatccaaaccccctgaagcttcaccggcgcagtcattctcataatcgcccacggacttacatcctcattactattctgcctagcaaactcaaactacgaacgcactcacagtcgcatcataatcctctctcaaggacttcaaactctactcccactaatagctttttgatgacttctagcaagcctcgctaacctcgccttaccccccactattaacctactgggagaactctctgtgctagtaaccacgttctcctgatcaaatatcactctcctacttacaggactcaacatactagtcacagccctatactccctctacatatttaccacaacacaatggggctcactcacccaccacattaacaacataaaaccctcattcacacgagaaaacaccctcatgttcatacacctatcccccattctcctcctatccctcaaccccgacatcattaccgggttttcctcttgtaaatatagtttaaccaaaacatcagattgtgaatctgacaacagaggcttacgaccccttatttaccgagaaagctcacaagaactgctaactcatgcccccatgtctaacaacatggctttctcaacttttaaaggataacagctatccattggtcttaggccccaaaaattttggtgcaactccaaataaaagtaataaccatgcacactactataaccaccctaaccctgacttccctaattccccccatccttaccaccctcgttaaccctaacaaaaaaaactcatacccccattatgtaaaatccattgtcgcatccacctttattatcagtctcttccccacaacaatattcatgtgcctagaccaagaagttattatctcgaactgacactgagccacaacccaaacaacccagctctccctaagcttcaaactagactacttctccataatattcatccctgtagcattgttcgttacatggtcaatcatagaattctcactgtgatatataaactcagacccaaacattaatcagttcttcaaatatctactcatcttcctaattaccatactaatcttagttaccgctaacaacctattccaactgttcatcggctgagagggcgtaggaattatatccttcttgctcatcagttgatgatacgcccgagcagatgccaacacagcagccattcaagcaatcctatacaaccgtatcggcgatatcggtttcatcctcgccttagcatgatttatcctacactccaactcatgagacccacaacaaatagcccttctaaacgctaatccaagcctcaccccactactaggcctcctcctagcagcagcaggcaaatcagcccaattaggtctccacccctgactcccctcagccatagaaggccccaccccagtctcagccctactccactcaagcactatagttgtagcaggaatcttcttactcatccgcttccaccccctagcagaaaatagcccactaatccaaactctaacactatgcttaggcgctatcaccactctgttcgcagcagtctgcgcccttacacaaaatgacatcaaaaaaatcgtagccttctccacttcaagtcaactaggactcataatagttacaatcggcatcaaccaaccacacctagcattcctgcacatctgtacccacgccttcttcaaagccatactatttatgtgctccggatccatcatccacaaccttaacaatgaacaagatattcgaaaaataggaggactactcaaaaccatacctctcacttcaacctccctcaccattggcagcctagcattagcaggaatacctttcctcacaggtttctactccaaagaccacatcatcgaaaccgcaaacatatcatacacaaacgcctgagccctatctattactctcatcgctacctccctgacaagcgcctatagcactcgaataattcttctcaccctaacaggtcaacctcgcttccccacccttactaacattaacgaaaataaccccaccctactaaaccccattaaacgcctggcagccggaagcctattcgcaggatttctcattactaacaacatttcccccgcatcccccttccaaacaacaatccccctctacctaaaactcacagccctcgctgtcactttcctaggacttctaacagccctagacctcaactacctaaccaacaaacttaaaataaaatccccactatgcacattttatttctccaacatactcggattctaccctagcatcacacaccgcacaatcccctatctaggccttcttacgagccaaaacctgcccctactcctcctagacctaacctgactagaaaagctattacctaaaacaatttcacagcaccaaatctccacctccatcatcacctcaacccaaaaaggcataattaaactttacttcctctctttcttcttcccactcatcctaaccctactcctaatcacataacctattcccccgagcaatctcaattacaatatatacaccaacaaacaatgttcaaccagtaactactactaatcaacgcccataatcatacaaagcccccgcaccaataggatcctcccgaatcaaccctgacccctctccttcataaattattcagcttcctacactattaaagtttaccacaaccaccaccccatcatactctttcacccacagcaccaatcctacctccatcgctaaccccactaaaacactcaccaagacctcaacccctgacccccatgcctcaggatactcctcaatagccatcgctgtagtatatccaaagacaaccatcattccccctaaataaattaaaaaaactattaaacccatataacctcccccaaaattcagaataataacacacccgaccacaccgctaacaatcaatactaaacccccataaataggagaaggcttagaagaaaaccccacaaaccccattactaaacccacactcaacagaaacaaagcatacatcattattctcgcacggactacaaccacgaccaatgatatgaaaaaccatcgttgtatttcaactacaagaacaccaatgaccccaatacgcaaaattaaccccctaataaaattaattaaccactcattcatcgacctccccaccccatccaacatctccgcatgatgaaacttcggctcactccttggcgcctgcctgatcctccaaatcaccacaggactattcctagccatacactactcaccagacgcctcaaccgccttttcatcaatcgcccacatcactcgagacgtaaattatggctgaatcatccgctaccttcacgccaatggcgcctcaatattctttatctgcctcttcctacacatcgggcgaggcctatattacggatcatttctctactcagaaacctgaaacatcggcattatcctcctgcttgcaactatagcaacagccttcataggctatgtcctcccgtgaggccaaatatcattctgaggggccacagtaattacaaacttactatccgccatcccatacattgggacagacctagttcaatgaatctgaggaggctactcagtagacagtcccaccctcacacgattctttacctttcacttcatcttgcccttcattattgcagccctagcagcactccacctcctattcttgcacgaaacgggatcaaacaaccccctaggaatcacctcccattccgataaaatcaccttccacccttactacacaatcaaagacgccctcggcttacttctcttcattctctccttaatgacattaacactattctcaccagacctcctaggcgacccagacaattataccctagccaaccccttaaacacccctccccacatcaagcccgaatgatatttcctattcgcctacacaattctccgatccgtccctaacaagctaggaggcgtccttgccctattactatccatcctcatcctagcaataatccccatcctccatatatccaaacaacaaagcataatatttcgcccactaagccaatcactttattgactcctagccgcagacctcctcattctaacctgaatcggaggacaaccagtaagctacccttttaccatcattggacaagtagcatccgtactatacttcacaacaatcctaatcctaataccaactatctccctaattgaaaacaaaatactcaaatgggcctgtccttgtagtataaactaatacaccagtcttgtaaaccgaagatgaaaacctttttccaaggacaaatcagagaaaaagtctttaactccaccattagcacccaaagctaagattctaatttaaactattctctgttctttcatggggaagcagatttgggtaccacccaagtattgactcacccatcaacaaccgctatgtatttcgtacattactgccagccaccatgaatattgcacggtaccataaatacttgaccacctgtagtacatagaaacccaatccacatcaaaacctcccccccatgcttacaagcaagtacagcaatcaaccctcaactatcacacatcaactgcaactccaaagccacccctcacccactaggataccaacaaacctacccatccttaacagtacatagtacataaagccatttaccgtacatagcacattacagtcaaatcccttctcgtccccatggatgacccccctcagataggggtcccttgaccaccatcctccgtgaaatcaatatcccgcacaagagtgctactctcctcgctccgggcccataacacttgggggtagctaaagtgaactgtatccgacatctggttcctacttcagggccataaagcctaaatagcccacacgttccccttaaataagacatcacgatg

SEQ ID NO: 392 - DNA, 16570 bp, Homo sapiens mitochondrial
  3108: "n" refers to a nucleotide at position 3107 of the Cambridge Reference Sequence (CRS, Anderson et al. 1981 Nature 290:457-465), later determined to be absent from the human mtDNA sequence according to the revised CRS (rCRS, Andrews et al. 1999 Nature Genetics 23:147); "n" therefore represents a single nucleotide deletion at a position corresponding to nucleotide 3107 of SEQ ID NO:1 as provided herein.
gatcacaggtctatcaccctattaaccactcacgggagctctccatgcatttggtattttcgtctggggggtatgcacgcgatagcattgcgagacgctggagccggagcaccctatgtcgcagtatctgtctttgattcctgcctcatcctattatttatcgcacctacgttcaatattacaggcgaacatacttactaaagtgtgttaattaattaatgcttgtaggacataataataacaattgaatgtctgcgcagccgctttccacacagacatcataacaaaaaatttccaccaaaccccccctcccccgccttctggccacagcacttaaacacatctctgccaaaccccaaaaacaaagaaccctaacaccagcctaaccagatttcaaattttatcttttggcggtatgcacttttaacagtcaccccccaactaacacattattttcccctcccactcccatactaccaatctcatcaatacaacccccgcccatcctacccagcacacacacaccgctgctaaccccataccccgaaccaaccaaaccccaaagacaccccccacagtttatgtagcttacctcctcaaagcaatacactgaaaatgtttagacgggctcacatcaccccataaacaaataggtttggtcctagcctttctattagctcttagtaagattacacatgcaagcatccccgttccagtgagttcaccctctaaatcaccacgatcaaaagggacaagcatcaagcacgcagcaatgcagctcaaaacgcttagcctagccacacccccacgggaaacagcagtgattaacctttagcaataaacgaaagtttaactaagctatactaaccccagggttggtcaatttcgtgccagccaccgcggtcacacgattaacccaagtcaatagaagccggcgtaaagagtgttttagatcaccccctccccaataaagctaaaactcacctgagttgtaaaaaactccagttgacacaaaatagactacgaaagtggctttaacatatctgaacacacaatagctaagacccaaactgggattagataccccactatgcttagccctaaacctcaacagttaaatcaacaaaactgctcgccagaacactacgagccacagcttaaaactcaaaggacctggcggtgcttcatatccctctagaggagcctgttctgtaatcgataaaccccgatcaacctcaccacctcttgctcagcctatataccgccatcttcagcaaaccctgatgaaggctacaaagtaagcgcaagtacccacgtaaagacgttaggtcaaggtgtagcccatgaggtggcaagaaatgggctacattttctaccccagaaaactacgatagcccttatgaaacttaagggtcgaaggtggatttagcagtaaactgagagtagagtgcttagttgaacagggccctgaagcgcgtacacaccgcccgtcaccctcctcaagtatacttcaaaggacatttaactaaaacccctacgcatttatatagaggagacaagtcgtaacatggtaagtgtactggaaagtgcacttggacgaaccagagtgtagcttaacacaaagcacccaacttacacttaggagatttcaacttaacttgaccgctctgagctaaacctagccccaaacccactccaccttactaccagacaaccttagccaaaccatttacccaaataaagtataggcgatagaaattgaaacctggcgcaatagatatagtaccgcaagggaaagatgaaaaattataaccaagcataatatagcaaggactaacccctataccttctgcataatgaattaactagaaataactttgcaaggagagccaaagctaagacccccgaaaccagacgagctacctaagaacagctaaaagagcacacccgtctatgtagcaaaatagtgggaagatttataggtagaggcgacaaacctaccgagcctggtgatagctggttgtccaagatagaatcttagttcaactttaaatttgcccacagaaccctctaaatccccttgtaaatttaactgttagtccaaagaggaacagctctttggacactaggaaaaaaccttgtagagagagtaaaaaatttaacacccatagtaggcctaaaagcagccaccaattaagaaagcgttcaagctcaacacccactacctaaaaaatcccaaacatataactgaactcctcacacccaattggaccaatctatcaccctatagaagaactaatgttagtataagtaacatgaaaacattctcctccgcataagcctgcgtcagattaaaacactgaactgacaattaacagcccaatatctacaatcaaccaacaagtcattattaccctcactgtcaacccaacacaggcatgctcataaggaaaggttaaaaaaagtaaaaggaactcggcaaatcttaccccgcctgtttaccaaaaacatcacctctagcatcaccagtattagaggcaccgcctgcccagtgacacatgtttaacggccgcggtaccctaaccgtgcaaaggtagcataatcacttgttccttaaatagggacctgtatgaatggctccacgagggttcagctgtctcttacttttaaccagtgaaattgacctgcccgtgaagaggcgggcataacacagcaagacgagaagaccctatggagctttaatttattaatgcaaacagtacctaacaaacccacaggtcctaaactaccaaacctgcattaaaaatttcggttggggcgacctcggagcagaacccaacctccgagcagtacatgctaagacttcaccagtcaaagcgaactactatactcaattgatccaataacttgaccaacggaacaagttaccctagggataacagcgcaatcctattctagagtccatatcaacaatagggtttacgacctcgatgttggatcaggacatcccaatggtgcagccgctattaaaggttcgtttgttcaacgattaaagtcctacgtgatctgagttcagaccggagtaatccaggtcggtttctatctacnttcaaattcctccctgtacgaaaggacaagagaaataaggcctacttcacaaagcgccttcccccgtaaatgatatcatctcaacttagtattatacccacacccacccaagaacagggtttgttaagatggcagagcccggtaatcgcataaaacttaaaactttacagtcagaggttcaattcctcttcttaacaacatacccatggccaacctcctactcctcattgtacccattctaatcgcaatggcattcctaatgcttaccgaacgaaaaattctaggctatatacaactacgcaaaggccccaacgttgtaggcccctacgggctactacaacccttcgctgacgccataaaactcttcaccaaagagcccctaaaacccgccacatctaccatcaccctctacatcaccgccccgaccttagctctcaccatcgctcttctactatgaacccccctccccatacccaaccccctggtcaacctcaacctaggcctcctatttattctagccacctctagcctagccgtttactcaatcctctgatcagggtgagcatcaaactcaaactacgccctgatcggcgcactgcgagcagtagcccaaacaatctcatatgaagtcaccctagccatcattctactatcaacattactaataagtggctcctttaacctctccacccttatcacaacacaagaacacctctgattactcctgccatcatgacccttggccataatatgatttatctccacactagcagagaccaaccgaacccccttcgaccttgccgaaggggagtccgaactagtctcaggcttcaacatcgaatacgccgcaggccccttcgccctattcttcatagccgaatacacaaacattattataataaacaccctcaccactacaatcttcctaggaacaacatatgacgcactctcccctgaactctacacaacatattttgtcaccaagaccctacttctaacctccctgttcttatgaattcgaacagcatacccccgattccgctacgaccaactcatacacctcctatgaaaaaacttcctaccactcaccctagcattacttatatgatatgtctccatacccattacaatctccagcattccccctcaaacctaagaaatatgtctgataaaagagttactttgatagagtaaataataggagcttaaacccccttatttctaggactatgagaatcgaacccatccctgagaatccaaaattctccgtgccacctatcacaccccatcctaaagtaaggtcagctaaataagctatcgggcccataccccgaaaatgttggttatacccttcccgtactaattaatcccctggcccaacccgtcatctactctaccatctttgcaggcacactcatcacagcgctaagctcgcactgattttttacctgagtaggcctagaaataaacatgctagcttttattccagttctaaccaaaaaaataaaccctcgttccacagaagctgccatcaagtatttcctcacgcaagcaaccgcatccataatccttctaatagctatcctcttcaacaatatactctccggacaatgaaccataaccaatactaccaatcaatactcatcattaataatcataatggctatagcaataaaactaggaatagccccctttcacttctgagtcccagaggttacccaaggcacccctctgacatccggcctgcttcttctcacatgacaaaaactagcccccatctcaatcatataccaaatctctccctcactaaacgtaagccttctcctcactctctcaatcttatccatcatagcaggcagttgaggtggattaaaccaaacccagctacgcaaaatcttagcatactcctcaattacccacataggatgaataatagcagttctaccgtacaaccctaacataaccattcttaatttaactatttatattatcctaactactaccgcattcctactactcaacttaaactccagcaccacgaccctactactatctcgcacctgaaacaagctaacatgactaacacccttaattccatccaccctcctctccctaggaggcctgcccccgctaaccggctttttgcccaaatgggccattatcgaagaattcacaaaaaacaatagcctcatcatccccaccatcatagccaccatcaccctccttaacctctacttctacctacgcctaatctactccacctcaatcacactactccccatatctaacaacgtaaaaataaaatgacagtttgaacatacaaaacccaccccattcctccccacactcatcgcccttaccacgctactcctacctatctccccttttatactaataatcttatagaaatttaggttaaatacagaccaagagccttcaaagccctcagtaagttgcaatacttaatttctgtaacagctaaggactgcaaaaccccactctgcatcaactgaacgcaaatcagccactttaattaagctaagcccttactagaccaatgggacttaaacccacaaacacttagttaacagctaagcaccctaatcaactggcttcaatctacttctcccgccgccgggaaaaaaggcgggagaagccccggcaggtttgaagctgcttcttcgaatttgcaattcaatatgaaaatcacctcggagctggtaaaaagaggcctaacccctgtctttagatttacagtccaatgcttcactcagccattttacctcacccccactgatgttcgccgaccgttgactattctctacaaaccacaaagacattggaacactatacctattattcggcgcatgagctggagtcctaggcacagctctaagcctccttattcgagccgagctgggccagccaggcaaccttctaggtaacgaccacatctacaacgttatcgtcacagcccatgcatttgtaataatcttcttcatagtaatacccatcataatcggaggctttggcaactgactagttcccctaataatcggtgcccccgatatggcgtttccccgcataaacaacataagcttctgactcttacctccctctctcctactcctgctcgcatctgctatagtggaggccggagcaggaacaggttgaacagtctaccctcccttagcagggaactactcccaccctggagcctccgtagacctaaccatcttctccttacacctagcaggtgtctcctctatcttaggggccatcaatttcatcacaacaattatcaatataaaaccccctgccataacccaataccaaacgcccctcttcgtctgatccgtcctaatcacagcagtcctacttctcctatctctcccagtcctagctgctggcatcactatactactaacagaccgcaacctcaacaccaccttcttcgaccccgccggaggaggagaccccattctataccaacacctattctgatttttcggtcaccctgaagtttatattcttatcctaccaggcttcggaataatctcccatattgtaacttactactccggaaaaaaagaaccatttggatacataggtatggtctgagctatgatatcaattggcttcctagggtttatcgtgtgagcacaccatatatttacagtaggaatagacgtagacacacgagcatatttcacctccgctaccataatcatcgctatccccaccggcgtcaaagtatttagctgactcgccacactccacggaagcaatatgaaatgatctgctgcagtgctctgagccctaggattcatctttcttttcaccgtaggtggcctgactggcattgtattagcaaactcatcactagacatcgtactacacgacacgtactacgttgtagcccacttccactatgtcctatcaataggagctgtatttgccatcataggaggcttcattcactgatttcccctattctcaggctacaccctagaccaaacctacgccaaaatccatttcactatcatattcatcggcgtaaatctaactttcttcccacaacactttctcggcctatccggaatgccccgacgttactcggactaccccgatgcatacaccacatgaaacatcctatcatctgtaggctcattcatttctctaacagcagtaatattaataattttcatgatttgagaagccttcgcttcgaagcgaaaagtcctaatagtagaagaaccctccataaacctggagtgactatatggatgccccccaccctaccacacattcgaagaacccgtatacataaaatctagacaaaaaaggaaggaatcgaaccccccaaagctggtttcaagccaaccccatggcctccatgactttttcaaaaaggtattagaaaaaccatttcataactttgtcaaagttaaattataggctaaatcctatatatcttaatggcacatgcagcgcaagtaggtctacaagacgctacttcccctatcatagaagagcttatcacctttcatgatcacgccctcataatcattttccttatctgcttcctagtcctgtatgcccttttcctaacactcacaacaaaactaactaatactaacatctcagacgctcaggaaatagaaaccgtctgaactatcctgcccgccatcatcctagtcctcatcgccctcccatccctacgcatcctttacataacagacgaggtcaacgatccctcccttaccatcaaatcaattggccaccaatggtactgaacctacgagtacaccgactacggcggactaatcttcaactcctacatacttcccccattattcctagaaccaggcgacctgcgactccttgacgttgacaatcgagtagtactcccgattgaagcccccattcgtataataattacatcacaagacgtcttgcactcatgagctgtccccacattaggcttaaaaacagatgcaattcccggacgtctaaaccaaaccactttcaccgctacacgaccgggggtatactacggtcaatgctctgaaatctgtggagcaaaccacagtttcatgcccatcgtcctagaattaattcccctaaaaatctttgaaatagggcccgtatttaccctatagcaccccctctaccccctctagagcccactgtaaagctaacttagcattaaccttttaagttaaagattaagagaaccaacacctctttacagtgaaatgccccaactaaatactaccgtatggcccaccataattacccccatactccttacactattcctcatcacccaactaaaaatattaaacacaaactaccacctacccccctcaccaaagcccataaaaataaaaaattataacaaaccctgagaaccaaaatgaacgaaaatctgttcgcttcattcattgcccccacaatcctaggcctacccgccgcagtactgatcattctatttccccctctattgatccccacctccaaatatctcatcaacaaccgactaatcaccacccaacaatgactaatcaaactaacctcaaaacaaatgataaccatacacaacactaaaggacgaacctgatctcttatactagtatccttaatcatttttattgccacaactaacctcctcggactcctgcctcactcatttacaccaaccacccaactatctataaacctagccatggccatccccttatgagcgggcgcagtgattataggctttcgctctaagattaaaaatgccctagcccacttcttaccacaaggcacacctacaccccttatccccatactagttattatcgaaaccatcagcctactcattcaaccaatagccctggccgtacgcctaaccgctaacattactgcaggccacctactcatgcacctaattggaagcgccaccctagcaatatcaaccattaaccttccctctacacttatcatcttcacaattctaattctactgactatcctagaaatcgctgtcgccttaatccaagcctacgttttcacacttctagtaagcctctacctgcacgacaacacataatgacccaccaatcacatgcctatcatatagtaaaacccagcccatgacccctaacaggggccctctcagccctcctaatgacctccggcctagccatgtgatttcacttccactccataacgctcctcatactaggcctactaaccaacacactaaccatataccaatgatggcgcgatgtaacacgagaaagcacataccaaggccaccacacaccacctgtccaaaaaggccttcgatacgggataatcctatttattacctcagaagtttttttcttcgcaggatttttctgagccttttaccactccagcctagcccctaccccccaattaggagggcactggcccccaacaggcatcaccccgctaaatcccctagaagtcccactcctaaacacatccgtattactcgcatcaggagtatcaatcacctgagctcaccatagtctaatagaaaacaaccgaaaccaaataattcaagcactgcttattacaattttactgggtctctattttaccctcctacaagcctcagagtacttcgagtctcccttcaccatttccgacggcatctacggctcaacattttttgtagccacaggcttccacggacttcacgtcattattggctcaactttcctcactatctgcttcatccgccaactaatatttcactttacatccaaacatcactttggcttcgaagccgccgcctgatactggcattttgtagatgtggtttgactatttctgtatgtctccatctattgatgagggtcttactcttttagtataaatagtaccgttaacttccaattaactagttttgacaacattcaaaaaagagtaataaacttcgccttaattttaataatcaacaccctcctagccttactactaataattattacattttgactaccacaactcaacggctacatagaaaaatccaccccttacgagtgcggcttcgaccctatatcccccgcccgcgtccctttctccataaaattcttcttagtagctattaccttcttattatttgatctagaaattgccctccttttacccctaccatgagccctacaaacaactaacctgccactaatagttatgtcatccctcttattaatcatcatcctagccctaagtctggcctatgagtgactacaaaaaggattagactgaaccgaattggtatatagtttaaacaaaacgaatgatttcgactcattaaattatgataatcatatttaccaaatgcccctcatttacataaatattatactagcatttaccatctcacttctaggaatactagtatatcgctcacacctcatatcctccctactatgcctagaaggaataatactatcgctgttcattatagctactctcataaccctcaacacccactccctcttagccaatattgtgcctattgccatactagtctttgccgcctgcgaagcagcggtgggcctagccctactagtctcaatctccaacacatatggcctagactacgtacataacctaaacctactccaatgctaaaactaatcgtcccaacaattatattactaccactgacatgactttccaaaaaacacataatttgaatcaacacaaccacccacagcctaattattagcatcatccctctactattttttaaccaaatcaacaacaacctatttagctgttccccaaccttttcctccgaccccctaacaacccccctcctaatactaactacctgactcctacccctcacaatcatggcaagccaacgccacttatccagtgaaccactatcacgaaaaaaactctacctctctatactaatctccctacaaatctccttaattataacattcacagccacagaactaatcatattttatatcttcttcgaaaccacacttatccccaccttggctatcatcacccgatgaggcaaccagccagaacgcctgaacgcaggcacatacttcctattctacaccctagtaggctcccttcccctactcatcgcactaatttacactcacaacaccctaggctcactaaacattctactactcactctcactgcccaagaactatcaaactcctgagccaacaacttaatatgactagcttacacaatagcttttatagtaaagatacctctttacggactccacttatgactccctaaagcccatgtcgaagcccccatcgctgggtcaatagtacttgccgcagtactcttaaaactaggcggctatggtataatacgcctcacactcattctcaaccccctgacaaaacacatagcctaccccttccttgtactatccctatgaggcataattataacaagctccatctgcctacgacaaacagacctaaaatcgctcattgcatactcttcaatcagccacatagccctcgtagtaacagccattctcatccaaaccccctgaagcttcaccggcgcagtcattctcataatcgcccacgggcttacatcctcattactattctgcctagcaaactcaaactacgaacgcactcacagtcgcatcataatcctctctcaaggacttcaaactctactcccactaatagctttttgatgacttctagcaagcctcgctaacctcgccttaccccccactattaacctactgggagaactctctgtgctagtaaccacgttctcctgatcaaatatcactctcctacttacaggactcaacatactagtcacagccctatactccctctacatatttaccacaacacaatggggctcactcacccaccacattaacaacataaaaccctcattcacacgagaaaacaccctcatgttcatacacctatcccccattctcctcctatccctcaaccccgacatcattaccgggttttcctcttgtaaatatagtttaaccaaaacatcagattgtgaatctgacaacagaggcttacgaccccttatttaccgagaaagctcacaagaactgctaactcatgcccccatgtctaacaacatggctttctcaacttttaaaggataacagctatccattggtcttaggccccaaaaattttggtgcaactccaaataaaagtaataaccatgcacactactataaccaccctaaccctgacttccctaattccccccatccttaccaccctcgttaaccctaacaaaaaaaactcatacccccattatgtaaaatccattgtcgcatccacctttattatcagtctcttccccacaacaatattcatgtgcctagaccaagaagttattatctcgaactgacactgagccacaacccaaacaacccagctctccctaagcttcaaactagactacttctccataatattcatccctgtagcattgttcgttacatggtccatcatagaattctcactgtgatatataaactcagacccaaacattaatcagttcttcaaatatctactcatcttcctaattaccatactaatcttagttaccgctaacaacctattccaactgttcatcggctgagagggcgtaggaattatatccttcttgctcatcagttgatgatacgcccgagcagatgccaacacagcagccattcaagcaatcctatacaaccgtatcggcgatatcggtttcatcctcgccttagcatgatttatcctacactccaactcatgagacccacaacaaatagcccttctaaacgctaatccaagcctcaccccactactaggcctcctcctagcagcagcaggcaaatcagcccaattaggtctccacccctgactcccctcagccatagaaggccccaccccagtctcagccctactccactcaagcactatagttgtagcaggaatcttcttactcatccgcttccaccccctagcagaaaatagcccactaatccaaactctaacactatgcttaggcgctatcaccactctgttcgcagcagtctgcgcccttacacaaaatgacatcaaaaaaatcgtagccttctccacttcaagtcaactaggactcataatagttacaatcggcatcaaccaaccacacctagcattcctgcacatctgtacccacgccttcttcaaagccatactatttatgtgctccgggtccatcatccacaaccttaacaatgaacaagatattcgaaaaataggaggactactcaaaaccatacctctcacttcaacctccctcaccattggcagcctagcattagcaggaatacctttcctcacaggtttctactccaaagaccacatcatcgaaaccgcaaacatatcatacacaaacgcctgagccctatctattactctcatcgctacctccctgacaagcgcctatagcactcgaataattcttctcaccctaacaggtcaacctcgcttccccacccttactaacattaacgaaaataaccccaccctactaaaccccattaaacgcctggcagccggaagcctattcgcaggatttctcattactaacaacatttcccccgcatcccccttccaaacaacaatccccctctacctaaaactcacagccctcgctgtcactttcctaggacttctaacagccctagacctcaactacctaaccaacaaacttaaaataaaatccccactatgcacattttatttctccaacatactcggattctaccctagcatcacacaccgcacaatcccctatctaggccttcttacgagccaaaacctgcccctactcctcctagacctaacctgactagaaaagctattacctaaaacaatttcacagcaccaaatctccacctccatcatcacctcaacccaaaaaggcataattaaactttacttcctctctttcttcttcccactcatcctaaccctactcctaatcacataacctattcccccgagcaatctcaattacaatatatacaccaacaaacaatgttcaaccagtaactactactaatcaacgcccataatcatacaaagcccccgcaccaataggatcctcccgaatcaaccctgacccctctccttcataaattattcagcttcctacactattaaagtttaccacaaccaccaccccatcatactctttcacccacagcaccaatcctacctccatcgctaaccccactaaaacactcaccaagacctcaacccctgacccccatgcctcaggatactcctcaatagccatcgctgtagtatatccaaagacaaccatcattccccctaaataaattaaaaaaactattaaacccatataacctcccccaaaattcagaataataacacacccgaccacaccgctaacaatcaatactaaacccccataaataggagaaggcttagaagaaaaccccacaaaccccattactaaacccacactcaacagaaacaaagcatacatcattattctcgcacggactacaaccacgaccaatgatatgaaaaaccatcgttgtatttcaactacaagaacaccaatgaccccaatacgcaaaactaaccccctaataaaattaattaaccactcattcatcgacctccccaccccatccaacatctccgcatgatgaaacttcggctcactccttggcgcctgcctgatcctccaaatcaccacaggactattcctagccatgcactactcaccagacgcctcaaccgccttttcatcaatcgcccacatcactcgagacgtaaattatggctgaatcatccgctaccttcacgccaatggcgcctcaatattctttatctgcctcttcctacacatcgggcgaggcctatattacggatcatttctctactcagaaacctgaaacatcggcattatcctcctgcttgcaactatagcaacagccttcataggctatgtcctcccgtgaggccaaatatcattctgaggggccacagtaattacaaacttactatccgccatcccatacattgggacagacctagttcaatgaatctgaggaggctactcagtagacagtcccaccctcacacgattctttacctttcacttcatcttgcccttcattattgcagccctagcagcactccacctcctattcttgcacgaaacgggatcaaacaaccccctaggaatcacctcccattccgataaaatcaccttccacccttactacacaatcaaagacgccctcggcttacttctcttccttctctccttaatgacattaacactattctcaccagacctcctaggcgacccagacaattataccctagccaaccccttaaacacccctccccacatcaagcccgaatgatatttcctattcgcctacacaattctccgatccgtccctaacaaactaggaggcgtccttgccctattactatccatcctcatcctagcaataatccccatcctccatatatccaaacaacaaagcataatatttcgcccactaagccaatcactttattgactcctagccgcagacctcctcattctaacctgaatcggaggacaaccagtaagctacccttttaccatcattggacaagtagcatccgtactatacttcacaacaatcctaatcctaataccaactatctccctaattgaaaacaaaatactcaaatgggcctgtccttgtagtataaactaatacaccagtcttgtaaaccggagatgaaaacctttttccaaggacaaatcagagaaaaagtctttaactccaccattagcacccaaagctaagattctaatttaaactattctctgttctttcatggggaagcagatttgggtaccacccaagtattgactcacccatcaacaaccgctatgtatttcgtacattactgccagccaccatgaatattgtacggtaccataaatacttgaccacctgtagtacataaaaacccaatccacatcaaaaccccctccccatgcttacaagcaagtacagcaatcaaccctcaactatcacacatcaactgcaactccaaagccacccctcacccactaggataccaacaaacctacccacccttaacagtacatagtacataaagccatttaccgtacatagcacattacagtcaaatcccttctcgtccccatggatgacccccctcagataggggtcccttgaccaccatcctccgtgaaatcaatatcccgcacaagagtgctactctcctcgctccgggcccataacacttgggggtagctaaagtgaactgtatccgacatctggttcctacttcagggccataaagcctaaatagcccacacgttccccttaaataagacatcacgatg

SEQ ID NO: 393 - DNA, 16568 bp, Homo sapiens mitochondrial
  3106: "n" refers to a nucleotide at position 3107 of the Cambridge Reference Sequence (CRS, Anderson et al. 1981 Nature 290:457-465), later determined to be absent from the human mtDNA sequence according to the revised CRS (rCRS, Andrews et al. 1999 Nature Genetics 23:147); "n" therefore represents a single nucleotide deletion at a position corresponding to nucleotide 3107 of SEQ ID NO:1 as provided herein.
gatcacaggtctatcaccctattaaccactcacgggagctctccatgcatttggtattttcgtctggggggtatgcacgcgatagcattgcgagacgctggagccggagcaccctatgtcgcagtatctgtctttgattcctgcctcatcctattatttatcgcacctacgttcaatattacaggcgaacatacttactaaagtgtgttaattaattaatgcttgtaggacataataataacaattgaatgtctgcacagccgctttccacacagacatcataacaaaaaatttccaccaaaccccccctcccccgccttctggccacagcacttaaacacatctctgccaaaccccaaaaacaaagaaccctaacaccagcctaaccagatttcaaattttatcttttggcggtatgcacttttaacagtcaccccccaactaacacattattttcccctcccactcccatactactaatctcatcaatacaacccccgcccatcctacccagcacacacaccgctgctaaccccataccccgaaccaaccaaaccccaaagacaccccccacagtttatgtagcttacctcctcaaagcaatacactgaaaatgtttagacgggctcacatcaccccataaacaaataggtttggtcctagcctttctattagctcttagtaagattacacatgcaagcatccccgttccagtgagttcaccctctaaatcaccacgatcaaaaggaacaagcatcaagcacgcagcaatgcagctcaaaacgcttagcctagccacacccccacgggaaacagcagtgattaacctttagcaataaacgaaagtttaactaagctatactaaccccagggttggtcaatttcgtgccagccaccgcggtcacacgattaacccaagtcaatagaagccggcgtaaagagtgttttagatcaccccctccccaataaagctaaaactcacctgagttgtaaaaaactccagttgacacaaaatagactacgaaagtggctttaacatatctgaacacacaatagctaagacccaaactgggattagataccccactatgcttagccctaaacctcaacagttaaatcaacaaaactgctcgccagaacactacgagccacagcttaaaactcaaaggacctggcggtgcttcatatccctctagaggagcctgttctgtaatcgataaaccccgatcaacctcaccacctcttgctcagcctatataccgccatcttcagcaaaccctgatgaaggctacaaagtaagcgcaagtacccacgtaaagacgttaggtcaaggtgtagcccatgaggtggcaagaaatgggctacattttctaccccagaaaactacgatagcccttatgaaacttaagggtcgaaggtggatttagcagtaaactaagagtagagtgcttagttgaacagggccctgaagcgcgtacacaccgcccgtcaccctcctcaagtatacttcaaaggacatttaactaaaacccctacgcatttatatagaggagacaagtcgtaacatggtaagtgtactggaaagtgcacttggacgaaccagagtgtagcttaacacaaagcacccaacttacacttaggagatttcaacttaacttgaccgctctgagctaaacctagccccaaacccactccaccttactaccagacaaccttagccaaaccatttacccaaataaagtataggcgatagaaattgaaacctggcgcaatagatatagtaccgcaagggaaagatgaaaaattataaccaagcataatatagcaaggactaacccctataccttctgcataatgaattaactagaaataactttgcaaggagagccaaagctaagacccccgaaaccagacgagctacctaagaacagctaaaagagcacacccgtctatgtagcaaaatagtgggaagatttataggtagaggcgacaaacctaccgagcctggtgatagctggttgtccaagatagaatcttagttcaactttaaatttgcccacagaaccctctaaatccccttgtaaatttaactgttagtccaaagaggaacagctctttggacactaggaaaaaaccttgtagagagagtaaaaaatttaacacccatagtaggcctaaaagcagccaccaattaagaaagcgttcaagctcaacacccactacctaaaaaatcccaaacatataactgaactcctcacacccaattggaccaatctatcaccctatagaagaactaatgttagtataagtaacatgaaaacattctcctccgcataagcctgcgtcagattaaaacactgaactgacaattaacagcccaatatctacaatcaaccaacaagtcattattaccctcactgtcaacccaacacaggcatgctcataaggaaaggttaaaaaaagtaaaaggaactcggcaaatcttaccccgcctgtttaccaaaaacatcacctctagcatcaccagtattagaggcaccgcctgcccagtgacacatgtttaacggccgcggtaccctaaccgtgcaaaggtagcataatcacttgttccttaaatagggacctgtatgaatggctccacgagggttcagctgtctcttacttttaaccagtgaaattgacctgcccgtgaagaggcgggcataacacagcaagacgagaagaccctatggagctttaatttattaatgcaaacagtacctaacaaacccacaggtcctaaactaccaaacctgcattaaaaatttcggttggggcgacctcggagcagaacccaacctccgagcagtacatgctaagacttcaccagtcaaagcgaactactatactcaattgatccaataacttgaccaacggaacaagttaccctagggataacagcgcaatcctattctagagtccatatcaacaatagggtttacgacctcgatgttggatcaggacatcccgatggtgcagccgctattaaaggttcgtttgttcaacgattaaagtcctacgtgatctgagttcagaccggagtaatccaggtcggtttctatctacnttcaaattcctccctgtacgaaaggacaagagaaataaggcctacttcacaaagcgccttcccccgtaaatgatatcatctcaacttagtattatacccacacccacccaagaacagggtttgttaagatggcagagcccggtaatcgcataaaacttaaaactttacagtcagaggttcaattcctcttcttaacaacatacccatggccaacctcctactcctcattgtacccattctaatcgcaatggcattcctaatgcttaccgaacgaaaaattctaggctatatacaactacgcaaaggccccaacgttgtaggcccctacgggctactacaacccttcgctgacgccataaaactcttcaccaaagagcccctaaaacccgccacatctaccatcaccctctacatcaccgccccgaccttagctctcaccatcgctcttctactatgaacccccctccccatacccaaccccctggtcaacctcaacctaggcctcctatttattctagccacctctagcctagccgtttactcaatcctctgatcagggtgagcatcaaactcaaactacgccctgatcggcgcactgcgagcagtagcccaaacaatctcatatgaagtcaccctagccatcattctactatcaacattactaataagtggctcctttaacctctccacccttatcacaacacaagaacacctctgattactcctgccatcatgacccttggccataatatgatttatctccacactagcagagaccaaccgaacccccttcgaccttgccgaaggggagtccgaactagtctcaggcttcaacatcgaatacgccgcaggccccttcgccctattcttcatagccgaatacacaaacattattataataaacaccctcaccactacaatcttcctaggaacaacatatgacgcactctcccctgaactctacacaacatattttgtcaccaagaccctacttctaacctccctgttcttatgaattcgaacagcatacccccgattccgctacgaccaactcatacacctcctatgaaaaaacttcctaccactcaccctagcattacttatatgatatgtctccatacccattacaatctccagcattccccctcaaacctaagaaatatgtctgataaaagagttactttgatagagtaaataataggagcttaaacccccttatttctaggactatgagaatcgaacccatccctgagaatccaaaattctccgtgccacctatcacaccccatcctaaagtaaggtcagctaaataagctatcgggcccataccccgaaaatgttggttatacccttcccgtactaattaatcccctggcccaacccgtcatctactctaccatctttgcaggcacactcatcacagcgctaagctcgcactgattttttacctgagtaggcctagaaataaacatgctagcttttattccagttctaaccaaaaaaataaaccctcgttccacagaagctgccatcaagtatttcctcacgcaagcaaccgcatccataatccttctaatagctatcctcttcaacaatatactctccggacaatgaaccataaccaatactaccaatcaatactcatcattaataatcataatagctatagcaataaaactaggaatagccccctttcacttctgagtcccagaggttacccaaggcacccctctgacatccggcctgcttcttctcacatgacaaaaactagcccccatctcaatcatataccaaatctctccctcactaaacgtaagccttctcctcactctctcaatcttatccatcatagcaggcagttgaggtggattaaaccaaacccagctacgcaaaatcttagcatactcctcaattacccacataggatgaataatagcagttctaccgtacaaccctaacataaccattcttaatttaactatttatattatcctaactactaccgcattcctactactcaacttaaactccagcaccacgaccctactactatctcgcacctgaaacaagctaacatgactaacacccttaattccatccaccctcctctccctaggaggcctgcccccgctaaccggctttttgcccaaatgggccattatcgaagaattcacaaaaaacaatagcctcatcatccccaccatcatagccaccatcaccctccttaacctctacttctacctacgcctaatctactccacctcaatcacactactccccatatctaacaacgtaaaaataaaatgacagtttgaacatacaaaacccaccccattcctccccacactcatcgcccttaccacgctactcctacctatctccccttttatactaataatcttatagaaatttaggttaaatacagaccaagagccttcaaagccctcagtaagttgcaatacttaatttctgtaacagctaaggactgcaaaaccccactctgcatcaactgaacgcaaatcagccactttaattaagctaagcccttactagaccaatgggacttaaacccacaaacacttagttaacagctaagcaccctaatcaactggcttcaatctacttctcccgccgccgggaaaaaaggcgggagaagccccggcaggtttgaagctgcttcttcgaatttgcaattcaatatgaaaatcacctcggagctggtaaaaagaggcctaacccctgtctttagatttacagtccaatgcttcactcagccattttacctcacccccactgatgttcgccgaccgttgactattctctacaaaccacaaagacattggaacactatacctattattcggcgcatgagctggagtcctaggcacagctctaagcctccttattcgagccgagctgggccagccaggcaaccttctaggtaacgaccacatctacaacgttatcgtcacagcccatgcatttgtaataatcttcttcatagtaatacccatcataatcggaggctttggcaactgactagttcccctaataatcggtgcccccgatatggcgtttccccgcataaacaacataagcttctgactcttacctccctctctcctactcctgctcgcatctgctatagtggaggccggagcaggaacaggttgaacagtctaccctcccttagcagggaactactcccaccctggagcctccgtagacctaaccatcttctccttacacctagcaggtgtctcctctatcttaggggccatcaatttcatcacaacaattatcaatataaaaccccctgccataacccaataccaaacgcccctcttcgtctgatccgtcctaatcacagcagtcctacttctcctatctctcccagtcctagctgctggcatcactatactactaacagaccgcaacctcaacaccaccttcttcgaccccgccggaggaggagaccccattctataccaacacctattctgatttttcggtcaccctgaagtttatattcttatcctaccaggcttcggaataatctcccatattgtaacttactactccggaaaaaaagaaccatttggatacataggtatggtctgagctatgatatcaattggcttcctagggtttatcgtgtgagcacaccatatatttacagtaggaatagacgtagacacacgagcatatttcacctccgctaccataatcatcgctatccccaccggcgtcaaagtatttagctgactcgccacactccacggaagcaatatgaaatgatctgctgcagtgctctgagccctaggattcatctttcttttcaccgtaggtggcctgactggcattgtattagcaaactcatcactagacatcgtactacacgacacgtactacgttgtagcccacttccactatgtcctatcaataggagctgtatttgccatcataggaggcttcattcactgatttcccctattctcaggctacaccctagaccaaacctacgccaaaatccatttcactatcatattcatcggcgtaaatctaactttcttcccacaacactttctcggcctatccggaatgccccgacgttactcggactaccccgatgcatacaccacatgaaacatcctatcatctgtaggctcattcatttctctaacagcagtaatattaataattttcatgatttgagaagccttcgcttcgaagcgaaaagtcctaatagtagaagaaccctccataaacctggagtgactatatggatgccccccaccctaccacacattcgaagaacccgtatacataaaatctagacaaaaaaggaaggaatcgaaccccccaaagctggtttcaagccaaccccatggcctccatgactttttcaaaaaggtattagaaaaaccatttcataactttgtcaaagttaaattataggctaaatcctatatatcttaatggcacatgcagcgcaagtaggtctacaagacgctacttcccctatcatagaagagcttatcacctttcatgatcacgccctcataatcattttccttatctgcttcctagtcctgtatgcccttttcctaacactcacaacaaaactaactaatactaacatctcagacgctcaggaaatagaaaccgtctgaactatcctgcccgccatcatcctagtcctcatcgccctcccatccctacgcatcctttacataacagacgaggtcaacgatccctcccttaccatcaaatcaattggccaccaatggtactgaacctacgagtacaccgactacggcggactaatcttcaactcctacatacttcccccattattcctagaaccaggcgacctgcgactccttgacgttgacaatcgagtagtactcccgattgaagcccccattcgtataataattacatcacaagacgtcttgcactcatgagctgtccccacattaggcttaaaaacagatgcaattcccggacgtctaaaccaaaccactttcaccgctacacgaccgggggtatactacggtcaatgctctgaaatctgtggagcaaaccacagtttcatgcccatcgtcctagaattaattcccctaaaaatctttgaaatagggcccgtatttaccctatagcaccccctctaccccctctagagcccactgtaaagctaacttagcattaaccttttaagttaaagattaagagaaccaacacctctttacagtgaaatgccccaactaaatactaccgtatggcccaccataattacccccatactccttacactattcctcatcacccaactaaaaatattaaacacaaactaccacctacctccctcaccaaagcccataaaaataaaaaattataacaaaccctgagaaccaaaatgaacgaaaatctgttcgcttcattcattgcccccacaatcctaggcctacccgccgcagtactgatcattctatttccccctctattgatccccacctccaaatatctcatcaacaaccgactaatcaccacccaacaatgactaatcaaactaacctcaaaacaaatgataaccatacacaacactaaaggacgaacctgatctcttatactagtatccttaatcatttttattgccacaactaacctcctcggactcctgcctcactcatttacaccaaccacccaactatctataaacctagccatggccatccccttatgagcgggcgcagtgattataggctttcgctctaagattaaaaatgccctagcccacttcttaccacaaggcacacctacaccccttatccccatactagttattatcgaaaccatcagcctactcattcaaccaatagccctggccgtacgcctaaccgctaacattactgcaggccacctactcatgcacctaattggaagcgccaccctagcaatatcaaccattaaccttccctctacacttatcatcttcacaattctaattctactgactatcctagaaatcgctgtcgccttaatccaagcctacgttttcacacttctagtaagcctctacctgcacgacaacacataatgacccaccaatcacatgcctatcatatagtaaaacccagcccatgacccctaacaggggccctctcagccctcctaatgacctccggcctagccatgtgatttcacttccactccataacgctcctcatactaggcctactaaccaacacactaaccatataccaatgatggcgcgatgtaacacgagaaagcacataccaaggccaccacacaccacctgtccaaaaaggccttcgatacgggataatcctatttattacctcagaagtttttttcttcgcaggatttttctgagccttttaccactccagcctagcccctaccccccaattaggagggcactggcccccaacaggcatcaccccgctaaatcccctagaagtcccactcctaaacacatccgtattactcgcatcaggagtatcaatcacctgagctcaccatagtctaatagaaaacaaccgaaaccaaataattcaagcactgcttattacaattttactgggtctctattttaccctcctacaagcctcagagtacttcgagtctcccttcaccatttccgacggcatctacggctcaacattttttgtagccacaggcttccacggacttcacgtcattattggctcaactttcctcactatctgcttcatccgccaactaatatttcactttacatccaaacatcactttggcttcgaagccgccgcctgatactggcattttgtagatgtggtttgactatttctgtatgtctccatctattgatgagggtcttactcttttagtataaatagtaccgttaacttccaattaactagttttgacaacattcaaaaaagagtaataaacttcgccttaattttaataatcaacaccctcctagccttactactaataattattacattttgactaccacaactcaacggctacatagaaaaatccaccccttacgagtgcggcttcgaccctatatcccccgcccgcgtccctttctccataaaattcttcttagtagctattaccttcttattatttgatctagaaattgccctccttttacccctaccatgagccctacaaacaactaacctgccactaatagttatgtcatccctcttattaatcatcatcctagccctaagtctggcctatgagtgactacaaaaaggattagactgaaccgaattggtatatagtttaaacaaaacgaatgatttcgactcattaaattatgataatcatatttaccaaatgcccctcatttacataaatattatactagcatttaccatctcacttctaggaatactagtatatcgctcacacctcatatcctccctactatgcctagaaggaataatactatcgctgttcattatagctactctcataaccctcaacacccactccctcttagccaatattgtgcctattgccatactagtctttgccgcctgcgaagcagcggtgggcctagccctactagtctcaatctccaacacatatggcctagactacgtacataacctaaacctactccaatgctaaaactaatcgtcccaacaattatattactaccactgacatgactttccaaaaaacacataatttgaatcaacacaaccacccacagcctaattattagcatcatccctctactattttttaaccaaatcaacaacaacctatttagctgttccccaaccttttcctccgaccccctaacaacccccctcctaatactaactacctgactcctacccctcacaatcatggcaagccaacgccacttatccagtgaaccactatcacgaaaaaaactctacctctctatactaatctccctacaaatctccttaattataacattcacagccacagaactaatcatattttatatcttcttcgaaaccacacttatccccaccttggctatcatcacccgatgaggcaaccagccagaacgcctgaacgcaggcacatacttcctattctacaccctagtaggctcccttcccctactcatcgcactaatttacactcacaacaccctaggctcactaaacattctactactcactctcactgcccaagaactatcaaactcctgagccaacaacttaatatgactagcttacacaatagcttttatagtaaagatacctctttacggactccacttatgactccctaaagcccatgtcgaagcccccatcgctgggtcaatagtacttgccgcagtactcttaaaactaggcggctatggtataatacgcctcacactcattctcaaccccctgacaaaacacatagcctaccccttccttgtactatccctatgaggcataattataacaagctccatctgcctacgacaaacagacctaaaatcgctcattgcatactcttcaatcagccacatagccctcgtagtaacagccattctcatccaaaccccctgaagcttcaccggcgcagtcattctcataatcgcccacgggcttacatcctcattactattctgcctagcaaactcaaactacgaacgcactcacagtcgcatcataatcctctctcaaggacttcaaactctactcccactaatagctttttgatgacttctagcaagcctcgctaacctcgccttaccccccactattaacctactgggagaactctctgtgctagtaaccacgttctcctgatcaaatatcactctcctacttacaggactcaacatactagtcacagccctatactccctctacatatttaccacaacacaatggggctcactcacccaccacattaacaacataaaaccctcattcacacgagaaaacaccctcatgttcatacacctatcccccattctcctcctatccctcaaccccgacatcattaccgggttttcctcttgtaaatatagtttaaccaaaacatcagattgtgaatctgacaacagaggcttacgaccccttatttaccgagaaagctcacaagaactgctaactcatgcccccatgtctaacaacatggctttctcaacttttaaaggataacagctatccattggtcttaggccccaaaaattttggtgcaactccaaataaaagtaataaccatgcacactactataaccaccctaaccctgacttccctaattccccccatccttaccaccctcgttaaccctaacaaaaaaaactcatacccccattatgtaaaatccattgtcgcatccacctttattatcagtctcttccccacaacaatattcatgtgcctagaccaagaagttattatctcgaactgacactgagccacaacccaaacaacccagctctccctaagcttcaaactagactacttctccataatattcatccctgtagcattgttcgttacatggtccatcatagaattctcactgtgatatataaactcagacccaaacattaatcagttcttcaaatatctactcatcttcctaattaccatactaatcttagttaccgctaacaacctattccaactgttcatcggctgagagggcgtaggaattatatccttcttgctcatcagttgatgatacgcccgagcagatgccaacacagcagccattcaagcaatcctatacaaccgtatcggcgatatcggtttcatcctcgccttagcatgatttatcctacactccaactcatgagacccacaacaaatagcccttctaaacgctaatccaagcctcaccccactactaggcctcctcctagcagcagcaggcaaatcagcccaattaggtctccacccctgactcccctcagccatagaaggccccaccccagtctcagccctactccactcaagcactatagttgtagcaggaatcttcttactcatccgcttccaccccctagcagaaaatagcccactaatccaaactctaacactatgcttaggcgctatcaccactctgttcgcagcagtctgcgcccttacacaaaatgacatcaaaaaaatcgtagccttctccacttcaagtcaactaggactcataatagttacaatcggcatcaaccaaccacacctagcattcctgcacatctgtacccacgccttcttcaaagccatactatttatgtgctccgggtccatcatccacaaccttaacaatgaacaagatattcgaaaaataggaggactactcaaaaccatacctctcacttcaacctccctcaccattggcagcctagcattagcaggaatacctttcctcacaggtttctactccaaagaccacatcatcgaaaccgcaaacatatcatacacaaacgcctgagccctatctattactctcatcgctacctccctgacaagcgcctatagcactcgaataattcttctcaccctaacaggtcaacctcgcttccccacccttactaacattaacgaaaataaccccaccctactaaaccccattaaacgcctggcagccggaagcctattcgcaggatttctcattactaacaacatttcccccgcatcccccttccaaacaacaatccccctctacctaaaactcacagccctcgctgtcactttcctaggacttctaacagccctagacctcaactacctaaccaacaaacttaaaataaaatccccactatgcacattttatttctccaacatactcggattctaccctagcatcacacaccgcacaatcccctatctaggccttcttacgagccaaaacctgcccctactcctcctagacctaacctgactagaaaagctattacctaaaacaatttcacagcaccaaatctccacctccatcatcacctcaacccaaaaaggcataattaaactttacttcctctctttcttcttcccactcatcctaaccctactcctaatcacataacctattcccccgagcaatctcaattacaatatatacaccaacaaacaatgttcaaccagtaactactactaatcaacgcccataatcatacaaagcccccgcaccaataggatcctcccgaatcaaccctgacccctctccttcataaattattcagcttcctacactattaaagtttaccacaaccaccaccccatcatactctttcacccacagcaccaatcctacctccatcgctaaccccactaaaacactcaccaagacctcaacccctgacccccatgcctcaggatactcctcaatagccatcgctgtagtatatccaaagacaaccatcattccccctaaataaattaaaaaaactattaaacccatataacctcccccaaaattcagaataataacacacccgaccacaccgctaacaatcaatactaaacccccataaataggagaaggcttagaagaaaaccccacaaaccccattactaaacccacactcaacagaaacaaagcatacatcattattctcgcacggactacaaccacgaccaatgatatgaaaaaccatcgttgtatttcaactacaagaacaccaatgaccccaatacgcaaaactaaccccctaataaaattaattaaccactcattcatcgacctccccaccccatccaacatctccgcatgatgaaacttcggctcactccttggcgcctgcctgatcctccaaatcaccacaggactattcctagccatgcactactcaccagacgcctcaaccgccttttcatcaatcgcccacatcactcgagacgtaaattatggctgaatcatccgctaccttcacgccaatggcgcctcaatattctttatctgcctcttcctacacatcgggcgaggcctatattacggatcatttctctactcagaaacctgaaacatcggcattatcctcctgcttgcaactatagcaacagccttcataggctatgtcctcccgtgaggccaaatatcattctgaggggccacagtaattacaaacttactatccgccatcccatacattgggacagacctagttcaatgaatctgaggaggctactcagtagacagtcccaccctcacacgattctttacctttcacttcatcttgcccttcattattgcagccctagcagcactccacctcctattcttgcacgaaacgggatcaaacaaccccctaggaatcacctcccattccgataaaatcaccttccacccttactacacaatcaaagacgccctcggcttacttctcttccttctctccttaatgacattaacactattctcaccagacctcctaggcgacccagacaattataccctagccaaccccttaaacacccctccccacatcaagcccgaatgatatttcctattcgcctacacaattctccgatccgtccctaacaaactaggaggcgtccttgccctattactatccatcctcatcctagcaataatccccatcctccatatatccaaacaacaaagcataatatttcgcccactaagccaatcactttattgactcctagccgcagacctcctcattctaacctgaatcggaggacaaccagtaagctacccttttaccatcattggacaagtagcatccgtactatacttcacaacaatcctaatcctaataccaactatctccctaattgaaaacaaaatactcaaatgggcctgtccttgtagtataaactaatacaccagtcttgtaaaccggagatgaaaacctttttccaaggacaaatcagagaaaaagtctttaactccaccattagcacccaaagctaagattctaatttaaactattctctgttctttcatggggaagcagatttgggtaccacccaagtattgactcacccatcaacaaccgctatgtatttcgtacattactgccagccaccatgaatattgtacggtaccataaatacttgaccacctgtagtacataaaaacccaatccacatcaaaaccccctccccatgcttacaagcaagtacagcaatcaaccctcaactatcacgcatcaactgcaactccaaagccacccctcacccactaggataccaacaaacctactcacccttaacagtacatagtacataaagccatttaccgtacatagcacattacagtcaaatccctcctcgtccccatggatgacccccctcagataggggtcccttgaccaccatcctccgtgaaatcaatatcccgcacaagagtgctactctcctcgctccgggcccataacacttgggggtagctaaagtgaactgtatccgacatctggttcctacttcagggtcataaagcctaaatagcccacacgttccccttaaataagacatcacgatg

SEQ ID NO: 394 - DNA, 16571 bp, Homo sapiens mitochondrial
  3109: "n" refers to a nucleotide at position 3107 of the Cambridge Reference Sequence (CRS, Anderson et al. 1981 Nature 290:457-465), later determined to be absent from the human mtDNA sequence according to the revised CRS (rCRS, Andrews et al. 1999 Nature Genetics 23:147); "n" therefore represents a single nucleotide deletion at a position corresponding to nucleotide 3107 of SEQ ID NO:1 as provided herein.
gatcacaggtctatcaccctattaaccactcacgggagctctccatgcatttggtattttcgtctggggggtgtgcacgcgatagcattgcgagacgctggagccggagcaccctatgtcgcagtatctgtctttgattcctgcctcatcctattatttatcgcacctacgttcaatattacaggcgagcatatctactaaagcgtattaattaattaatgcttgtaggacataataataacaattgaatgtctgcacagccgctttccacacagacatcataacaaaaaatttccaccaaaccccccctcccccccgcttctggccacagcacttaaacacatctctgccaaaccccaaaaacaaagaaccctaacaccagcctaaccagatttcaaattttatcttttggcggtatgcacttttaacagtcaccccccaactaacacattattttcccctcccactcccatactactaatctcatcaatacaacccccgcccatcctacccagcacacacacaccgctgctaaccccataccccgaaccaaccaaaccccaaagacaccccccacagtttatgtagcttacctcctcaaagcaatacactgaaaatgtttagacgggctcacatcaccccataaacaaataggtttggtcctagcctttctattagctcttagtaagattacacatgcaagcatccccattccagtgagttcaccctctaaatcaccacgatcaaaagggacaagcatcaagcacgcagcaatgcagctcaaaacgcttagcctagccacacccccacgggaaacagcagtgattaacctttagcaataaacgaaagtttaactaagctatactaaccccagggttggtcaatttcgtgccagccaccgcggtcacacgattaacccaagtcaatagaagccggcgtaaagagtgttttagatcaccccctccccaataaagctaaaactcacctgagttgtaaaaaactccagttgacacaaaatagactacgaaagtggctttaacatatctgaacacacaatagctaagacccaaactgggattagataccccactatgcttagccctaaacctcaacagttaaatcaacaaaactgctcgccagaacactacgagccacagcttaaaactcaaaggacctggcggtgcttcatatccctctagaggagcctgttctgtaatcgataaaccccgatcaacctcaccaccccttgctcagcctatataccgccatcttcagcaaaccctgatgaaggctacaaagtaagcgcaagtacccacgtaaagacgttaggtcaaggtgtagcccatgaggtggcaagaaatgggctacattttctaccccagaaaactacgatagcccttatgaaacctaagggtcgaaggtggatttagcagtaaactgagagtagagtgcttagttgaacagggccctgaagcgcgtacacaccgcccgtcaccctcctcaagtatacttcaaaggacatttaactaaaacccctacgcatttatatagaggagacaagtcgtaacatggtaagtgtactggaaagtgcacttggacgaaccagagtgtagcttaacacaaagcacccaacttacacttaggagatttcaacttaacttgaccgctctgagctaaacctagccccaaacccactccaccttactaccagacaaccttagccaaaccatttacccaaataaagtataggcgatagaaattgaaacctggcgcaatagatatagtaccgcaagggaaagatgaaaaattataaccaagcataatatagcaaggactaacccctataccttctgcataatgaattaactagaaataactttgcaaggagagccaaagctaagacccccgaaaccagacgagctacctaagaacagctaaaagagcacacccgtctatgtagcaaaatagtgggaagatttataggtagaggcgacaaacctaccgagcctggtgatagctggttgtccaagatagaatcttagttcaactttaaatttgcccacagaaccctctaaatccccttgtaaatttaactgttagtccaaagaggaacagctctttggacactaggaaaaaaccttgtagagagagtaaaaaatttaacacccatagtaggcctaaaagcagccaccaattaagaaagcgttcaagctcaacacccactacctaaaaaatcccaaacatataactgaactcctcacacccaattggaccaatctatcaccctatagaagaactaatgttagtataagtaacatgaaaacattctcctccgcataagcctgcgtcagattaaaacactgaactgacaattaacagcccaatatctacaatcaaccaacaagtcattattaccctcactgtcaacccaacacaggcatgctcataaggaaaggttaaaaaaagtaaaaggaactcggcaaatcttaccccgcctgtttaccaaaaacatcacctctagcatcaccagtattagaggcaccgcctgcccagtgacacatgtttaacggccgcggtaccctaaccgtgcaaaggtagcataatcacttgttccttaaatagggacctgtatgaatggctccacgagggttcagctgtctcttacttttaaccagtgaaattgacctgcccgtgaagaggcgggcatgacacagcaagacgagaagaccctatggagctttaatttattaatgcaaacagtacctaacaaacccacaggtcctaaactaccaaacctgcattaaaaatttcggttggggcgacctcggagcagaacccaacctccgagcagtacatgctaagacttcaccagtcaaagcgaactactatactcaattgatccaataacttgaccaacggaacaagttaccctagggataacagcgcaatcctattctagagtccatatcaacaatagggtttacgacctcgatgttggatcaggacatcccgatggtgcagccgctattaaaggttcgtttgttcaacgattaaagtcctacgtgatctgagttcagaccggagtaatccaggtcggtttctatctacnttcaaattcctccctgtacgaaaggacaagagaaataaggcctacttcacaaagcgccttcccccgtaaatgatatcatctcaacttagtattatacccacacccacccaagaacagggtttgttaagatggcagagcccggtaatcgcataaaacttaaaactttacagtcagaggttcaattcctcttcttaacaacatacccatggccaacctcctactcctcattgtacccattctaatcgcaatggcattcctaatgcttaccgaacgaaaaattctaggctatatacaactacgcaaaggccccaacgttgtaggcccctacgggctactacaacccttcgctgacgccataaaactcttcaccaaagagcccctaaaacccgccacatctgccatcaccctctacatcaccgccccgaccttagctctcaccatcgctcttctactatgaacccccctccccatacccaaccccctggtcaacctcaacctaggcctcctatttattctagccacctctagcctagccgtttactcaatcctctgatcagggtgagcatcaaactcaaactacgccctgatcggcgcactgcgagcagtagcccaaacaatctcatatgaagtcaccctagccatcattctactatcaacattactaataagtggctcctttaacctctccacccttatcacaacacaagaacacctctgattactcctgccatcatgacccttggccataatatgatttatctccacactagcagagaccaaccgaacccccttcgaccttgccgaaggggagtccgaactagtctcaggcttcaacatcgaatacgccgcaggccccttcgccctattcttcatagccgaatacacaaacattattataataaacaccctcaccactacaatcttcctaggaacaacatatgacgcactctcccctgaactctacacaacatattttgtcaccaagaccctacttctaacctccctgttcttatgaattcgaacagcatacccccgattccgctacgaccaactcatacacctcctatgaaaaaacttcctaccactcaccctagcattacttatatgatatgtctccatacccattacaatctccagcattccccctcaaacctaagaaatatgtctgataaaagagttactttgatagagtaaataataggagcttaaacccccttatttctaggactatgagaatcgaacccatccctgagaatccaaaattctccgtgccacctatcacaccccatcctaaagtaaggtcagctaaataagctatcgggcccataccccgaaaatgttggttatacccttcccgtactaattaatcccctggcccaacccgtcatctactctaccatctttgcaggcacactcatcacagcgctaagctcgcactgattttttacctgagtaggcctagaaataaacatgctagcttttattccagttctaaccaaaaaaataaaccctcgttccacagaagctgccatcaagtatttcctcacgcaagcaaccgcatccataatccttctaatagctatcctcttcaacaatatactctccggacaatgaaccataaccaatactaccaatcaatactcatcattaataatcataatggctatagcaataaaactaggaatagccccctttcacttctgagtcccagaggttacccaaggcacccctctgacatccggcctgcttcttctcacatgacaaaaactagcccccatctcaatcatataccaaatctctccctcactaaacgtaagccttctcctcactctctcaatcttatccatcatagcaggcagttgaggtggattaaaccaaacccagctacgcaaaatcttagcatactcctcaattacccacataggatgaataatagcaattctaccgtacaaccctaacataaccattcttaatttaactatttatattatcctaactactaccgcattcctactactcaacttaaactccagcaccacgaccctactactatctcgcacctgaaacaagctaacatgactaacacccttaattccatccaccctcctctccctaggaggcctgcccccgctaaccggctttttgcccaaatgggccattatcgaagaattcacaaaaaacaatagcctcatcatccccaccatcatagccaccatcaccctccttaacctctacttctacctacgcctaatctactccacctcaatcacactactccccatatctaacaacgtaaaaataaaatgacagtttgaacatacaaaacccaccccattcctccccacactcatcacccttaccacgctactcctacctatctccccttttatactaataatcttatagaaatttaggttaaatacagaccaagagccttcaaagccctcagtaagttgcaatacttaatttctgtaacagctaaggactgcaaaaccccactctgcatcaactgaacgcaaatcagccactttaattaagctaagcccttactagaccaatgggacttaaacccacaaacacttagttaacagctaagcaccctaatcaactggcttcaatctacttctcccgccgccgggaaaaaaggcgggagaagccccggcaggtttgaagctgcttcttcgaatttgcaattcaatatgaaaatcacctcggagctggtaaaaagaggcctaacccctgtctttagatttacagtccaatgcttcactcagccattttacctcacccccactgatgttcgccgaccgttgactattctctacaaaccacaaagacattggaacactatacctattattcggcgcatgagctggagtcctaggcacagctctaagcctccttattcgagccgagctgggccagccaggcaaccttctaggtaacgaccacatctacaacgttatcgtcacagcccatgcatttgtaataatcttcttcatagtaatacccatcataatcggaggctttggcaactgactagttcccctaataatcggtgcccccgatatggcgtttccccgcataaacaacataagcttctgactcttacctccctctctcctactcctgctcgcatctgctatagtggaggccggagcaggaacaggttgaacagtctaccctcccttagcagggaactactcccaccctggagcctccgtagacctaaccatcttctccttacacctagcaggtgtctcctctatcttaggggccatcaatttcatcacaacaattatcaatataaaaccccctgccataacccaataccaaacgcccctcttcgtctgatccgtcctaatcacagcagtcctacttctcctatctctcccagtcctagctgctggcatcactatactactaacagaccgcaacctcaacaccaccttcttcgaccccgccggaggaggagaccccattctataccaacacctattctgatttttcggtcaccctgaagtttatattcttatcctaccaggcttcggaataatctcccatattgtaacttactactccggaaaaaaagaaccatttggatacataggtatggtctgagctatgatatcaattggcttcctagggtttatcgtgtgagcacaccatatatttacagtaggaatagacgtagacacacgagcatatttcacctccgctaccataatcatcgctatccccaccggcgtcaaagtatttagctgactcgccacactccacggaagcaatatgaaatgatctgctgcagtgctctgagccctaggattcatctttcttttcaccgtaggtggcctgactggcattgtattagcaaactcatcactagacatcgtactacacgacacgtactacgttgtagctcacttccactatgtcctatcaataggagctgtatttgccatcataggaggcttcattcactgatttcccctattctcaggctacaccctagaccaaacctacgccaaaatccatttcactatcatattcatcggcgtaaatctaactttcttcccacaacactttctcggcctatccggaatgccccgacgttactcggactaccccgatgcatacaccacatgaaacatcctatcatctgtaggctcattcatttctctaacagcagtaatattaataattttcatgatttgagaagccttcgcttcgaagcgaaaagtcctaatagtagaagaaccctccataaacctggagtgactatatggatgccccccaccctaccacacattcgaagaacccgtatacataaaatctagacaaaaaaggaaggaatcgaaccccccaaagctggtttcaagccaaccccatggcctccatgactttttcaaaaaggtattagaaaaaccatttcataactttgtcaaagttaaattataggctaaatcctatatatcttaatggcacatgcagcgcaagtaggtctacaagacgctacttcccctatcatagaagagcttatcacctttcatgatcacgccctcataatcattttccttatctgcttcctagtcctgtatgcccttttcctaacactcacaacaaaactaactaatactaacatctcagacgctcaggaaatagaaaccgtctgaactatcctgcccgccatcatcctagtcctcatcgccctcccatccctacgcatcctttacataacagacgaggtcaacgatccctcccttaccatcaaatcaattggccaccaatggtactgaacctacgagtacaccgactacggcggactaatcttcaactcctacatacttcccccattattcctagaaccaggcgacctgcgactccttgacgttgacaatcgagtagtactcccgattgaagcccccattcgtataataattacatcacaagacgtcttgcactcatgagctgtccccacattaggcttaaaaacagatgcaattcccggacgtctaaaccaaaccactttcaccgctacacgaccgggggtatactacggtcaatgctctgaaatctgtggagcaaaccacagtttcatgcccatcgtcctagaattaattcccctaaaaatctttgaaataggacccgtatttaccctatagcaccccctctaccccctctagagcccactgtaaagctaacttagcattaaccttttaagttaaagattaagagaaccaacacctctttacagtgaaatgccccaactaaatactaccgtatggcccaccataattacccccatactccttacactattcctcatcacccaactaaaaatattaaacacaaactaccacctacctccctcaccaaagcccataaaaataaaaaattataacaaaccctgagaaccaaaatgaacgaaaatctgttcgcttcattcattgcccccacaatcctaggcctacccgccgcagtactgatcattctatttccccctctattgatccccacctccaaatatctcatcaacaaccgactaatcaccacccaacaatgactaatcaaactaacctcaaaacaaatgataaccatacacaacactaaaggacgaacctgatctcttatactagtatccttaatcatttttattgccacaactaacctcctcggactcctgcctcactcatttacaccaaccacccaactatctataaacctagccatggccatccccttatgagcgggcgcagtgattataggctttcgctctaagattaaaaatgccctagcccacttcttaccacaaggcacacctacaccccttatccccatactagttattatcgaaaccatcagcctactcattcaaccaatagccctagccgtacgcctaaccgctaacattactgcaggccacctactcatgcacctaattggaagcgccaccctagcaatatcaaccattaaccttccctctacacttatcatcttcacaattctaattctactgactatcctagaaatcgctgtcgccttaatccaagcctacgttttcacacttctagtaagcctctacctgcacgacaacacataatgacccaccaatcacatgcctatcatatagtaaaacccagcccatgacccctaacaggggccctctcagccctcctaatgacctccggcctagccatgtgatttcacttccactccataacgctcctcatactaggcctactaaccaacacactaaccatataccaatgatggcgcgatgtaacacgagaaagcacataccaaggccaccacacaccacctgtccaaaaaggccttcgatacgggataatcctatttattacctcagaagtttttttcttcgcaggatttttctgagccttttaccactccagcctagcccctaccccccaattaggagggcactggcccccaacaggcatcaccccgctaaatcccctagaagtcccactcctaaacacatccgtattactcgcatcaggagtatcaatcacctgagctcaccatagtctaatagaaaacaaccgaaaccaaataattcaagcactgcttattacaattttactgggtctctattttaccctcctacaagcctcagagtacttcgagtctcccttcaccatttccgacggcatctacggctcaacattttttgtagccacaggcttccacggacttcacgtcattattggctcaactttcctcactatctgcttcatccgccaactaatatttcactttacatccaaacatcactttggcttcgaagccgccgcctgatactggcattttgtagatgtggtttgactatttctgtatgtctccatctattgatgagggtcttactcttttagtataaatagtaccgttaacttccaattaactagttttgacaacattcaaaaaagagtaataaacttcgccttaattttaataatcaacaccctcctagccttactactaataattattacattttgactaccacaactcaacggctacatagaaaaatccaccccttacgagtgcggcttcgaccctatatcccccgcccgcgtccctttctccataaaattcttcttagtagctattaccttcttattatttgatctagaaattgccctccttttacccctaccatgagccctacaaacaactaacctgccactaatagttatgtcatccctcttattaatcatcatcctagccctaagtctggcctatgagtgactacaaaaaggattagactgaaccgaattggtatatagtttaaacaaaacgaatgatttcgactcattaaattatgataatcatatttaccaaatgcccctcatttacataaatattatactagcatttaccatctcacttctaggaatactagtatatcgctcacacctcatatcctccctactatgcctagaaggaataatactatcgctgttcattatagctactctcataaccctcaacacccactccctcttagccaatattgtgcctattgccatactagtctttgccgcctgcgaagcagcggtgggcctagccctactagtctcaatctccaacacatatggcctagactacgtacataacctaaacctactccaatgctaaaactaatcgtcccaacaattatattactaccactgacatgactttccaaaaaacacataatttgaatcaacacaaccacccacagcctaattattagcatcatccctctactattttttaaccaaatcaacaacaacctatttagctgttccccaaccttttcctccgaccccctaacaacccccctcctaatactaactacctgactcctacccctcacaatcatggcaagccaacgccacttatccagtgaaccactatcacgaaaaaaactctacctctctatactaatctccctacaaatctccttaattataacattcacagccacagaactaatcatattttatatcttcttcgaaaccacacttatccccaccttggctatcatcacccgatgaggcaaccagccagaacgcctgaacgcaggcacatacttcctattctacaccctagtaggctcccttcccctactcatcgcactaatttacactcacaacaccctaggctcactaaacattctactactcactctcactgcccaagaactatcaaactcctgagccaacaacttaatatgactagcttacacaatagcttttatagtaaagatacctctttacggactccacttatgactccctaaagcccatgtcgaagcccccatcgctgggtcaatagtacttgccgcagtactcttaaaactaggcggctatggtataatacgcctcacactcattctcaaccccctgacaaaacacatagcctaccccttccttgtactatccctatgaggcataattataacaagctccatctgcctacgacaaacagacctaaaatcgctcattgcatactcttcaatcagccacatagccctcgtagtaacagccattctcatccaaactccctgaagcttcaccggcgcagtcattctcataatcgcccacggacttacatcctcattactattctgcctagcaaactcaaactacgaacgcactcacagtcgcatcataatcctctctcaaggacttcaaactctactcccactaatagctttttgatgacttctagcaagcctcgctaacctcgccttaccccccactattaacctactgggagaactctctgtgctagtaaccacgttctcctgatcaaatatcactctcctacttacgggactcaacatactagtcacagccctatactccctctacatatttaccacaacacaatggggctcactcacccaccacattaacaacataaaaccctcattcacacgagaaaacaccctcatgttcatacacctatcccccattctcctcctatccctcaaccccgacatcattaccgggttttcctcttgtaaatatagtttaaccaaaacatcagattgtgaatctgacaacagaggcttacgaccccttatttaccgagaaagctcacaagaactgctaactcatgcccccatgtctaacaacatggctttctcaacttttaaaggataacagctatccattggtcttaggccccaaaaattttggtgcaactccaaataaaagtaataaccatgcacactactataaccaccctaaccctgacttccctaattccccccatccttaccaccctcgttaaccccaacaaaaaaaactcatacccccattatgtaaaatccattgtcgcatccacctttattatcagtctcttccccacaacaatattcatgtgcctagaccaagaagttattatctcgaactgacactgagccacaacccaaacaacccagctctccctaagcttcaaactagactacttctccataatattcatccctgtagcattgttcgttacatggtccatcatagaattctcactgtgatatataaactcagacccaaacattaatcagttcttcaaatatctactcattttcctaattaccatactaatcttagttaccgctaacaacctattccaactgttcatcggctgagagggcgtaggaattatatccttcttgctcatcagttgatgatacgcccgagcagatgccaacacagcagccattcaagcaatcctatacaaccgtatcggcgatatcggtttcatcctcgccttagcatgatttatcctacactccaactcatgagacccacaacaaatagcccttctaaacgctaatccaagcctcaccccactactaggcctcctcctagcagcagcaggcaaatcagcccaattaggtctccacccctgactcccctcagccatagaaggccccaccccagtctcagccctactccactcaagcactatagttgtagcaggaatcttcttactcatccgcttccaccccctagcagaaaatagcccactaatccaaactctaacactatgcttaggcgctatcaccactctgttcgcagcagtctgcgcccttacacaaaatgacatcaaaaaaatcgtagccttctccacttcaagtcagctaggactcataatagttacaatcggcatcaaccaaccacacctagcattcctgcacatctgtacccacgccttcttcaaagccatactatttatgtgctccgggtccatcatccacaaccttaacaatgaacaagatattcgaaaaataggaggactactcaaaaccatacctctcacttcaacctccctcaccattggcagcctagcattagcaggaatacctttcctcacaggtttctactccaaagaccacatcatcgaaaccgcaaacatatcatacacaaacgcctgagccctatctattactctcatcgctacctccctgacaagcgcctatagcactcgaataattcttctcaccctaacaggtcaacctcgcttccccacccttactaacattaacgaaaataaccccaccctactaaaccccattaaacgcctggcagccggaagcctattcgcaggatttctcattactaacaacatttcccccgcatcccccttccaaacaacaatccccctctacctaaaactcacagccctcgctgtcactttcctaggacttctaacagccctagacctcaactacctaaccaacaaacttaaaataaaatccccactatgcacattttatttctccaacatactcggattctaccctagcatcacacaccgcacaatcccctatctaggccttcttacgagccaaaacctgcccctactcctcctagacctaacctgactagaaaagctattacctaaaacaatttcacagcaccaaatctccacctccatcatcacctcaacccaaaaaggcataattaaactttacttcctctctttcttcttcccactcatcctaaccctactcctaatcacataacctattcccccgagcaatctcaattacaatatatacaccaacaaacaatgttcaaccagtaactactactaatcaacgcccataatcatacaaagcccccgcaccaataggatcctcccgaatcaaccctgacccctctccttcataaattattcagcttcctacactattaaagtttaccacaaccaccaccccatcatactctttcacccacagcaccaatcctacctccatcgctaaccccactaaaacactcaccaagacctcaacccctgacccccatgcctcaggatactcctcaatagccatcgctgtagtatatccaaagacaaccatcattccccctaaataaattaaaaaaactattaaacccatataacctcccccaaaattcagaataataacacacccgaccacaccgctaacaatcaatactaaacccccataaataggagaaggcttagaagaaaaccccacaaaccccattactaaacccacactcaacagaaacaaagcatacatcattattctcgcacggactacaaccacgaccaatgatatgaaaaaccatcgttgtatttcaactacaagaacaccaatgaccccaatacgcaaaattaaccccctaataaaattaattaaccactcattcatcgacctccccaccccatccaacatctccgcatgatgaaacttcggctcactccttggcgcctgcctgatcctccaaatcaccacaggactattcctagccatgcactactcaccagacgcctcaaccgccttttcatcaatcgcccacatcactcgagacgtaaattatggctgaatcatccgctaccttcacgccaatggcgcctcaatattctttatctgcctcttcctacacatcgggcgaggcctatattacggatcatttctctactcagaaacctgaaacatcggcattatcctcctgcttgcaactatagcaacagccttcataggctatgtcctcccgtgaggccaaatatcattctgaggggccacagtaattacaaacttactatccgccatcccatacattgggacagacctagttcaatgaatctgaggaggctactcagtagacagtcccaccctcacacgattctttacctttcacttcatcttgcccttcattattgcagccctagcagcactccacctcctattcttgcacgaaacgggatcaaacaaccccctaggaatcacctcccattccgataaaatcaccttccacccttactacacaatcaaagacgccctcggcttacttctcttccttctctccttaatgacattaacactattctcaccagacctcctaggcgacccagacaattataccctagccaaccccttaaacacccctccccacatcaagcccgaatgatatttcctattcgcctacacaattctccgatccgtccctaacaaactaggaggcgtccttgccctattactatccatcctcatcctagcaataatccccatcctccatatatccaaacaacaaagcataatatttcgcccactaagccaatcactttattgactcctagccgcagacctcctcattctaacctgaatcggaggacaaccagtaagctacccctttaccatcattggacaagtagcatccgtactatacttcacaacaatcctaatcctaataccaactatctccctaattgaaaacaaaatactcaaatggccctgtccttgtagtataaactaatacaccagtcttgtaaaccggagatgaaaacctttttccaaggacaaatcagagaaaaagtctttaactccaccattagcacccaaagctaagattctaatttaaactattctctgttctttcatggggaagcagatttgggtaccacccaagtattgactcacccatcaacaaccgctatgtatttcgtacattactgccagccaccatgaatattgtacggtaccataaatacttgaccacctgtagtacataaaaacccaatccacatcaaaaccccctccccatgcttacaagcaagtacagcaatcaaccttcaactatcatacatcaactgtaactccaaagccacccctcacccactaggataccaacaaacctacctacccttaacagtacatagtacataaagccatttaccgtacatagcacattacagtcaaatcccttctcgtccccatggatgacccccctcagataggggtcccttgaccaccatcctccgtgaaatcaatatcccgcacaagagtgctactctcctcgctccgggcccataacacttgggggtagctaaagtgaactgtatccgacatctggttcctacttcagggccataaagcctaaatagcccacacgttccccttaaataagacatcacgatg

SEQ ID NO: 395 - DNA, 16570 bp, Homo sapiens mitochondrial
  3108: "n" refers to a nucleotide at position 3107 of the Cambridge Reference Sequence (CRS, Anderson et al. 1981 Nature 290:457-465), later determined to be absent from the human mtDNA sequence according to the revised CRS (rCRS, Andrews et al. 1999 Nature Genetics 23:147); "n" therefore represents a single nucleotide deletion at a position corresponding to nucleotide 3107 of SEQ ID NO:1 as provided herein.
gatcacaggtctatcaccctattaaccactcacgggagctctccatgcatttggtattttcgtctggggggtgtgcacgcgatagcattgcgagacgctggagccggagcaccctatgtcgcagtatctgtctttgattcctgcctcatcctattatttatcgcacctacgttcaatattacaggcgaacatacttactaaagtgtgttaattaattaatgcttgtaggacataataataacaattgaatgtctgcacagccgctttccacacagacatcataacaaaaaatttccaccaaaccccccctcccccgccttctggccacagcacttaaacacatctctgccaaaccccaaaaacaaagaaccctaacaccagcctaaccagatttcaaattttatcttttggcggtatgcacttttaacagtcaccccccaactaacacattattttcccctcccactcccatactactaatctcatcaatacaacccccgcccatcctacccagcacacacacaccgctgctaaccccataccccgaaccaaccaaaccccaaagacaccccccacagtttatgtagcttacctcctcaaagcaatacactgaaaatgtttagacgggctcacatcaccccataaacaaataggtttggtcctagcctttctattagctcttagtaagattacacatgcaagcatccccattccagtgagttcaccctctaaatcaccacgatcaaaagggacaagcatcaagcacgcagcaatgcagctcaaaacgcttagcctagccacacccccacgggaaacagcagtgattaacctttagcaataaacgaaagtttaactaagctatactaaccccagggttggtcaatttcgtgccagccaccgcggtcacacgattaacccaagtcaatagaagccggcgtaaagagtgttttagatcaccccctccccaataaagctaaaactcacctgagttgtaaaaaactccagttgacacaaaatagactacgaaagtggctttaacatatctgaacacacaatagctaagacccaaactgggattagataccccactatgcttagccctaaacctcaacagttaaatcaacaaaactgctcgccagaacactacgagccacagcttaaaactcaaaggacctggcggtgcttcatatccctctagaggagcctgttctgtaatcgataaaccccgatcaacctcaccacctcttgctcagcctatataccgccatcttcagcaaaccctgatgaaggctacaaagtaagcgcaagtacccacgtaaagacgttaggtcaaggtgtagcccatgaggtggcaagaaatgggctacattttctaccccagaaaactacgatagcccttatgaaacttaagggtcgaaggtggatttagcagtaaactgagagtagagtgcttagttgaacagggccctgaagcgcgtacacaccgcccgtcaccctcctcaagtatacttcaaaggacatttaactaaaacccctacgcatttatatagaggagacaagtcgtaacatggtaagtgtactggaaagtgcacttggacgaaccagagtgtagcttaacacaaagcacccaacttacacttaggagatttcaacttaacttgaccgctctgagctaaacctagccccaaacccactccaccttactaccagacaaccttagccaaaccatttacccaaataaagtataggcgatagaaattgaaacctggcgcaatagatatagtaccgcaagggaaagatgaaaaattataaccaagcataatatagcaaggactaacccctataccttctgcataatgaattaactagaaataactttgcaaggagaaccaaagctaagacccccgaaaccagacgagctacctaagaacagctaaaagagcacacccgtctatgtagcaaaatagtgggaagatttataggtagaggcgacaaacctaccgagcctggtgatagctggttgtccaagatagaatcttagttcaactttaaatttgcccacagaaccctctaaatccccttgtaaatttaactgttagtccaaagaggaacagctctttggacactaggaaaaaaccttgtagagagagtaaaaaatttaacacccatagtaggcctaaaagcagccaccaattaagaaagcgttcaagctcaacacccactacctaaaaaatcccaaacatataactgaactcctcacacccaattggaccaatctatcaccctatagaagaactaatgttagtataagtaacatgaaaacattctcctccgcataagcctgcgtcagattaaaacactgaactgacaattaacagcccaatatctacaatcaaccaacaagtcattattaccctcactgtcaacccaacacaggcatgctcataaggaaaggttaaaaaaagtaaaaggaactcggcaaatcttaccccgcctgtttaccaaaaacatcacctctagcatcaccagtattagaggcaccgcctgcccagtgacacatgtttaacggccgcggtaccctaaccgtgcaaaggtagcataatcacttgttccttaaatagggacctgtatgaatggctccacgagggttcagctgtctcttacttttaaccagtgaaattgacctgcccgtgaagaggcgggcatgacacagcaagacgagaagaccctatggagctttaatttattaatgcaaacagtacctaacaaacccacaggtcctaaactaccaaacctgcattaaaaatttcggttggggcgacctcggagcagaacccaacctccgagcagtacatgctaagacttcaccagtcaaagcgaactactatactcaattgatccaataacttgaccaacggaacaagttaccctagggataacagcgcaatcctattctagagtccatatcaacaatagggtttacgacctcgatgttggatcaggacatcccgatggtgcagccgctattaaaggttcgtttgttcaacgattaaagtcctacgtgatctgagttcagaccggagtaatccaggtcggtttctatctacnttcaaattcctccctgtacgaaaggacaagagaaataaggcctacttcacaaagcgccttcccccgtaaatgatatcatctcaacttagtattatacccacacccacccaagaacagggtttgttaagatggcagagcccggtaatcgcataaaacttaaaactttacagtcagaggttcaattcctcttcttaacaacatacccatggccaacctcctactcctcattgtacccattctaatcgcaatggcattcctaatgcttaccgaacgaaaaattctaggctatatacaactacgcaaaggccccaacgttgtaggcccctacgggctactacaacccttcgctgacgccataaaactcttcaccaaagagcccctaaaacccgccacatctaccatcaccctctacatcaccgccccgaccttagctctcaccatcgctcttctactatgaacccccctccccatacccaaccccctggtcaacctcaacctaggcctcctatttattctagccacctctagcctagccgtttactcaatcctctgatcagggtgagcatcaaactcaaactacgccctgatcggcgcactgcgagcagtagcccaaacaatctcatatgaagtcaccctagccatcattctactatcaacattactaataagtggctcctttaacctctccacccttatcacaacacaagaacacctctgattactcctgccatcatgacccttggccataatatgatttatctccacactagcagagaccaaccgaacccccttcgaccttgccgaaggggagtccgaactagtctcaggcttcaacatcgaatacgccgcaggccccttcgccctattcttcatagccgaatacacaaacattattataataaacaccctcaccactacaatcttcctaggaacaacatatgacgcactctcccctgaactctacacaacatattttgtcaccaagaccctacttctaacctccctgttcttatgaattcgagcagcatacccccgattccgctacgaccaactcatacacctcctatgaaaaaacttcctaccactcaccctagcattacttatatgacatgtctccatacccattacaatctccagcattccccctcaaacctaagaaatatgtctgataaaagagttactttgatagagtaaataataggagcttaaacccccttatttctaggactatgagaatcgaacccatccctgagaatccaaaattctccgtgccacctatcacaccccatcctaaagtaaggtcagctaaataagctatcgggcccataccccgaaaatgttggttatacccttcccgtactaattaatcccctggcccaacccgtcatctactctaccatctttgcaggcacactcatcacagcgctaagctcgcactgattttttacctgagtaggcctagaaataaacatgctagcttttattccagttctaaccaaaaaaataaaccctcgttccacagaagctgccatcaagtatttcctcacgcaagcaaccgcatccataatccttctaatagctatcctcttcaacaatatactctccggacaatgaaccataaccaatactaccaatcaatactcatcattaataatcataatggctatagcaataaaactaggaatagccccctttcacttctgagtcccagaggttacccaaggcacccctctgacatccggcctgcttcttctcacatgacaaaaactagcccccatctcaatcatataccaaatctctccctcactagacgtaagccttctcctcactctctcaatcttatccatcatagcaggcagttgaggtggattaaaccaaacccagctacgcaaaatcttagcatactcctcaattacccacataggatgaataatagcagttctaccgtacaaccctaacataaccattcttaatttaactatttatattatcctaactactaccgcattcctactactcaacttaaactccagcaccacgaccctactactatctcgcacctgaaacaagctaacatgactaacacccttaattccatccaccctcctctccctaggaggcctgcccccgctaaccggctttttgcccaaatgggccattatcgaagaattcacaaaaaacaatagcctcatcatccccaccatcatagccaccatcaccctccttaacctctacttctacctacgcctaatctactccacctcaatcacactactccccatatctaacaacgtaaaaataaaatgacagtttgaacatacaaaacccaccccattcctccccacactcatcgcccttaccacgctactcctacctatctccccttttatactaataatcttatagaaatttaggttaaatacagaccaagagccttcaaagccctcagtaagttgcaatacttaatttctgtaacagctaaggactgcaaaaccccactctgcatcaactgaacgcaaatcagccactttaattaagctaagcccttactagaccaatgggacttaaacccacaaacacttagttaacagctaagcaccctaatcaactggcttcaatctacttctcccgccgccgggaaaaaaggcgggagaagccccggcaggtttgaagctgcttcttcgaatttgcaattcaatatgaaaatcacctcggagctggtaaaaagaggcctaacccctgtctttagatttacagtccaatgcttcactcagccattttacctcacccccactgatgttcgccgaccgttgactattctctacaaaccacaaagacattggaacactatacctattattcggcgcatgagctggagtcctaggcacagctctaagcctccttattcgagccgagctgggccagccaggcaaccttctaggtaacgaccacatctacaacgttatcgtcacagcccatgcatttgtaataatcttcttcatagtaatacccatcataatcggaggctttggcaactgactagttcccctaataatcggtgcccccgatatggcgtttccccgcataaacaacataagcttctgactcttacctccctctctcctactcctgctcgcatctgctatagtggaggccggagcaggaacaggttgaacagtctaccctcccttagcagggaactactcccaccctggagcctccgtagacctaaccatcttctccttacacctagcaggtgtctcctctatcttaggggccatcaatttcatcacaacaattatcaatataaaaccccctgccataacccaataccaaacgcccctcttcgtctgatccgtcctaatcacagcagtcctacttctcctatctctcccagtcctagctgctggcatcactatactactaacagaccgcaacctcaacaccaccttcttcgaccccgccggaggaggagaccccattctataccaacacctattctgatttttcggtcaccctgaagtttatattcttatcctaccaggcttcggaataatctcccatattgtaacttactactccggaaaaaaagaaccatttggatacataggtatggtctgagctatgatatcaattggcttcctagggtttatcgtgtgagcacaccatatatttacagtaggaatagacgtagacacacgagcatatttcacctccgctaccataatcatcgctatccccaccggcgtcaaagtatttagctgactcgccacactccacggaagcaatatgaaatgatctgctgcagtgctctgagccctaggattcatctttcttttcaccgtaggtggcctgactggcattgtattagcaaactcatcactagacatcgtactacacgacacgtactacgttgtagctcacttccactatgtcctatcaataggagctgtatttgccatcataggaggcttcattcactgatttcccctattctcaggctacaccctagaccaaacctacgccaaaatccatttcactatcatattcatcggcgtaaatctaactttcttcccacaacactttctcggcctatccggaatgccccgacgttactcggactaccccgatgcatacaccacatgaaacatcctatcatctgtaggctcattcatttctctaacagcagtaatattaataattttcatgatttgagaagccttcgcttcgaagcgaaaagtcctaatagtagaagaaccctccataaacctggagtgactatatggatgccccccaccctaccacacattcgaagaacccgtatacataaaatctagacaaaaaaggaaggaatcgaaccccccaaagctggtttcaagccaaccccatggcctccatgactttttcaaaaaggtattagaaaaaccatttcataactttgtcaaagttaaattataggctaaatcctatatatcttaatggcacatgcagcgcaagtaggtctacaagacgctacttcccctatcatagaagagcttatcacctttcatgatcacgccctcataatcattttccttatctgcttcctagtcctgtatgcccttttcctaacactcacaacaaaactaactaatactaacatctcagacgctcaggaaatagaaaccgtctgaactatcctgcccgccatcatcctagtcctcatcgccctcccatccctacgcatcctttacataacagacgaggtcaacgatccctcccttaccatcaaatcaattggccaccaatggtactgaacctacgagtacaccgactacggcggactaatcttcaactcctacatacttcccccattattcctagaaccaggcgacctgcgactccttgacgttgacaatcgagtagtactcccgattgaagcccccattcgtataataattacatcacaagacgtcttgcactcatgagctgtccccacattaggcttaaaaacagatgcaattcccggacgtctaaaccaaaccactttcaccgctacacgaccgggggtatactacggtcaatgctctgaaatctgtggagcaaaccacagtttcatgcccatcgtcctagaattaattcccctaaaaatctttgaaatagggcccgtatttaccctatagcaccccctctaccccctctagagcccactgtaaagctaacttagcattaaccttttaagttaaagattaagagaaccaacacctctttacagtgaaatgccccaactaaatactaccgtatggcccaccataattacccccatactccttacactattcctcatcacccaactaaaaatattaaacacaaactaccacctacctccctcaccaaagcccataaaaataaaaaattataacaaaccctgagaaccaaaatgaacgaaaatctgttcgcttcattcattgcccccacaatcctaggcctacccgccgcagtactgatcattctatttccccctctattgatccccacctccaaatatctcatcaacaaccgactaatcaccacccaacaatgactaatcaaactaacctcaaaacaaataataaccatacacaacactaaaggacgaacctgatctcttatactagtatccttaatcatttttattgccacaactaacctcctcggactcctgcctcactcatttacaccaaccacccaactatctataaacctagccatggccatccccttatgagcgggcgcagtgattataggctttcgctctaagattaaaaatgccctagcccacttcttaccacaaggcacacctacaccccttatccccatactagttattatcgaaaccatcagcctactcattcaaccaatagccctggccgtacgcctaaccgctaacattactgcaggccacctactcatgcacctaattggaagcgccaccctagcaatatcaaccattaaccttccctctacacttatcatcttcacaattctaattctactgactatcctagaaatcgctgtcgccttaatccaagcctacgttttcacacttctagtaagcctctacctgcacgacaacacataatgacccaccaatcacatgcctatcatatagtaaaacccagcccatgacccctaacaggggccctctcagccctcctaatgacctccggcctagccatgtgatttcacttccactccataacgctcctcatactaggcctactaaccaacacactaaccatataccaatgatggcgcgatgtaacacgagaaagcacataccaaggccaccacacaccacctgtccaaaaaggccttcgatacgggataatcctatttattacctcagaagtttttttcttcgcaggatttttctgagccttttaccactccagcctagcccctaccccccaattaggagggcactggcccccaacaggcatcaccccgctaaatcccctagaagtcccactcctaaacacatccgtattactcgcatcaggagtatcaatcacctgagctcaccatagtctaatagaaaacaaccgaaaccaaataattcaagcactgcttattacaattttactgggtctctattttaccctcctacaagcctcagagtacttcgagtctcccttcaccatttccgacggcatctacggctcaacattttttgtagccacaggcttccacggacttcacgtcattattggctcaactttcctcactatctgcttcatccgccaactaatatttcactttacatccaaacatcactttggcttcgaagccgccgcctgatactggcattttgtagatgtggtttgactatttctgtatgtctccatctattgatgagggtcttactcttttagtataaatagtaccgttaacttccaattaactagttttgacaacattcaaaaaagagtaataaacttcgccttaattttaataatcaacaccctcctagccttactactaataattattacattttgactaccacaactcaacggctacatagaaaaatccaccccttacgagtgcggcttcgaccctatatcccccgcccgcgtccctttctccataaaattcttcttagtagctattaccttcttattatttgatctagaaattgccctccttttacccctaccatgagccctacaaacaactaacctgccactaatagttatgtcatccctcttattaatcatcatcctagccctaagtctggcctatgagtgactacaaaaaggattagactgaaccgaattggtatatagtttaaacaaaacgaatgatttcgactcattaaattatgataatcatatctaccaaatgcccctcatttacataaatattatactagcatttaccatctcacttctaggaatactagtatatcgctcacacctcatatcctccctactatgcctagaaggaataatactatcgctgttcattatagctactctcataaccctcaacacccactccctcttagccaatattgtgcctattgccatactagtctttgccgcctgcgaagcagcggtgggcctagccctactagtctcaatctccaacacatatggcctagactacgtacataacctaaacctactccaatgctaaaactaatcgtcccaacaattatattactaccactgacatgactttccaaaaaacacataatttgaatcaacacaaccacccacagcctaattattagcatcatccctctactattttttaaccaaatcaacaacaacctatttagctgttccccaaccttttcctccgaccccctaacaacccccctcctaatactaactacctgactcctacccctcacaatcatggcaagccaacgccacttatccagtgaaccactatcacgaaaaaaactctacctctctatactaatctccctacaaatctccttaattataacattcacagccacagaactaatcatattttatatcttcttcgaaaccacacttatccccaccttggctatcatcacccgatgaggcaaccagccagaacgcctgaacgcaggcacatacttcctattctacaccctagtaggctcccttcccctactcatcgcactgatttacactcacaacaccctaggctcactaaacattctactactcactctcactgcccaagaactatcaaactcctgagccaacaacttaatatgactagcttacacaatagcttttatagtaaagatacctctttacggactccacttatgactccctaaagcccatgtcgaagcccccatcgctgggtcaatagtacttgccgcagtactcttaaaactaggcggctatggtataatacgcctcacactcattctcaaccccctgacaaaacacatagcctaccccttccttgtactatccctatgaggcataattataacaagctccatctgcctacgacaaacagacctaaaatcgctcattgcatactcttcaatcagccacatagccctcgtagtaacagccattctcatccaaaccccctgaagcttcaccggcgcagtcattctcataatcgcccacggacttacatcctcattactattctgcctagcaaactcaaactacgaacgcactcacagtcgcatcataatcctctctcaaggacttcaaactctgctcccactaatagctttttgatgacttctagcaagcctcgctaacctcgccttaccccccactattaacctactgggagaactctctgtgctagtaaccacgttctcctgatcaaatatcactctcctacttacaggactcaacatactagtcacagccctatactccctctacatatttaccacaacacaatggggctcactcacccaccacattaacaacataaaaccctcattcacacgagaaaacaccctcatgttcatacacctatcccccattctcctcctatccctcaaccccgacatcattaccgggttttcctcttgtaaatatagtttaaccaaaacatcagattgtgaatctgacaacagaggcttacgaccccttatttaccgagaaagctcacaagaactgctaactcatgcccccatgtctaacaacatggctttctcaacttttaaaggataacagctatccattggtcttaggccccaaaaattttggtgcaactccaaataaaagtaataaccatgcacactactataaccaccctaaccctgacttccctaattccccccatccttaccaccctcgttaaccctaacaaaaaaaactcatacccccattatgtaaaatccattgtcgcatccacctttattatcagtctcttccccacaacaatattcatgtgcctagaccaagaagttattatctcgaactgacactgagccacaacccaaacaacccagctctccctaagcttcaaactagactacttctccataatattcatccctgtagcattgttcgttacatggtccatcatagaattctcactgtgatatataaactcagacccaaacattaatcagttcttcaaatatctactcatcttcctaattaccatactaatcttagttaccgctaacaacctattccaactgttcatcggctgagagggcgtaggaattatatccttcttgctcatcagttgatgatacgcccgagcagatgccaacacagcagccattcaagcaatcctatacaaccgtatcggcgatatcggtttcatcctcgccttagcatgatttatcctacactccaactcatgagacccacaacaaatagcccttctaaacgctaatccaagcctcaccccactactaggcctcctcctagcagcagcaggcaaatcagcccaattaggtctccacccctgactcccctcagccatagaaggccccaccccagtctcagccctactccactcaagcactatagttgtagcaggaatcttcttactcatccgcttccaccccctagcagaaaatagcccactaatccaaactctaacactatgcttaggcgctatcaccactctgttcgcagcagtctgcgcccttacacaaaatgacatcaaaaaaatcgtagccttctccacttcaagtcaactaggactcataatagttacaatcggcatcaaccaaccacacctagcattcctgcacatctgtacccacgccttcttcaaagccatactatttatgtgctccggatccatcatccacaaccttaacaatgaacaagatattcgaaaaataggaggactactcaaaaccatacctctcacttcaacctccctcaccattggcagcctagcattagcaggaatacctttcctcacaggtttctactccaaagaccacatcatcgaaaccgcaaacatatcatacacaaacgcctgagccctatctattactctcatcgctacctccctgacaagcgcctatagcactcgaataattcttctcaccctaacaggtcaacctcgcttccccacccttactaacattaacgaaaataaccccaccctactaaaccccattaaacgcctggcagccggaagcctattcgcaggattcctcattactaacaacatttccccagcatcccccttccaaacaacaatccccctctacctaaaactcacagccctcgctgtcactttcctaggacttctaacagccctagacctcaactacctaaccaacaaacttaaaataaaatccccactatgcacattttatttctccaacatactcggattctaccctagcatcacacaccgcacaatcccctatctaggccttctcacgagccaaaacctgcccctactcctcctagacctaacctgactagaaaagctattacctaaaacaatttcacagcaccaaatctccacctccatcatcacctcaacccaaaaaggcataattaaactttacttcctctctttcttcttcccactcatcctaaccctactcctaatcacataacctattcccccgagcaatctcaattacaatatatacaccaacaaacaatgttcaaccagtaactactactaatcaacgcccatagtcatacaaagcccccgcaccaataggatcctcccgaatcaaccctgacccctctccttcataaattattcagcttcctacactattaaagtttaccacaaccaccaccccatcatactctttcacccacagcaccaatcctacctccatcgctaaccccactaaaacactcaccaagacctcaacccctgacccccatgcctcaggatactcctcaatagccatcgctgtagtatatccaaagacaaccatcattccccctaaataaattaaaaaaactattaaacccatataacctcccccaaaattcagaataataacacacccgaccacaccgctaacaatcaatactaaacccccataaataggagaaggcttagaagaaaaccccacaaaccccattactaaacccacactcaacagaaacaaagcatacatcattattctcgcacgggctacaaccacgaccaatgatatgaaaaaccatcgttgtatttcaactacaagaacaccaatgaccccaatacgcaaaattaaccccctaataaaattaattaaccactcattcatcgacctccccaccccatccaacatctccgcatgatgaaacttcggctcactccttggcgcctgcctgatcctccaaatcaccacaggactattcctagccatacactactcaccagacgcctcaaccgccttttcatcaatcgcccacatcactcgagacgtaaattatggctgaatcatccgctaccttcacgccaatggcgcctcaatattctttatctgcctcttcctacacatcgggcgaggcctatattacggatcatttctctactcagaaacctgaaacatcggcattatcctcctgcttgcaactatagcaacagccttcataggctatgtcctcccgtgaggccaaatatcattctgaggggccacagtaattacaaacttactatccgccatcccatacattgggacagacctagttcaatgaatctgaggaggctactcagtagacagtcccaccctcacgcgattctttacctttcacttcatcttgcccttcattattgcagccctagcagcactccacctcctattcttgcacgaaacgggatcaaacaaccccctaggaatcacctcccattccgataaaatcaccttccacccttactacacaatcaaagacgccctcggcttacttctcttcattctctccttaatgacattaacactattctcaccagacctcctaggcgacccagacaattataccctagccaaccccttaaacacccctccccacatcaagcccgaatgatatttcctattcgcctacacaattctccgatccgtccctaacaagctaggaggcgtccttgccctattactatccatcctcatcctagcaataatccccatcctccatatatccaaacaacaaagcataatatttcgcccactaagccaatcactttattgactcctagccgcagacctcctcattctaacctgaatcggaggacaaccagtaagctacccttttaccatcattggacaagtagcatccgtactatacttcacaacaatcctaatcctaataccaactatctccctaattgaaaacaaaatactcaaatgggcctgtccttgtagtataaactaatacaccagtcttgtaaaccgaagatgaaaacctttttccaaggacaaatcagagaaaaagtctttaactccaccattagcacccaaagctaagattctaatttaaactattctctgttctttcatggggaagcagatttgggtaccacccaagtattgactcacccatcaacaaccgctatgtatttcgtacattactgccagccaccatgaatattgcacggtaccataaatacttgaccacctgtagtacataaaaacccaatccacatcaaaaccccctccccatgcttacaagcaagtacagcaatcaaccctcaactatcacacatcaactgcaactccaaagccacccctcacccactaggataccaacaaacctacccatctttaacagtacatagtacataaagccatctaccgtacatagcacattacagtcaaatcccttctcgtccccatggatgacccccctcagataggggtcccttggccaccatcctccgtgaaatcaatatcccgcacaagagtgctactctcctcgctccgggcccataacacttgggggtagctaaagtgaactgtatccgacatctggttcctacttcagggccataaagcctaaatagcccacacgttccccttaaataagacatcacgatg

SEQ ID NO: 396 - DNA, 16571 bp, Homo sapiens mitochondrial
  3109: "n" refers to a nucleotide at position 3107 of the Cambridge Reference Sequence (CRS, Anderson et al. 1981 Nature 290:457-465), later determined to be absent from the human mtDNA sequence according to the revised CRS (rCRS, Andrews et al. 1999 Nature Genetics 23:147); "n" therefore represents a single nucleotide deletion at a position corresponding to nucleotide 3107 of SEQ ID NO:1 as provided herein.
gatcacaggtctatcaccctattaaccactcacgggagctctccatgcatttggtattttcgtctggggggtatgcacgcgatagcattgcgagacgctggagccggagcaccctatgtcgcagtatctgtctttgattcctgcctcatcctattatttatcgcacctacgttcaatattacaggcgaacatacttactaaagtgtgttaattaattaatgcttgtaggacataataataacaattgaatgtctgcacagccgctttccacacagacatcataacaaaaaatttccaccaaaccccccctcccccccgcttctggccacagcacttaaacacatctctgccaaaccccaaaaacaaagaaccctaacaccagcctaaccagatttcaaattttatcttttggcggtatgcacttttaacagtcaccccccaactaacacattattttcccctcccactcccatactactaatctcatcaatacaacccccgcccatcctacccagcacacacacaccgctgctaaccccataccccgaaccaaccaaaccccaaagacaccccccacagtttatgtagcttacctcctcaaagcaatacactgaaaatgtttagacgggctcacatcaccccataaacaaataggtttggtcctagcctttctattagctcttagtaagattacacatgcaagcatccccgttccagtgagttcaccctctaaatcaccacgatcaaaagggacaagcatcaagcacgcagcaatgcagctcaaaacgcttagcctagccacacccccacgggaaacagcagtgattaacctttagcaataaacgaaagtttaactaagctatactaaccccagggttggtcaatttcgtgccagccaccgcggtcacacgattaacccaagtcaatagaagccggcgtaaagagtgttttagatcaccccctccccaataaagctaaaactcacctgagttgtaaaaaactccagttgacacaaaatagactacgaaagtggctttaacatatctgaacacacaatagctaagacccaaactgggattagataccccactatgcttagccctaaacctcaacagttaaatcaacaaaactgctcgccagaacactacgagccacagcttaaaactcaaaggacctggcggtgcttcatatccctctagaggagcctgttctgtaatcgataaaccccgatcaacctcaccacctcttgctcagcctatataccgccatcttcagcaaaccctgatgaaggctacaaagtaagcgcaagtacccacgtaaagacgttaggtcaaggtgtagcccatgaggtggcaagaaatgggctacattttctaccccagaaaactacgatagcccttatgaaacttaagggtcgaaggtggatttagcagtaaactgagagtagagtgcttagttgaacagggccctgaagcgcgtacacaccgcccgtcaccctcctcaagtatacttcaaaggacatttaactaaaacccctacgcatttatatagaggagacaagtcgtaacatggtaagtgtactggaaagtgcacttggacgaaccagagtgtagcttaacacaaagcacccaacttacacttaggagatttcaacttaacttgaccgctctgagctaaacctagccccaaacccactccaccttactaccagacaaccttagccaaaccatttacccaaataaagtataggcgatagaaattgaaacctggcgcaatagatatagtaccgcaagggaaagatgaaaaattataaccaagcataatatagcaaggactaacccctataccttctgcataatgaattaactagaaataactttgcaaggagagccaaagctaagacccccgaaaccagacgagctacctaagaacagctaaaagagcacacccgtctatgtagcaaaatagtgggaagatttataggtagaggcgacaaacctaccgagcctggtgatagctggttgtccaagatagaatcttagttcaactttaaatttgcccacagaaccctctaaatccccttgtaaatttaactgttagtccaaagaggaacagctctttggacactaggaaaaaaccttgtagagagagtaaaaaatttaacacccatagtaggcctaaaagcagccaccaattaagaaagcgttcaagctcaacacccactacctaaaaaatcccaaacatataactgaactcctcacacccaattggaccaatctatcaccctatagaagaactaatgttagtataagtaacatgaaaacattctcctccgcataagcctgcgtcagattaaaacactgaactgacaattaacagcccaatatctacaatcaaccaacaagtcattattaccctcactgtcaacccaacacaggcatgctcataaggaaaggttaaaaaaagtaaaaggaactcggcaaatcttaccccgcctgtttaccaaaaacatcacctctagcatcaccagtattagaggcaccgcctgcccagtgacacatgtttaacggccgcggtaccctaaccgtgcaaaggtagcataatcacttgttccttaaatagggacctgtatgaatggctccacgagggttcagctgtctcttacttttaaccagtgaaattgacctgcccgtgaagaggcgggcataacacagcaagacgagaagaccctatggagctttaatttattaatgcaaacagtacctaacaaacccacaggtcctaaactaccaaacctgcattaaaaatttcggttggggcgacctcggagcagaacccaacctccgagcagtacatgctaagacttcaccagtcaaagcgaactactatactcaattgatccaataacttgaccaacggaacaagttaccctagggataacagcgcaatcctattctagagtccatatcaacaatagggtttacgacctcgatgttggatcaggacatcccaatggtgcagccgctattaaaggttcgtttgttcaacgattaaagtcctacgtgatctgagttcagaccggagtaatccaggtcggtttctatctacnttcaaattcctccctgtacgaaaggacaagagaaataaggcctacttcacaaagcgccttcccccgtaaatgatatcatctcaacttagtattatacccacacccacccaagaacagggtttgttaagatggcagagcccggtaatcgcataaaacttaaaactttacagtcagaggttcaattcctcttcttaacaacatacccatggccaacctcctactcctcattgtacccattctaatcgcaatggcattcctaatgcttaccgaacgaaaaattctaggctatatacaactacgcaaaggccccaacgttgtaggcccctacgggctactacaacccttcgctgacgccataaaactcttcaccaaagagcccctaaaacccgccacatctaccatcaccctctacatcaccgccccgaccttagctctcaccatcgctcttctactatgaacccccctccccatacccaaccccctggtcaacctcaacctaggcctcctatttattctagccacctctagcctagccgtttactcaatcctctgatcagggtgagcatcaaactcaaactacgccctgatcggcgcactgcgagcagtagcccaaacaatctcatatgaagtcaccctagccatcattctactatcaacattactaataagtggctcctttaacctctccacccttatcacaacacaagaacacctctgattactcctgccatcatgacccttggccataatatgatttatctccacactagcagagaccaaccgaacccccttcgaccttgccgaaggggagtccgaactagtctcaggcttcaacatcgaatacgccgcaggccccttcgccctattcttcatagccgaatacacaaacattattataataaacaccctcaccactacaatcttcctaggaacaacatatgacgcactctcccctgaactctacacaacatattttgtcaccaagaccctacttctaacctccctgttcttatgaattcgaacagcatacccccgattccgctacgaccaactcatacacctcctatgaaaaaacttcctaccactcaccctagcattacttatatgatatgtctccatacccattacaatctccagcattccccctcaaacctaagaaatatgtctgataaaagagttactttgatagagtaaataataggagcttaaacccccttatttctaggactatgagaatcgaacccatccctgagaatccaaaattctccgtgccacctatcacaccccatcctaaagtaaggtcagctaaataagctatcgggcccataccccgaaaatgttggttatacccttcccgtactaattaatcccctggcccaacccgtcatctactctaccatctttgcaggcacactcatcacagcgctaagctcgcactgattttttacctgagtaggcctagaaataaacatgctagcttttattccagttctaaccaaaaaaataaaccctcgttccacagaagctgccatcaagtatttcctcacgcaagcaaccgcatccataatccttctaatagctatcctcttcaacaatatactctccggacaatgaaccataaccaatactaccaatcaatactcatcattaataatcataatggctatagcaataaaactaggaatagccccctttcacttctgagtcccagaggttacccaaggcacccctctgacatccggcctgcttcttctcacatgacaaaaactagcccccatctcaatcatataccaaatctctccctcactaaacgtaagccttctcctcactctctcaatcttatccatcatagcaggcagttgaggtggattaaaccaaacccagctacgcaaaatcttagcatactcctcaattacccacataggatgaataatagcagttctaccgtacaaccctaacataaccattcttaatttaactatttatattatcctaactactaccgcattcctactactcaacttaaactccagcaccacgaccctactactatctcgcacctgaaacaagctaacatgactaacacccttaattccatccaccctcctctccctaggaggcctgcccccgctaaccggctttttgcccaaatgggccattatcgaagaattcacaaaaaacaatagcctcatcatccccaccatcatagccaccatcaccctccttaacctctacttctacctacgcctaatctactccacctcaatcacactactccccatatctaacaacgtaaaaataaaatgacagtttgaacatacaaaacccaccccattcctccccacactcatcgcccttaccacgctactcctacctatctccccttttatactaataatcttatagaaatttaggttaaatacagaccaagagccttcaaagccctcagtaagttgcaatacttaatttctgtaacagctaaggactgcaaaaccccactctgcatcaactgaacgcaaatcagccactttaattaagctaagcccttactagaccaatgggacttaaacccacaaacacttagttaacagctaagcaccctaatcaactggcttcaatctacttctcccgccgccgggaaaaaaggcgggagaagccccggcaggtttgaagctgcttcttcgaatttgcaattcaatatgaaaatcacctcggagctggtaaaaagaggcctaacccctgtctttagatttacagtccaatgcttcactcagccattttacctcacccccactgatgttcgccgaccgttgactattctctacaaaccacaaagacattggaacactatacctattattcggcgcatgagctggagtcctaggcacagctctaagcctccttattcgagccgagctgggccagccaggcaaccttctaggtaacgaccacatctacaacgttatcgtcacagcccatgcatttgtaataatcttcttcatagtaatacccatcataatcggaggctttggcaactgactagttcccctaataatcggtgcccccgatatggcgtttccccgcataaacaacataagcttctgactcttacctccctctctcctactcctgctcgcatctgctatagtggaggccggagcaggaacaggttgaacagtctaccctcccttagcagggaactactcccaccctggagcctccgtagacctaaccatcttctccttacacctagcaggtgtctcctctatcttaggggccatcaatttcatcacaacaattatcaatataaaaccccctgccataacccaataccaaacgcccctcttcgtctgatccgtcctaatcacagcagtcctacttctcctatctctcccagtcctagctgctggcatcactatactactaacagaccgcaacctcaacaccaccttcttcgaccccgccggaggaggagaccccattctataccaacacctattctgatttttcggtcaccctgaagtttatattcttatcctaccaggcttcggaataatctcccatattgtaacttactactccggaaaaaaagaaccatttggatacataggtatggtctgagctatgatatcaattggcttcctagggtttatcgtgtgagcacaccatatatttacagtaggaatagacgtagacacacgagcatatttcacctccgctaccataatcatcgctatccccaccggcgtcaaagtatttagctgactcgccacactccacggaagcaatatgaaatgatctgctgcagtgctctgagccctaggattcatctttcttttcaccgtaggtggcctgactggcattgtattagcaaactcatcactagacatcgtactacacgacacgtactacgttgtagcccacttccactatgtcctatcaataggagctgtatttgccatcataggaggcttcattcactgatttcccctattctcaggctacaccctagaccaaacctacgccaaaatccatttcactatcatattcatcggcgtaaatctaactttcttcccacaacactttctcggcctatccggaatgccccgacgttactcggactaccccgatgcatacaccacatgaaacatcctatcatctgtaggctcattcatttctctaacagcagtaatattaataattttcatgatttgagaagccttcgcttcgaagcgaaaagtcctaatagtagaagaaccctccataaacctggagtgactatatggatgccccccaccctaccacacattcgaagaacccgtatacataaaatctagacaaaaaaggaaggaatcgaaccccccaaagctggtttcaagccaaccccatggcctccatgactttttcaaaaaggtattagaaaaaccatttcataactttgtcaaagttaaattataggctaaatcctatatatcttaatggcacatgcagcgcaagtaggtctacaagacgctacttcccctatcatagaagagcttatcacctttcatgatcacgccctcataatcattttccttatctgcttcctagtcctgtatgcccttttcctaacactcacaacaaaactaactaatactaacatctcagacgctcaggaaatagaaaccgtctgaactatcctgcccgccatcatcctagtcctcatcgccctcccatccctacgcatcctttacataacagacgaggtcaacgatccctcccttaccatcaaatcaattggccaccaatggtactgaacctacgagtacaccgactacggcggactaatcttcaactcctacatacttcccccattattcctagaaccaggcgacctgcgactccttgacgttgacaatcgagtagtactcccgattgaagcccccattcgtataataattacatcacaagacgtcttgcactcatgagctgtccccacattaggcttaaaaacagatgcaattcccggacgtctaaaccaaaccactttcaccgctacacgaccgggggtatactacggtcaatgctctgaaatctgtggagcaaaccacagtttcatgcccatcgtcctagaattaattcccctaaaaatctttgaaatagggcccgtatttaccctatagcaccccctctaccccctctagagcccactgtaaagctaacttagcattaaccttttaagttaaagattaagagaaccaacacctctttacagtgaaatgccccaactaaatactaccgtatggcccaccataattacccccatactccttacactattcctcatcacccaactaaaaatattaaacacaaactaccacctacctccctcaccaaagcccataaaaataaaaaattataacaaaccctgagaaccaaaatgaacgaaaatctgttcgcttcattcattgcccccacaatcctaggcctacccgccgcagtactgatcattctatttccccctctattgatccccacctccaaatatctcatcaacaaccgactaatcaccacccaacaatgactaatcaaactaacctcaaaacaaatgataaccatacacaacactaaaggacgaacctgatctcttatactagtatccttaatcatttttattgccacaactaacctcctcggactcctgcctcactcatttacaccaaccacccaactatctataaacctagccatggccatccccttatgagcgggcgcagtgattataggctttcgctctaagattaaaaatgccctagcccacttcttaccacaaggcacacctacaccccttatccccatactagttattatcgaaaccatcagcctactcattcaaccaatagccctggccgtacgcctaaccgctaacattactgcaggccacctactcatgcacctaattggaagcgccaccctagcaatatcaaccattaaccttccctctacacttatcatcttcacaattctaattctactgactatcctagaaatcgctgtcgccttaatccaagcctacgttttcacacttctagtaagcctctacctgcacgacaacacataatgacccaccaatcacatgcctatcatatagtaaaacccagcccatgacccctaacaggggccctctcagccctcctaatgacctccggcctagccatgtgatttcacttccactccataacgctcctcatactaggcctactaaccaacacactaaccatataccaatgatggcgcgatgtaacacgagaaagcacataccaaggccaccacacaccacctgtccaaaaaggccttcgatacgggataatcctatttattacctcagaagtttttttcttcgcaggatttttctgagccttttaccactccagcctagcccctaccccccaattaggagggcactggcccccaacaggcatcaccccgctaaatcccctagaagtcccactcctaaacacatccgtattactcgcatcaggagtatcaatcacctgagctcaccatagtctaatagaaaacaaccgaaaccaaataattcaagcactgcttattacaattttactgggtctctattttaccctcctacaagcctcagagtacttcgagtctcccttcaccatttccgacggcatctacggctcaacattttttgtagccacaggcttccacggacttcacgtcattattggctcaactttcctcactatctgcttcatccgccaactaatatttcactttacatccaaacatcactttggcttcgaagccgccgcctgatactggcattttgtagatgtggtttgactatttctgtatgtctccatctattgatgagggtcttactcttttagtataaatagtaccgttaacttccaattaactagttttgacaacattcaaaaaagagtaataaacttcgccttaattttaataatcaacaccctcctagccttactactaataattattacattttgactaccacaactcaacggctacatagaaaaatccaccccttacgagtgcggcttcgaccctatatcccccgcccgcgtccctttctccataaaattcttcttagtagctattaccttcttattatttgatctagaaattgccctccttttacccctaccatgagccctacaaacaactaacctgccactaatagttatgtcatccctcttattaatcatcatcctagccctaagtctggcctatgagtgactacaaaaaggattagactgaaccgaattggtatatagtttaaacaaaacgaatgatttcgactcattaaattatgataatcatatttaccaaatgcccctcatttacataaatattatactagcatttaccatctcacttctaggaatactagtatatcgctcacacctcatatcctccctactatgcctagaaggaataatactatcgctgttcattatagctactctcataaccctcaacacccactccctcttagccaatattgtgcctattgtcatactagtctttgccgcctgcgaagcagcggtgggcctagccctactagtctcaatctccaacacatatggcctagactacgtacataacctaaacctactccaatgctaaaactaatcgtcccaacaattatattactaccactgacatgactttccaaaaaacacataatttgaatcaacacaaccacccacagcctaattattagcatcatccctctactattttttaaccaaatcaacaacaacctatttagctgttccccaaccttttcctccgaccccctaacaacccccctcctaatactaactacctgactcctacccctcacaatcatggcaagccaacgccacttatccagtgaaccactatcacgaaaaaaactctacctctctatactaatctccctacaaatctccttaattataacattcacagccacagaactaatcatattttatatcttcttcgaaaccacacttatccccaccttggctatcatcacccgatgaggcaaccagccagaacgcctgaacgcaggcacatacttcctattctacaccctagtaggctcccttcccctactcatcgcactaatttacactcacaacaccctaggctcactaaacattctactactcactctcactgcccaagaactatcaaactcctgagccaacaacttaatatgactagcttacacaatagcttttatagtaaagatacctctttacggactccacttatgactccctaaagcccatgtcgaagcccccatcgctgggtcaatagtacttgccgcagtactcttaaaactaggcggctatggtataatacgcctcacactcattctcaaccccctgacaaaacacatagcctaccccttccttgtactatccctatgaggcataattataacaagctccatctgcctacgacaaacagacctaaaatcgctcattgcatactcttcaatcagccacatagccctcgtagtaacagccattctcatccaaaccccctgaagcttcaccggcgcagtcattctcataatcgcccacgggcttacatcctcattactattctgcctagcaaactcaaactacgaacgcactcacagtcgcatcataatcctctctcaaggacttcaaactctactcccactaatagctttttgatgacttctagcaagcctcgctaacctcgccttaccccccactattaacctactgggagaactctctgtgctagtaaccacgttctcctgatcaaatatcactctcctacttacaggactcaacatactagtcacagccctatactccctctacatatttaccacaacacaatggggctcactcacccaccacattaacaacataaaaccctcattcacacgagaaaacaccctcatgttcatacacctatcccccattctcctcctatccctcaaccccgacatcattaccgggttttcctcttgtaaatatagtttaaccaaaacatcagattgtgaatctgacaacagaggcttacgaccccttatttaccgagaaagctcacaagaactgctaactcatgcccccatgtctaacaacatggctttctcaacttttaaaggataacagctatccattggtcttaggccccaaaaattttggtgcaactccaaataaaagtaataaccatgcacactactataaccaccctaaccctgacttccctaattccccccatccttaccaccctcgttaaccctaacaaaaaaaactcatacccccattatgtaaaatccatcgtcgcatccacctttattatcagtctcttccccacaacaatattcatgtgcctagaccaagaagttattatctcgaactgacactgagccacaacccaaacaacccagctctccctaagcttcaaactagactacttctccataatattcatccctgtagcattgttcgttacatggtccatcatagaattctcactgtgatatataaactcagacccaaacattaatcagttcttcaaatatctactcatcttcctaattaccatactaatcttagttaccgctaacaacctattccaactgttcatcggctgagagggcgtaggaattatatccttcttgctcatcagttgatgatacgcccgagcagatgccaacacagcagccattcaagcaatcctatacaaccgtatcggcgatatcggtttcatcctcgccttagcatgatttatcctacactccaactcatgagacccacaacaaatagcccttctaaacgctaatccaagcctcaccccactactaggcctcctcctagcagcagcaggcaaatcagcccaattaggtctccacccctgactcccctcagccatagaaggccccaccccagtctcagccctactccactcaagcactatagttgtagcaggaatcttcttactcatccgcttccaccccctagcagaaaatagcccactaatccaaactctaacactatgcttaggcgctatcaccactctgttcgcagcagtctgcgcccttacacaaaatgacatcaaaaaaatcgtagccttctccacttcaagtcaactaggactcataatagttacaatcggcatcaaccaaccacacctagcattcctgcacatctgtacccacgccttcttcaaagccatactatttatgtgctccgggtccatcatccacaaccttaacaatgaacaagatattcgaaaaataggaggactactcaaaaccatacctctcacttcaacctccctcaccattggcagcctagcattagcaggaatacctttcctcacaggtttctactccaaagaccacatcatcgaaaccgcaaacatatcatacacaaacgcctgagccctatctattactctcatcgctacctccctgacaagcgcctatagcactcgaataattcttctcaccctaacaggtcaacctcgcttccccacccttactaacattaacgaaaataaccccaccctactaaaccccattaaacgcctggcagccggaagcctattcgcaggatttctcattactaacaacatttcccccgcatcccccttccaaacaacaatccccctctacctaaaactcacagccctcgctgtcactttcctaggacttctaacagccctagacctcaactacctaaccaacaaacttaaaataaaatccccactatgcacattttatttctccaacatactcggattctaccctagcatcacacaccgcacaatcccctatctaggccttcttacgagccaaaacctgcccctactcctcctagacctaacctgactagaaaagctattacctaaaacaatttcacagcaccaaatctccacctccatcatcacctcaacccaaaaaggcataattaaactttacttcctctctttcttcttcccactcatcctaaccctactcctaatcacataacctattcccccgagcaatctcaattacaatatatacaccaacaaacaatgttcaaccagtaactactactaatcaacgcccataatcatacaaagcccccgcaccaataggatcctcccgaatcaaccctgacccctctccttcataaattattcagcttcctacactattaaagtttaccacaaccaccaccccatcatactctttcacccacagcaccaatcctacctccatcgctaaccccactaaaacactcaccaagacctcaacccctgacccccatgcctcaggatactcctcaatagccatcgctgtagtatatccaaagacaaccatcattccccctaaataaattaaaaaaactattaaacccatataacctcccccaaaattcagaataataacacacccgaccacaccgctaacaatcaatactaaacccccataaataggagaaggcttagaagaaaaccccacaaaccccattactaaacccacactcaacagaaacaaagcatacatcattattctcgcacggactacaaccacgaccaatgatatgaaaaaccatcgttgtatttcaactacaagaacaccaatgaccccaatacgcaaaactaaccccctaataaaattaattaaccactcattcatcgacctccccaccccatccaacatctccgcatgatgaaacttcggctcactccttggcgcctgcctgatcctccaaatcaccacaggactattcctagccatgcactactcaccagacgcctcaaccgccttttcatcaatcgcccacatcactcgagacgtaaattatggctgaatcatccgctaccttcacgccaatggcgcctcaatattctttatctgcctcttcctacacatcgggcgaggcctatattacggatcatttctctactcagaaacctgaaacatcggcattatcctcctgcttgcaactatagcaacagccttcataggctatgtcctcccgtgaggccaaatatcattctgaggggccacagtaattacaaacttactatccgccatcccatacattgggacagacctagttcaatgaatctgaggaggctactcagtagacagtcccaccctcacacgattctttacctttcacttcatcttgcccttcattattgcagccctagcagcactccacctcctattcttgcacgaaacgggatcaaacaaccccctaggaatcacctcccattccgataaaatcaccttccacccttactacacaatcaaagacgccctcggcttacttctcttccttctctccttaatgacattaacactattctcaccagacctcctaggcgacccagacaattataccctagccaaccccttaaacacccctccccacatcaagcccgaatgatatttcctattcgcctacacaattctacgatccgtccctaacaaactaggaggcgtccttgccctattactatccatcctcatcctagcaataatccccatcctccatatatccaaacaacaaagcataatatttcgcccactaagccaatcactttattgactcctagccgcagacctcctcattctaacctgaatcggaggacaaccagtaagctacccttttaccatcattggacaagtagcatccgtactatacttcacaacaatcctaatcctaataccaactatctccctaattgaaaacaaaatactcaaatgggcctgtccttgtagtataaactaatacaccagtcttgtaaaccggagatgaaaacctttttccaaggacaaatcagagaaaaagtctttaactccaccattagcacccaaagctaagattctaatttaaactattctctgttctttcatggggaagcagatttgggtaccacccaagtattgactcacccatcaacaaccgctatgtatttcgtacattactgccagccaccatgaatattgtacggtaccataaatacttgatcacctgtagtacataaaaacccaatccacatcaaaaccccctccccatgcttacaagcaagtacagcaatcaaccctcaactatcacacatcaactgcaactccaaagccacccctcacccactaggataccaacaaacctacccacctttaacagtacatagtacataaagccatttaccgtacatagcacattacagtcaaatcccttctcgtccccatggatgacccccctcagataggggtcccttgaccaccatcctccgtgaaatcaatatcccgcacaagagtgctactctcctcgctccgggcccataacacttgggggtagctaaagtgaactgtatccgacatctggttcctacttcagggccataaagcctaaatagcccacacgttccccttaaataagacatcacgatg

SEQ ID NO: 397 - DNA, 16571 bp, Homo sapiens mitochondrial
  3109: "n" refers to a nucleotide at position 3107 of the Cambridge Reference Sequence (CRS, Anderson et al. 1981 Nature 290:457-465), later determined to be absent from the human mtDNA sequence according to the revised CRS (rCRS, Andrews et al. 1999 Nature Genetics 23:147); "n" therefore represents a single nucleotide deletion at a position corresponding to nucleotide 3107 of SEQ ID NO:1 as provided herein.
gatcacaggtctatcaccctattaaccactcacgggagctctccatgcatttggtattttcgtctggggggtgtgcacgcgatagcattgcgagacgctggagccggagcaccctatgtcgcagtatctgtctttgattcctgcctcatcctattatttatcgcacctacgttcaatattacaggcgaacatacctactaaagtgtgttaattaattaatgcttgtaagacataataataacaattgaatgtctgcacagccgctttccacacagacatcataacaaaaaattttcaccaaaccccccctcccccccgcttctggccacagcacttaaacacatctctgccaaaccccaaaaacaaagaaccctaacaccagcctaaccagatttcaaattttatcttttggcggtatgcacttttaacagtcaccccccaactaacacattattttcccctctcactcccatactactaatctcatcaacacaacccccgcccatcctacccagcacacacacaccgctgctaaccccataccccgaaccaaccaaaccccaaagacaccccccacagtttatgtagcttacctcctcaaagcaatacactgaaaatgtttagacgggctcacatcaccccataaacaaataggtttggtcctagcctttctattagctcttagtaagattacacatgcaagcatccccgttccagtgagttcaccctctaaatcaccacgatcaaaagggacaagcatcaagcacgcagcaatgcagctcaaaacgcttagcctagccacacccccacgggaaacagcagtgattaacctttagcaataaacgaaagtttaactaagctatactaaccccagggttggtcaatttcgtgccagccaccgcggtcacacgattaacccaagtcaatagaagccggcgtaaagagtgttttagatcaccccctccccaataaagctaaaactcacctgagttgtaaaaaactccagttgacacaaaatagactacgaaagtggctttaacatatctgaacacacaatagctaagacccaaactgggattagataccccactatgcttagccctaaacctcaacagttaaatcaacaaaactgctcgccagaacactacgagccacagcttaaaactcaaaggacctggcggtgcttcatatccctctagaggagcctgttctgtaatcgataaaccccgatcaacctcaccacctcttgctcagcctatataccgccatcttcagcaaaccctgatgaaggctacaaagtaagcgcaagtacccacgtaaagacgttaggtcaaggtgtagcccatgaggtggcaagaaatgggctacattttctaccccagaaaactacgatagcccttatgaaacttaagggtcgaaggtggatttagcagtaaactgagagtagagtgcttagttgaacagggccctgaagcgcgtacacaccgcccgtcaccctcctcaagtatacttcaaaggacatttaactaaaacccctacgcatttatatagaggagacaagtcgtaacatggtaagtgtactggaaagtgcacttggacgaaccagagtgtagcttaacacaaagcacccaacttacacttaggagatttcaacttaacttgaccgctctgagctaaacctagccccaaacccactccaccttactaccagacaaccttagccaaaccatttacccaaataaagtataggcgatagaaattgaaacctggcgcaatagatatagtaccgcaagggaaagatgaaaaattataaccaagcataatatagcaaggactaacccctataccttctgcataatgaattaactagaaataactttgcaaggagagccaaagctaagacccccgaaaccagacgagctacctaagaacagctaaaagagcacacccgtctatgtagcaaaatagtgggaagatttataggtagaggcgacaaacctaccgagcctggtgatagctggttgtccaagatagaatcttagttcaactttaaatttgcccacagaaccctctaaatccccttgtaaatttaactgttagtccaaagaggaacagctctttggacactaggaaaaaaccttgtagagagagtaaaaaatttaacacccatagtaggcctaaaagcagccaccaattaagaaagcgttcaagctcaacacccactacctaaaaaatcccaaacatataactgaactcctcacacccaattggaccaatctatcaccctatagaagaactaatgttagtataagtaacatgaaaacattctcctccgcataagcctgcgtcagattaaaacactgaactgacaattaacagcccaatatctacaatcaaccaacaagtcattattaccctcactgtcaacccaacacaggcatgctcataaggaaaggttaaaaaaagtaaaaggaactcggcaaatcttaccccgcctgtttaccaaaaacatcacctctagcatcaccagtattagaggcaccgcctgcccagtgacacatgtttaacggccgcggtaccctaaccgtgcaaaggtagcataatcacttgttccttaaatagggacctgtatgaatggctccacgagggttcagctgtctcttacttttaaccagtgaaattgacctgcccgtgaagaggcgggcatgacacagcaagacgagaagaccctatggagctttaatttattaatgcaaacagtacctaacaaacccacaggtcctaaactaccaaacctgcattaaaaatttcggttggggcgacctcggagcagaacccaacctccgagcagtacatgctaagacttcaccagtcaaagcgaactactatactcaattgatccaataacttgaccaacggaacaagttaccctagggataacagcgcaatcctattctagagtccatatcaacaatagggtttacgacctcgatgttggatcaggacatcccaatggtgcagccgctattaaaggttcgtttgttcaacgattaaagtcctacgtgatctgagttcagaccggagtaatccaggtcggtttctatctacnttcaaattcctccctgtacgaaaggacaagagaaataaggcctacttcacaaagcgccttcccccgtaaatgatatcatctcaacttagtattatacccacacccacccaagaacagggtttgttaagatggcagagcccggtaatcgcataaaacttaaaactttacagtcagaggttcaattcctcttcttaacaacatacccatggccaacctcctactcctcattgtacccattctaatcgcaatggcattcctaatgcttaccgaacgaaaaattctaggctatatacaactacgcaaaggccccaacgttgtaggcccctacgggctactacaacccttcgctgacgccataaaactcttcaccaaagagcccctaaaacccgccacatctaccatcaccctctacatcaccgccccgaccttagctctcaccatcgctcttctactatgaacccccctccccatacccaaccccctggtcaacctcaacctaggcctcctatttattctagccacctctagcctagccgtttactcaatcctctgatcagggtgagcatcaaactcaaactacgccctgatcggcgcactgcgagcagtagcccaaacaatctcatatgaagtcaccctagccatcattctactatcaacattactaataagtggctcctttaacctctccacccttatcacaacacaagaacacctctgattactcctgccatcatgacccttggccataatatgatttatctccacactagcagagaccaaccgaacccccttcgaccttgccgaaggggagtccgaactagtctcaggcttcaacatcgaatacgccgcaggccccttcgccctattcttcatagccgaatacacaaacattattataataaacaccctcaccactacaatcttcctaggaacaacatatgacgcactctcccctgaactctacacaacatattttgtcaccaagaccctacttctaacctccctgttcttatgaattcgaacagcatacccccgattccgctacgaccaactcatacacctcctatgaaaaaacttcctaccactcaccctagcattacttatatgacatgtctccatacccattacaatctccagcattccccctcaaacctaagaaatatgtctgataaaagagttactttgatagagtaaataataggagcttaaacccccttatttctaggactatgagaatcgaacccatccctgagaatccaaaattctccgtgccacctatcacaccccatcctaaagtaaggtcagctaaataagctatcgggcccataccccgaaaatgttggttatacccttcccgtactaattaatcccctggcccaacccgtcatctactctaccatctttgcaggcacactcatcacagcgctaagctcgcactgattttttacctgagtaggcctagaaataaacatgctagcttttattccagttctaaccaaaaaaataaaccctcgttccacagaagctgccatcaagtatttcctcacgcaagcaaccgcatccataatccttctaatagctatcctcttcaacaatatactctccggacaatgaaccataaccaatactaccaatcaatactcatcattaataatcataatggctatagcaataaaactaggaatagccccctttcacttctgagtcccagaggttacccaaggcacccctctgacatccggcctgcttcttctcacatgacaaaaactagcccccatctcaatcatataccaaatctctccctcactaaacgtaagccttctcctcactctctcaatcttatccatcatagcaggcagttgaggtggattaaaccaaacccagctacgcaaaatcttagcatactcctcaattacccacataggatgaataatagcagttctaccgtacaaccctaacataaccattcttaatttaactatttatattatcctaactactaccgcattcctactactcaacttaaactccagcaccacgaccctactactatctcgcacctgaaacaagctaacatgactaacacccttaattccatccaccctcctctccctaggaggcctgcccccgctaaccggctttttgcccaaatgggccattatcgaagaattcacaaaaaacaatagcctcatcatccccaccatcatagccaccatcaccctccttaacctctacttctacctacgcctaatctactccacctcaatcacactactccccatatctaacaacgtaaaaataaaatgacagtttgaacatacaaaacccaccccattcctccccacactcatcgcccttaccacgctactcctacctatctccccttttatactaataatcttatagaaatttaggttaaatacagaccaagagccttcaaagccctcagtaagttgcaatacttaatttctgtaacagctaaggactgcaaaaccccactctgcatcaactgaacgcaaatcagccactttaattaagctaagcccttactagaccaatgggacttaaacccacaaacacttagttaacagctaagcaccctaatcaactggcttcaatctacttctcccgccgccgggaaaaaaggcgggagaagccccggcaggtttgaagctgcttcttcgaatttgcaattcaatatgaaaatcacctcggagctggtaaaaagaggcctaacccctgtctttagatttacagtccaatgcttcactcagccattttacctcacccccactgatgttcgccgaccgttgactattctctacaaaccacaaagacattggaacactatacctattattcggcgcatgagctggagtcctaggcacagctctaagcctccttattcgagccgagctgggccagccaggcaaccttctaggtaacgaccacatctacaacgttatcgtcacagcccatgcatttgtaataatcttcttcatagtaatacccatcataatcggaggctttggcaactgactagttcccctaataatcggtgcccccgatatggcgtttccccgcataaacaacataagcttctgactcttacctccctctctcctactcctgctcgcatctgctatagtggaggccggagcaggaacaggttgaacagtctaccctcccttagcagggaactactcccaccctggagcctccgtagacctaaccatcttctccttacacctagcaggtgtctcctctatcttaggggccatcaatttcatcacaacaattatcaatataaaaccccctgccataacccaataccaaacgcccctcttcgtctgatccgtcctaatcacagcagtcctacttctcctatctctcccagtcctagctgctggcatcactatactactaacagaccgcaacctcaacaccaccttcttcgaccccgccggaggaggagaccccattctataccaacacctattctgatttttcggtcaccctgaagtttatattcttatcctaccaggcttcggaataatctcccatattgtaacttactactccggaaaaaaagaaccatttggatacataggtatggtctgagctatgatatcaattggcttcctagggtttatcgtgtgagcacaccatatatttacagtaggaatagacgtagacacacgagcatatttcacctccgctaccataatcatcgctatccccaccggcgtcaaagtatttagctgactcgccacactccacggaagcaatatgaaatgatctgctgcagtgctctgagccctaggattcatctttcttttcaccgtaggtggcctgactggcattgtattagcaaactcatcactagacatcgtactacacgacacgtactacgttgtagctcacttccactatgtcctatcaataggagctgtatttgccatcataggaggcttcattcactgatttcccctattctcaggctacaccctagaccaaacctacgccaaaatccatttcactatcatattcatcggcgtaaatctaactttcttcccacaacactttctcggcctatccggaatgccccgacgttactcggactaccccgatgcatacaccacatgaaacatcctatcatctgtaggctcattcatttctctaacagcagtaatattaataattttcatgatttgagaagccttcgcttcgaagcgaaaagtcctaatagtagaagaaccctccataaacctggagtgactatatggatgccccccaccctaccacacattcgaagaacccgtatacataaaatctagacaaaaaaggaaggaatcgaaccccccaaagctggtttcaagccaaccccatggcctccatgactttttcaaaaaggtattagaaaaaccatttcataactttgtcaaagttaaattataggctaaatcctatatatcttaatggcacatgcagcgcaagtaggtctacaagacgctacttcccctatcatagaagagcttatcacctttcatgatcacgccctcataatcattttccttatctgcttcctagtcctgtatgccctcttcctaacactcacaacaaaactaactaatactaacatctcagacgctcaggaaatagaaaccgtctgaactatcctgcccgccatcatcctagtcctcatcgccctcccatccctacgcatcctttacataacagacgaggtcaacgatccctcccttaccatcaaatcaattggccaccaatggtactgaacctacgagtacaccgactacggcggactaatcttcaactcctacatacttcccccattattcctagaaccaggcgacctgcgactccttgacgttgacaatcgagtagtactcccgattgaagcccccattcgtataataattacatcacaagacgtcttgcactcatgagctgtccccacattaggcttaaaaacagatgcaattcccggacgtctaaaccaaaccactttcaccgctacacgaccgggggtatactacggtcaatgctctgaaatctgtggagcaaaccacagtttcatgcccatcgtcctagaattaattcccctaaaaatctttgaaatagggcccgtatttaccctatagcaccccctctaccccctctagagcccactgtaaagctaacttagcattaaccttttaagttaaagattaagagaaccaacacctctttacagtgaaatgccccaactaaatactaccgtatggcccaccataattacccccatactccttacactattcctcatcacccaactaaaaatattaaacacaaactaccacctacctccctcaccaaagcccataaaaataaaaaattataacaaaccctgagaaccaaaatgaacgaaaatctgttcgcttcattcattgcccccacaatcctaggcctacccgccgcagtactgatcattctatttccccctctattgatccccacctccaaatatctcatcaacaaccgactaatcaccacccaacaatgactaatcaaactaacctcaaaacaaatgataaccatacacaacactaaaggacgaacctgatctcttatactagtatccttaatcatttttattgccacaactaacctcctcggactcctgcctcactcatttacaccaaccacccaactatctataaacctagccatggccatccccttatgagcgggcgcagtgattataggctttcgctctaagattaaaaatgccctagcccacttcttaccacaaggcacacctacaccccttatccccatactagttattatcgaaaccatcagcctactcattcaaccaatagccctggccgtacgcctaaccgctaacattactgcaggccacctactcatgcacctaattggaagcgccaccctagcaatatcaaccattaaccttccctctacacttatcatcttcacaattctaattctactgactatcctagaaatcgctgtcgccttaatccaagcctacgttttcacacttctagtaagcctctacctgcacgacaacacataatgacccaccaatcacatgcctatcatatagtaaaacccagcccatgacccctaacaggggccctctcagccctcctaatgacctccggcctagccatgtgatttcacttccactccataacgctcctcatactaggcctactaaccaacacactaaccatataccaatgatggcgcgatgtaacacgagaaagcacataccaaggccaccacacaccacctgtccaaaaaggccttcgatacgggataatcctatttattacctcagaagtttttttcttcgcaggatttttctgagccttttaccactccagcctagcccctaccccccaattaggaggacactggcccccaacaggcatcaccccgctaaatcccctagaagtcccactcctaaacacatccgtattactcgcatcaggagtatcaatcacctgagctcaccatagtctaatagaaaacaaccgaaaccaaataattcaagcactgcttattacaattttactgggtctctattttaccctcctacaagcctcagagtacttcgagtctcccttcaccatttccgacggcatctacggctcaacattttttgtagccacaggcttccacggacttcacgtcattattggctcaactttcctcactatctgcttcatccgccaactaatatttcactttacatccaaacatcactttggcttcgaagccgccgcctgatactggcattttgtagatgtggtttgactatttctgtatgtctccatctattgatgagggtcttactcttttagtataaatagtaccgttaacttccaattaactagttttgacaacattcaaaaaagagtaataaacttcgccttaattttaataatcaacaccctcctagccttactactaataattattacattttgactaccacaactcaacggctacatagaaaaatccaccccttacgagtgcggcttcgaccctatatcccccgcccgcgtccctttctccataaaattcttcttagtagctattaccttcttattatttgatctagaaattgccctccttttacccctaccatgagccctacaaacaactaacctgccactaatagttatgtcatccctcttattaatcatcatcctagccctaagtctggcctatgagtgactacaaaaaggattagactgagccgaattggtatatagtttaaacaaaacgaatgatttcgactcattaaattatgataatcatatttaccaaatgcccctcatttacataaatattatactagcatttaccatctcacttctaggaatactagtatatcgctcacacctcatatcctccctactatgcctagaaggaataatactatcgctgttcattatagctactctcataaccctcaacacccactccctcttagccaatattgtgcctattgccatactagtctttgccgcctgcgaagcagcggtgggcctagccctactagtctcaatctccaacacatatggcctagactacgtacataacctaaacctactccaatgctaaaactaatcgtcccaacaattatattactaccactgacatgactttccaaaaaacacataatttgaatcaacacaaccacccacagcctaattattagcatcatccctctactattttttaaccaaatcaacaacaacctatttagctgttccccaaccttttcctccgaccccctaacaacccccctcctaatactaactacctgactcctacccctcacaatcatggcaagccaacgccacttatccagtgaaccactatcacgaaaaaaactctacctctctatactaatctccctacaaatctccttaattataacattcacagccacagaactaatcatattttatatcttcttcgaaaccacacttatccccaccttggctatcatcacccgatgaggcaaccagccagaacgcctgaacgcaggcacatacttcctattctacaccctagtaggctcccttcccctactcatcgcactgatttacactcacaacaccctaggctcactaaacattctactactcactctcactgcccaagaactatcaaactcctgagccaacaacttaatatgactagcttacacaatagcttttatagtaaagatacctctttacggactccacttatgactccctaaagcccatgtcgaagcccccatcgctgggtcaatagtacttgccgcagtactcttaaaactaggcggctatggtataatacgcctcacactcattctcaaccccctgacaaaacacatagcctaccccttccttgtactatccctatgaggcataattataacaagctccatctgcctacgacaaacagacctaaaatcgctcattgcatactcttcaatcagccacatagccctcgtagtaacagccattctcatccaaaccccctgaagcttcaccggcgcagtcattctcataatcgcccacggacttacatcctcattactattctgcctagcaaactcaaactacgaacgcactcacagtcgcatcataatcctctctcaaggacttcaaactctactcccactaatagctttttgatgacttctagcaagcctcgctaacctcgccttaccccccactattaacctactgggagaactctctgtgctagtaaccacgttctcctgatcaaatatcactctcctacttacaggactcaacatactagtcacagccctatactccctctacatatttaccacaacacaatggggctcactcacccaccacattaacaacataaaaccctcattcacacgagaaaacaccctcatgttcatacacctatcccccattctcctcctatccctcaaccccgacatcattaccgggttttcctcttgtaaatatagtttaaccaaaacatcagattgtgaatctgacaacagaggcttacgaccccttatttaccgagaaagctcacaagaactgctaactcatgcccccatgtctaacaacatggctttctcaacttttaaaggataacagctatccattggtcttaggccccaaaaattttggtgcaactccaaataaaagtaataaccatgcacactactataaccaccctaaccctgacttccctaattccccccatccttaccaccctcgttaaccctaacaaaaaaaactcatacccccattatgtaaaatccattgtcgcatccacctttattatcagtctcttccccacaacaatattcatgtgcctagaccaagaagttattatctcgaactgacactgagccacaacccaaacaacccagctctccctaagcttcaaactagactacttctccataatattcatccctgtggcattgttcgttacatggtccatcatagaattctcactgtgatatataaactcagacccaaacattaatcagttcttcaaatatctactcatcttcctaattaccatactaatcttagttaccgctaacaacctattccaactgttcatcggctgagagggcgtaggaattatatccttcttgctcatcagttgatgatacgcccgagcagatgccaacacagcagccattcaagcaatcctatacaaccgtatcggcgatatcggtttcatcctcgccttagcatgatttatcctacactccaactcatgagacccacaacaaatagcccttctaaacgctaatccaagcctcaccccactactaggcctcctcctagcagcagcaggcaaatcagcccaattaggtctccacccctgactcccctcagccatagaaggccccaccccagtctcagccctactccactcaagcactatagttgtagcaggaatcttcttactcatccgcttccaccccctagcagaaaatagcccactaatccaaactctaacactatgcttaggcgctatcaccactctgttcgcagcagtctgcgcccttacacaaaatgacatcaaaaaaatcgtagccttctccacttcaagtcaactaggactcataatagttacaatcggcatcaaccaaccacacctagcattcctgcacatctgtacccacgccttcttcaaagccatactatttatgtgctccgggtccatcatccacaaccttaacaatgaacaagatattcgaaaaataggaggactactcaaaaccatacctctcacttcaacctccctcaccattggcagcctagcattagcaggaatacctttcctcacaggtttctactccaaagaccacatcatcgaaaccgcaaacatatcatacacaaacgcctgagccctatctattactctcatcgctacctccctgacaagcgcctatagcactcgaataattcttctcaccctaacaggtcaacctcgcttccccacccttactaacattaacgaaaataaccccaccctactaaaccccattaaacgcctgacagccggaagcctattcgcaggatttctcattactaacaacatttcccccgcatcccccttccaaacaacaatccccctctacctaaaactcacagccctcgctgtcactttcctaggacttctaacagccctagacctcaactacctaaccaacaaacttaaaataaaatccccactatgcacattttatttctccaacatactcggattctaccctagcatcatacaccgcacaatcccctatctaggccttcttacgagccaaaacctgcccctactcctcctagacctaacctgactagaaaagctattacctaaaacaatttcacagcaccaaatctccacctccatcatcacctcaacccaaaaaggcataattaaactttacttcctctctttcttcttcccactcatcctaaccctactcctaatcacataacctattcccccgagcaatctcaattacaatatatacaccaacaaacaatgttcaaccagtaactactactaatcaacgcccataatcatacaaagcccccgcaccaataggatcctcccgaatcaaccctgacccctctccttcataaattattcagcttcctacactattaaagtttaccacaaccaccaccccatcatactctttcacccacagcaccaatcctacctccatcgctaaccccactaaaacactcaccaagacctcaacccctgacccccatgcctcaggatactcctcaatagccatcgctgtagtatatccaaagacaaccatcattccccctaaataaattaaaaaaactattaaacccatataacctcccccaaaattcagaataataacacacccgaccacaccgctaacaatcaatactaaacccccataaataggagaaggcttagaagaaaaccccacaaaccccattactaaacccacactcaacagaaacaaagcatacatcattattctcgcacggactacaaccacgaccaatgatatgaaaaaccatcgttgtatttcaactacaagaacaccaatgaccccaatacgcaaaattaaccccctaataaaattaattaaccactcactcatcgacctccccaccccatccaacatctccgcatgatgaaacttcggctcactccttggcgcctgcctgatcctccaaatcaccacaggactattcctagccatgcactactcaccagacgcctcaaccgccttttcatcaatcgcccacatcactcgagacgtaaattatggctgaatcatccgctaccttcacgccaatggcgcctcaatattctttatctgcctcttcctacacatcgggcgaggcctatattacggatcatttctctactcagaaacctgaaacatcggcattatcctcctgcttgcaactatagcaacagccttcataggctatgtcctcccgtgaggccaaatatcattctgaggggccacagtaattacaaacttactatccgccatcccatacattgggacagacctagttcaatgaatctgaggaggctactcagtagacagtcccaccctcacacgattctttacctttcacttcatcttgcccttcattattgcagccctagcagcactccacctcctattcttgcacgaaacgggatcaaacaaccccctaggaatcacctcccattccgataaaatcaccttccacccttactacacaatcaaagacgccctcggcttacttctcttcattctctccttaatgacattaacactattctcaccagacctcctaggcgacccagacaattataccctagccaaccccttaaacacccctccccacatcaagcccgaatgatatttcctattcgcctacacaattctccgatccgtccctaacaaactaggaggcgtccttgccctattactatccatcctcatcctagcaataatccccatcctccatatatccaaacaacaaagcataatatttcgcccactaagccaatcactttattgactcctagccgcagacctcctcattctaacctgaatcggaggacaaccagtaagctacccttttaccatcattggacaagtagcatccgtactatacttcacaacaatcctaatcctaataccaactatctccctaattgaaaacaaaatactcaaatgggcctgtccttgtagtataaactaatacaccagtcttgtaaaccggagatgaaaacctttttccaaggacaaatcagagaaaaagtctttaactccaccattagcacccaaagctaagattctaatttaaactattctctgttctttcatggggaagcagatttgggtaccacccaagtattgacttacccatcaacaaccgctatgtatttcgtacattactgccagccaccatgaatattgcacggtaccataaatacttgaccacctgtagtacataaaaacccaatccacatcaaaaccccctccccatgcttacaagcaagtacagcaatcaaccctcaactatcacacatcaactgcaactccaaagccacccctcacccactaggataccaacaaacctacccacccttaacagtacatagtacataaagccatttaccgtacatagcacattacagtcaaatcccttctcgtccccatggatgacccccctcagataggggtcccttgaccaccatcctccgtgaaatcaatatcccgcacaagagtgctactctcctcgctccgggcccataacacttgggggtagctaaagtgaactgtatccgacatctggttcctacttcagggtcataaagcctaaatagcccacacgttccccttaaataagacatcacgatg

SEQ ID NO: 398 - DNA, 16573 bp, Homo sapiens mitochondrial
  3111: "n" refers to a nucleotide at position 3107 of the Cambridge Reference Sequence (CRS, Anderson et al. 1981 Nature 290:457-465), later determined to be absent from the human mtDNA sequence according to the revised CRS (rCRS, Andrews et al. 1999 Nature Genetics 23:147); "n" therefore represents a single nucleotide deletion at a position corresponding to nucleotide 3107 of SEQ ID NO:1 as provided herein.
gatcacaggtctatcaccctattaaccactcacgggagctctccatgcatttggtattttcgtctggggggtgtgcacgcgatagcattgcgagacgctggagccggagcaccctatgtcgcagtatctgtctttgattcctgcctcatcccattatttatcgcacctacgttcaatattacaggcgaacatacttaccaaagcgtattaattaattaatgcttgtaggacataataataacaattgaacgtctgcacagccgctttccacacagacatcataacaaaaaatttccaccaaaccccccctcccccgccttctggccacagcacttaaacacatctctgccaaaccccaaaaacaaagaaccctaacaccagcctaaccagatttcaaattttatcttttggcggtatgcacttttaacagtcaccccccaactaacacattattttcccctcccactcccatactactaatctcatcaatacaacccccgcccatcctacccagcacacacacaccgctgctaaccccataccccgaaccaaccaaaccccaaagacaccccccaccccagtttatgtagcttacctcctcaaagcaatacactgaaaatgtttagacgggctcacatcaccccataaacaaataggtttggtcctagcctttctattagctcttagtaagattacacatgcaagcatccccgttccagtgagttcaccctctaaatcaccacgatcaaaagggacaagcatcaagcacgcagcaatgcagctcaaaacgcttagcctagccacacccccacgggaaacagcagtgattaacctttagcaataaacgaaagtttaactaagctatactaaccccagggttggtcaatttcgtgccagccaccgcggtcacacgattaacccaagtcaatagaagccggcgtaaagagtgttttagatcaccccctccccaataaagctaaaactcacctgagttgtaaaaaactccagttgacacaaaatagactacgaaagtggctttaacatatctgaacacacaatagctaagacccaaactgggattagataccccactatgcttagccctaaacctcaacagttaaatcaacaaaactgctcgccagaacactacgagccacagcttaaaactcaaaggacctggcggtgcttcatatccctctagaggagcctgttctgtaatcgataaaccccgatcaacctcaccacctcttgctcagcctatataccgccatcttcagcaaaccctgatgaaggctacaaagtaagcgcaagtacccacgtaaagacgttaggtcaaggtgtagcccatgaggtggcaagaaatgggctacattttctaccccagaaaactacgatagcccttatgaaacttaagggtcgaaggtggatttagcagtaaactgagagtagagtgcttagttgaacagggccctgaagcgcgtacacaccgcccgtcaccctcctcaagtatacttcaaaggacatttaactaaaacccctacgcatttatatagaggagacaagtcgtaacatggtaagtgtactggaaagtgcacttggacgaaccagagtgtagcttaacacaaagcacccaacttacacttaggagatttcaacttaacttgaccgctctgagctaaacctagccccaaacccactccaccttactaccagacaaccttaaccaaaccatttacccaaataaagtataggcgatagaaattgaaacctggcgcaatagatatagtaccgcaagggaaagatgaaaaattataaccaagcataatatagcaaggactaacccctataccttctgcataatgaattaactagaaataactttgcaaggagagccaaagctaagacccccgaaaccagacgagctacctaagaacagctaaaagagcacacccgtctatgtagcaaaatagtgggaagatttataggtagaggcgacaaacctaccgagcctggtgatagctggttgtccaagatagaatcttagttcaactttaaatttgcccacagaaccctctaaatccccttgtaaatttaactgttagtccaaagaggaacagctctttggacactaggaaaaaaccttgtagagagagtaaaaaatttaacacccatagtaggcctaaaagcagccaccaattaagaaagcgttcaagctcaacacccactacctaaaaaatcccaaacatataactgaactcctcacacccaattggaccaatctatcaccctatagaagaactaatgttagtataagtaacatgaaaacattctcctccgcataagcctgcgtcagattaaaacactgaactgacaattaacagcccaatatctacaatcaaccaacaagtcattattaccctcactgtcaacccaacacaggcatgctcataaggaaaggttaaaaaaagtaaaaggaactcggcaaatcttaccccgcctgtttaccaaaaacatcacctctagcatcaccagtattagaggcaccgcctgcccagtgacacatgtttaacggccgcggtaccctaaccgtgcaaaggtagcataatcacttgttccttaaatagggacctgtatgaatggctccacgagggttcagctgtctcttacttttaaccagtgaaattgacctgcccgtgaagaggcgggcatgacacagcaagacgagaagaccctatggagctttaatttattaatgcaaacagtacctaacaaacccacaggtcctaaactaccaaacctgcattaaaaatttcggttggggcgacctcggagcagaacccaacctccgagcagtacatgctaagacttcaccagtcaaagcgaactactatactcaattgatccaataacttgaccaacggaacaagttaccctagggataacagcgcaatcctattctagagtccatatcaacaatagggtttacgacctcgatgttggatcaggacatcccgatggtgcagccgctattaaaggttcgtttgttcaacgattaaagtcctacgtgatctgagttcagaccggagtaatccaggtcggtttctatctacnttcaaattcctccctgtacgaaaggacaagagaaataaggcctacttcacaaagcgccttcccccgtaaatgatatcatctcaacttagtattatacccacacccacccaagaacagggtttgttaagatggcagagcccggtaatcgcataaaacttaaaactttacagtcagaggttcaattcctcttcttaacaacatacccatggccaacctcctactcctcattgtacccattctaatcgcaatggcattcctaatgcttaccgaacgaaaaattctaggctatatacaactacgcaaaggccccaacgttgtaggcccctacgggctactacaacccttcgctgacgccataaaactcttcaccaaagagcccctaaaacccgccacatctaccatcaccctctacatcaccgccccgaccttagctctcaccatcgctcttctactatgaacccccctccccatacccaaccccctggtcaacctcaacctaggcctcctatttattctagccacctctagcctagccgtttactcaatcctctgatcagggtgagcatcaaactcaaactacgccctgatcggcgcactgcgagcagtagcccaaacaatctcatatgaagtcaccctagccatcattctactatcaacattactaataagtggctcctttaacctctccacccttatcacaacacaagaacacctctgattactcctgccatcatgacccttggccataatatgatttatctccacactagcagagaccaaccgaacccccttcgaccttgccgaaggggagtccgaactagtctcaggcttcaacatcgaatacgccgcaggccccttcgccctattcttcatagccgaatacacaaacattattataataaacaccctcaccactacaatcttcctaggaacaacatatgacgcactctcccctgaactctacacaacatattttgtcaccaagaccctacttctaacctccctgttcttatgaattcgaacagcatacccccgattccgctacgaccaactcatacacctcctatgaaaaaacttcctaccactcaccctagcattacttatatgatatgtctccatacccattacaatctccagcattccccctcaaacctaagaaatatgtctgataaaagagttactttgatagagtaaataataggagcttaaacccccttatttctaggactatgagaatcgaacccatccctgagaatccaaaattctccgtgccacctatcacaccccatcctaaagtaaggtcagctaaataagctatcgggcccataccccgaaaatgttggttatacccttcccgtactaattaatcccctggcccaacccgtcatctactctaccatctttgcaggcacactcatcactgcgctaagctcgcactgattttttacctgagtaggcctagaaataaacatgctagcttttattccagttctaaccaaaaaaataaaccctcgttccacagaagctgccatcaagtatttcctcacgcaagcaaccgcatccataatccttctaatagctatcctcttcaacaatatactctccggacaatgaaccataaccaatactaccaatcaatactcatcattaataatcataatggctatagcaataaaactaggaatagccccctttcacttctgagtcccagaggttacccaaggcacccctctgacatccggcctgcttcttctcacatgacaaaaactagcccccatctcaatcatataccaaatctctccctcactaaacgtaagccttctcctcactctctcaatcttatccatcatagcaggcagttgaggtggattaaaccaaacccagctacgcaaaatcttagcatactcctcaattacccacataggatgaataatagcagttctaccgtacaaccctaacataaccattcttaatttaactatttatattatcctaactactaccgcattcctactactcaacttaaactccagcaccacgaccctactactatctcgcacctgaaacaagctaacatgactaacacccttaattccatccaccctcctctccctaggaggcctgcccccgctaaccggctttttgcccaaatgggccattatcgaagaattcacaaaaaacaatagcctcatcatccccaccatcatagccaccatcaccctccttaacctctacttctacctacgcctaatctactccacctcaatcacactactccccatatctaacaacgtaaaaataaaatgacagtttgaacatacaaaacccaccccattcctccccacactcatcgcccttaccacgctactcctacctatctccccttttatactaataatcttatagaaatttaggttaaatacagaccaagagccttcaaagccctcagtaagttgcaatacttaatttctgtaacagctaaggactgcaaaaccccactctgcatcaactgaacgcaaatcagccactttaattaagctaagcccttactagaccaatgggacttaaacccacaaacacttagttaacagctaagcaccctaatcaactggcttcaatctacttctcccgccgccgggaaaaaaggcgggagaagccccggcaggtttgaagctgcttcttcgaatttgcaattcaatatgaaaatcacctcggagctggtaaaaagaggcctaacccctgtctttagatttacagtccaatgcttcactcagccattttacctcacccccactgatgttcgccgaccgttgactattctctacaaaccacaaagacattggaacactatacctattattcggcgcatgagctggagtcctaggcacagctctaagcctccttattcgagccgagctgggccagccaggcaaccttctaggtaacgaccacatctacaacgttatcgtcacagcccatgcatttgtaataatcttcttcatagtaatacccatcataatcggaggctttggcaactgactagttcccctaataatcggtgcccccgatatggcgtttccccgcataaacaacataagcttctgactcttacctccctctctcctactcctgctcgcatctgctatagtggaggccggagcaggaacaggttgaacagtctaccctcccttagcagggaactactcccaccctggagcctccgtagacctaaccatcttctccttacacctagcaggtgtctcctctatcttaggggccatcaatttcatcacaacaattatcaatataaaaccccctgccataacccaataccaaacgcccctcttcgtctgatccgtcctaatcacagcagtcctacttctcctatctctcccagtcctagctgctggcatcactatactactaacagaccgcaacctcaacaccaccttcttcgaccccgccggaggaggagaccccattctataccaacacctattctgatttttcggtcaccctgaagtttatattcttatcctaccaggcttcggaataatctcccatattgtaacttactactccggaaaaaaagaaccatttggatacataggtatggtctgagctatgatatcaattggcttcctagggtttatcgtgtgagcacaccatatatttacagtaggaatagacgtagacacacgagcatatttcacctccgctaccataatcatcgctatccccaccggcgtcaaagtatttagctgactcgccacactccacggaagcaatatgaaatgatctgctgcagtgctctgagccctaggattcatctttcttttcaccgtaggtggcctgactggcattgtattagcaaactcatcactagacatcgtactacacgacacgtactacgttgtagctcacttccactatgtcctatcaataggagctgtatttgccatcataggaggcttcattcactgatttcccctattctcaggctacaccctagaccaaacctacgccaaaatccatttcactatcatattcatcggcgtaaatctaactttcttcccacaacactttctcggcctatccggaatgccccgacgttactcggactaccccgatgcatacaccacatgaaacatcctatcatctgtaggctcattcatttctctaacagcagtaatattaataattttcatgatttgagaagccttcgcttcgaagcgaaaagtcctaatagtagaagaaccctccataaacctggagtgactatatggatgccccccaccctaccacacattcgaagaacccgtatacataaaatctagacaaaaaaggaaggaatcgaaccccccaaagctggtttcaagccaaccccatggcctccatgactttttcaaaaaggtattagaaaaaccatttcataactttgtcaaagttaaattataggctaaatcctatatatcttaatggcacatgcagcgcaagtaggtctacaagacgctacttcccctatcatagaagagcttatcacctttcatgatcacgccctcataatcattttccttatctgcttcctagtcctgtatgcccttttcctaacactcacaacaaaactaactaatactaacatctcagacgctcaggaaatagaaaccgtctgaactatcctgcccgccatcatcctagtcctcatcgccctcccatccctacgcatcctttacataacagacgaggtcaacgatccctcccttaccatcaaatcaattggccaccaatggtactgaacctacgagtacaccgactacggcggactaatcttcaactcctacatacttcccccattattcctagaaccaggcgacctgcgactccttgacgttgacaatcgagtagtactcccgattgaagcccccattcgtataataattacatcacaagacgtcttgcactcatgagctgtccccacattaggcttaaaaacagatgcaattcccggacgcctaaaccaaaccactttcaccgctacacgaccgggggtatactacggtcaatgctctgaaatctgtggagcaaaccacagtttcatgcccatcgtcctagaattaattcccctaaaaatctttgaaataggacccgtatttaccctatagcaccccctctaccccctctagagcccactgtaaagctaacttagcattaaccttttaagttaaagattaagagaaccaacacctctttacagtgaaatgccccaactaaatactaccgtatggcccaccataattacccccatactccttacactattcctcatcacccaactaaaaatattaaacacaaactaccacctacctccctcaccaaagcccataaaaataaaaaattataacaaaccctgagaaccaaaatgaacgaaaatctgttcgcttcattcattacccccacaatcctaggcctacccgccgcagtactgatcattctatttccccctctattgatccccacctccaaatatctcatcaacaaccgactaatcaccacccaacaatgactaatcaaactaacctcaaaacaaatgataaccatacacaacactaaaggacgaacctgatctcttatactagtatccttaatcatttttattgccacaactaacctcctcggactcctgcctcactcatttacaccaaccacccaactatctataaacctagccatggccatccccttatgagcgggcgcagtgattataggctttcgctctaagattaaaaatgccctagcccacttcttaccacaaggcacacctacaccccttatccccatactagttattatcgaaaccatcagcctactcattcaaccaatagccctggccgtacgcctaaccgctaacattactgcaggccacctactcatgcacctaattggaagcgccaccctagcaatatcaaccattaaccttccctctacacttatcatcttcacaattctaattctactgactatcctagaaatcgctgtcgccttaatccaagcctacgttttcacacttctagtaagcctctacctgcacgacaacacataatgacccaccaatcacatgcctatcatatagtaaaacccagcccatgacccctaacaggggccctctcagccctcctaatgacctccggcctagccatgtgatttcacttccactccataacgctcctcatactaggcctactaaccaacacactaaccatataccaatgatggcgcgatgtaacacgagaaagcacataccaaggccaccacacaccacctgtccaaaaaggccttcgatacgggataatcctatttattacctcagaagtttttttcttcgcaggatttttctgagccttttaccactccagcctagcccctaccccccaattaggagggcactggcccccaacaggcatcaccccgctaaatcccctagaagtcccactcctaaacacatccgtattactcgcatcaggagtatcaatcacctgagctcaccatagtctaatagaaaacaaccgaaaccaaataattcaagcactgcttattacaattttactgggtctctattttaccctcctacaagcctcagagtacttcgagtctcccttcaccatttccgacggcatctacggctcaacattttttgtagccacaggcttccacggacttcacgtcattattggctcaactttcctcactatctgcttcatccgccaactaatatttcactttacatccaaacatcactttggcttcgaagccgccgcctgatactggcattttgtagatgtggtttgactatttctgtatgtctccatctattgatgagggtcttactcttttagtataaatagtaccgttaacttccaattaactagctttgacaacattcaaaaaagagtaataaacttcgccttaattttaataatcaacaccctcctagccttactactaataattattacattttgactaccacaactcaacggctacatagaaaaatccaccccttacgagtgcggcttcgaccctatatcccccgcccgcgtccctttctccataaaattcttcttagtagctatcaccttcttattatttgatctagaaattgccctccttttacccctaccatgagccctacaaacaactaacctgccactaatagttatgtcatccctcttattaatcatcatcctagccctaagtctggcctatgagtgactacaaaaaggattagactgagccgaattggtatatagtttaaacaaaacgaatgatttcgactcattaaattatgataatcatatttaccaaatgcccctcatttacataaatattatactagcatttaccatctcacttctaggaatactagtatatcgctcacacctcatatcctccctactatgcctagaaggaataatactatcgctgttcattatagctactctcataaccctcaacacccactccctcttagccaatattgtgcctattgccatactagtctttgccgcctgcgaagcagcggtgggcctagccctactagtctcaatctccaacacatatggcctagactacgtacataacctaaacctactccaatgctaaaactaatcgtcccaacaattatattactaccactgacatgactttccaaaaaacacataatttgaatcaacacaaccacccacagcctaattattagcatcatccctctactattttttaaccaaatcaacaacaacctatttagctgttccccaaccttttcctccgaccccctaacaacccccctcctaatactaactacctgactcctacccctcacaatcatggcaagccaacgccacttatccagtgaaccactatcacgaaaaaaactctacctctctatactaatctccctacaaatctccttaattataacattcacagccacagaactaatcatattttatatcttcttcgaaaccacacttatccccaccttggctatcatcacccgatgaggcaaccagccagaacgcctgaacgcaggcacatacttcctattctacaccctagtaggctcccttcccctactcatcgcactaatttacactcacaacaccctaggctcactaaacattctactactcactctcactgcccaagaactatcaaactcctgagccaacaacttaatatgactagcttacacaatagcttttatagtaaagatacctctttacggactccacttatgactccctaaagcccatgtcgaagcccccatcgctgggtcaatagtacttgccgcagtactcttaaaactaggcggctatggtataatacgcctcacactcattctcaaccccctgacaaaacacatagcctaccccttccttgtactatccctatgaggcataattataacaagctccatctgcctacgacaaacagacctaaaatcgctcattgcatactcttcaatcagccacatagccctcgtagtaacagccattctcatccaaaccccctgaagcttcaccggcgcagtcattctcataatcgcccacggacttacatcctcattactattctgcctagcaaactcaaactacgaacgcactcacagtcgcatcataatcctctctcaaggacttcaaactctactcccactaatagctttttgatgacttctagcaagcctcgctaacctcgccttaccccccactattaacctactgggagaactctctgtgctagtaaccacgttctcctgatcaaatatcactctcctacttacaggactcaacatactagtcacagccctatactccctctacatatttaccacaacacaatggggctcactcacccaccacattaacaacataaaaccctcattcacacgagaaaacaccctcatgttcatacacctatcccccattctcctcctatccctcaaccccgacatcattaccgggttttcctcttgtaaatatagtttaaccaaaacatcagattgtgaatctgacaacagaggcttacgaccccttatttaccgagaaagctcacaagaactgctaactcatgcccccatgtctaacaacatggctttctcaacttttaaaggataacagctatccattggtcttaggccccaaaaattttggtgcaactccaaataaaagtaataaccatgcacactactataaccaccctaaccctgacttccctaattccccccatccttaccaccctcgttaaccctaacaaaaaaaactcatacccccattatgtaaaatccattgtcgcatccacctttattatcagtctcttccccacaacaatattcatatgcctagaccaagaagttattatctcgaactgacactgagccacaacccaaacaacccagctctccctaagcttcaaactagactacttctccataatattcatccctgtagcattgttcgttacatggtccatcatagaattctcactgtgatatataaactcagacccaaacattaatcagttcttcaaatatctactcattttcctaattaccatactaatcttagttaccgctaacaacctattccaactgttcatcggctgagagggcgtaggaattatatccttcttgctcatcagttgatgatacgcccgagcagatgccaacacagcagccattcaagcaatcctatacaaccgtatcggcgatatcggtttcatcctcgccttagcatgatttatcctacactccaactcatgagacccacaacaaatagcccttctaaacgctaatccaagcctcaccccactactaggcctcctcctagcagcagcaggcaaatcagcccaattaggtctccacccctgactcccctcagccatagaaggccccaccccagtctcagccctactccactcaagcactatagttgtagcaggaatcttcttactcatccgcttccaccccctagcagaaaatagcccactaatccaaactctaacactatgcttaggcgctatcaccactctgttcgcagcagtctgcgcccttacacaaaatgacatcaaaaaaatcgtagccttctccacttcaagtcaactaggactcataatagttacaatcggcatcaaccaaccacacctagcattcctgcacatctgtacccacgccttcttcaaagccatactatttatgtgctccgggtccatcatccacaaccttaacaatgaacaagatattcgaaaaataggaggactactcaaaaccatacctctcacttcaacctccctcaccattggcagcctagcattagcaggaatacctttcctcacaggtttctactccaaagaccacatcatcgaaaccgcaaacatatcatacacaaacgcctgagccctatctattactctcatcgctacctccctgacaagcgcctatagcactcgaataattcttctcaccctaacaggtcaacctcgcttccccacccttactaacattaacgaaaataaccccaccctactaaaccccattaaacgcctggcagccggaagcctattcgcaggatttctcattactaacaacatttcccccgcatcccccttccaaacaacagtccccctctacctaaaactcacagccctcgctgtcactttcctaggacttctaacagccctagacctcaactacctaaccaacaaacttaaaataaaatccccactatgcacattttatttctccaacatactcggattctaccctagcatcacacaccgcacaatcccctatctaggccttcttacgagccaaaacctgcccctactcctcctagacctaacctgactagaaaagctattacctaaaacaatttcacagcaccaaatctccacctccatcatcacctcaacccaaaaaggcataattaaactttacttcctctctttcttcttcccactcatcctaaccctactcctaatcacataacctattcccccgagcaatctcaattacaatatatacaccaacaaacaatgttcaaccagtaactactactaatcaacgcccataatcatacaaagcccccgcaccaataggatcctcccgaatcaaccctgacccctctccttcataaattattcagcttcctacactattaaagtttaccacaaccaccaccccatcatactctttcacccacagcaccaatcctacctccatcgctaaccccactaaaacactcaccaagacctcaacccctgacccccatgcctcaggatactcctcaatagccatcgctgtagtatatccaaagacaaccatcattccccctaaataaattaaaaaaactattaaacccatataacctcccccaaaattcagaataataacacacccgaccacaccgctaacaatcaatactaaacccccataaataggagaaggcttagaagaaaaccccacaaaccccattactaaacccacactcaacagaaacaaagcatacatcattattctcgcacggactacaaccacgaccaatgatatgaaaaaccatcgttgtatttcaactacaagaacaccaatgaccccaatacgcaaaattaaccccctaataaaattaattaaccactcattcatcgacctccccaccccatccaacatctccgcatgatgaaacttcggctcactccttggcgcctgcctgatcctccaaatcaccacaggactattcctagccatgcactactcaccagacgcctcaaccgccttttcatcaatcgcccacatcactcgagacgtaaattatggctgaatcatccgctaccttcacgccaatggcgcctcaatattctttatctgcctcttcctacacatcggacgaggcctatattacggatcatttctctactcagaaacctgaaacatcggcattatcctcctgcttgcaactatagcaacagccttcataggctatgtcctcccgtgaggccaaatatcattctgaggggccacagtaattacaaacttactatccgccatcccatacattgggacagacctagttcaatgaatctgaggaggctactcagtagacagtcccaccctcacacgattctttacctttcacttcatcttgcccttcattattgcagccctagcagcactccacctcctattcttgcacgaaacgggatcaaacaaccccctaggaatcacctcccattccgataaaatcaccttccacccttactacacaatcaaagacgccctcggcttacttctcttccttctctccttaatgacattaacactattctcaccagacctcctaggcgacccagacaattataccctagccaaccccttaaacacccctccccacatcaagcccgaatgatatttcctattcgcctacacaattctccgatccgtccctaacaaactaggaggcgtccttgccctattactatccatcctcatcctagcaataatccccatcctccatatatccaaacaacaaagcataatatttcgcccactaagccaatcactttattgactcctagccgcagacctcctcattctaacctgagtcggaggacaaccagtaagctacccttttaccatcattggacaagtagcatccgtactatacttcacaacaatcctaatcctaataccaactatctccctaattgaaaacaaaatactcaaatgggcctgtccttgtagtataaactaatacaccagtcttgtaagccggagatgaaaacctttttccaaggacaaatcagagaaaaagtctttaactccaccattagcacccaaagctaagattctaatttaaactattctctgttctttcatggggaagcagatttgggtaccacccaagtattgactcacccatcaacaaccgctatgtatttcgtacattactgccagccaccatgaatattgtacagtaccataaatacttgaccacctgtagtacataaaaacccaatccacatcaaaaccccctccccatgcttacaagcaagtacagcaatcaaccttcaactatcacacatcaactgcaactccaaagccacccctcacccactaggataccaacaaacctacccacccttaacagtacatagtacataaagccatttaccgtacatagcacattacagtcaaatcccttctcgtccccatggatgacccccctcagatagggatcccttgaccaccatcctccgtgaaatcaatatcccgcacaagagtgctactctcctcgctccgggcccataacacttgggggtagctaaagtgaactgtatccgacatctggttcctacttcagggccataaagcctaaatagcccacacgttccccttaaataagacatcacgatg

SEQ ID NO: 399 - DNA, 16570 bp, Homo sapiens mitochondrial
  3108: "n" refers to a nucleotide at position 3107 of the Cambridge Reference Sequence (CRS, Anderson et al. 1981 Nature 290:457-465), later determined to be absent from the human mtDNA sequence according to the revised CRS (rCRS, Andrews et al. 1999 Nature Genetics 23:147); "n" therefore represents a single nucleotide deletion at a position corresponding to nucleotide 3107 of SEQ ID NO:1 as provided herein.
gatcacaggtctatcaccctattaaccactcacgggagctctccatgcatttggtattttcgtctggggggtatgcacgcgatagcattgcgagacgctggagccggagcaccctatgtcgcagtatctgtctttgattcctgcctcatcctattatttatcgcacctacgttcaatattacaggcgaacatacttactaaagtgtgttaattaattaatgcttgtaggacataataataacaattgaatgtctgcacagccgctttccacacagacatcataacaaaaaatttccaccaaaccccccctcccccgccttctggccacagcacttaaacacatctctgccaaaccccaaaaacaaagaaccctaacaccagcctaaccagatttcaaattttatcttttggcggtatgcacttttaacagtcaccccccaactaacacattattttcccctcccactcccatactactaatctcatcaatacaacccccgcccatcctacccagcacacacacaccgctgctaaccccataccccgaaccaaccaaaccccaaagacaccccccacagtttatgtagcttacctcctcaaagcaatacactgaaaatgtttagacgggctcacatcaccccataaacaaataggtttggtcctagcctttctattagctcttagtaagattacacatgcaagcatccccgttccagtgagttcaccctctaaatcaccacgatcaaaagggacaagcatcaagcacgcagcaatgcagctcaaaacgcttagcctagccacacccccacgggaaacagcagtgattaacctttagcaataaacgaaagtttaactaagctatactaaccccagggttggtcaatttcgtgccagccaccgcggtcacacgattaacccaagtcaatagaagccggcgtaaagagtgttttagatcaccccctccccaataaagctaaaactcacctgagttgtaaaaaactccagttgacacaaaatagactacgaaagtggctttaacatatctgaacacacaatagctaagacccaaactgggattagataccccactatgcttagccctaaacctcaacagttaaatcaacaaaactgctcgccagaacactacgagccacagcttaaaactcaaaggacctggcggtgcttcatatccctctagaggagcctgttctgtaatcgataaaccccgatcaacctcaccacctcttgctcagcctatataccgccatcttcagcaaaccctgatgaaggctacaaagtaagcgcaagtacccacgtaaagacgttaggtcaaggtgtagcccatgaggtggcaagaaatgggctacattttctaccccagaaaactacgatagcccttatgaaacttaagggtcgaaggtggatttagcagtaaactgagagtagagtgcttagttgaacagggccctgaagcgcgtacacaccgcccgtcaccctcctcaagtatacttcaaaggacatttaactaaaacccctacgcatttatatagaggagacaagtcgtaacatggtaagtgtactggaaagtgcacttggacgaaccagagtgtagcttaacacaaagcacccaacttacacttaggagatttcaacttaacttgaccgctctgagctaaacctagccccaaacccactccaccttactaccagacaaccttagccaaaccatttacccaaataaagtataggcgatagaaattgaaacctggcgcaatagatatagtaccgcaagggaaagatgaaaaattataaccaagcataatatagcaaggactaacccctataccttctgcataatgaattaactagaaataactttgcaaggagagccaaagctaagacccccgaaaccagacgagctacctaagaacagctaaaagagcacacccgtctatgtagcaaaatagtgggaagatttataggtagaggcgacaaacctaccgagcctggtgatagctggttgtccaagatagaatcttagttcaactttaaatttgcccacagaaccctctaaatccccttgtaaatttaactgttagtccaaagaggaacagctctttggacactaggaaaaaaccttgtagagagagtaaaaaatttaacacccatagtaggcctaaaagcagccaccaattaagaaagcgttcaagctcaacacccactacctaaaaaatcccaaacatataactgaactcctcacacccaattggaccaatctatcaccctatagaagaactaatgttagtataagtaacatgaaaacattctcctccgcataagcctgcgtcagattaaaacactgaactgacaattaacagcccaatatctacaatcaaccaacaagtcattattaccctcactgtcaacccaacacaggcatgctcataaggaaaggttaaaaaaagtaaaaggaactcggcaaatcttaccccgcctgtttaccaaaaacatcacctctagcatcaccagtattagaggcaccgcctgcccagtgacacatgtttaacggccgcggtaccctaaccgtgcaaaggtagcataatcacttgttccttaaatagggacctgtatgaatggctccacgagggttcagctgtctcttacttttaaccagtgaaattgacctgcccgtgaagaggcgggcataacacagcaagacgagaagaccctatggagctttaatttattaatgcaaacagtacctaacaaacccacaggtcctaaactaccaaacctgcattaaaaatttcggttggggcgacctcggagcagaacccaacctccgagcagtacatgctaagacttcaccagtcaaagcgaactactatactcaattgatccaataacttgaccaacggaacaagttaccctagggataacagcgcaatcctattctagagtccatatcaacaatagggtttacgacctcgatgttggatcaggacatcccgatggtgcagccgctattaaaggttcgtttgttcaacgattaaagtcctacgtgatctgagttcagaccggagtaatccaggtcggtttctatctacnttcaaattcctccctgtacgaaaggacaagagaaataaggcctacttcacaaagcgccttcccccgtaaatgatatcatctcaacttagtattatacccacacccacccaagaacagggtttgttaagatggcagagcccggtaatcgcataaaacttaaaactttacagtcagaggttcaattcctcttcttaacaacatacccatggccaacctcctactcctcattgtacccattctaatcgcaatggcattcctaatgcttaccgaacgaaaaattctaggctatatacaactacgcaaaggccccaacgttgtaggcccctacgggctactacaacccttcgctgacgccataaaactcttcaccaaagagcccctaaaacccgccacatctaccatcaccctctacatcaccgccccgaccttagctctcaccatcgctcttctactatgaacccccctccccatacccaaccccctggtcaacctcaacctaggcctcctatttattctagccacctctagcctagccgtttactcaatcctctgatcagggtgagcatcaaactcaaactacgccctgatcggcgcactgcgagcagtagcccaaacaatctcatatgaagtcaccctagccatcattctactatcaacattactaataagtggctcctttaacctctccacccttatcacaacacaagaacacctctgattactcctgccatcatgacccttggccataatatgatttatctccacactagcagagaccaaccgaacccccttcgaccttgccgaaggggagtccgaactagtctcaggcttcaacatcgaatacgccgcaggccccttcgccctattcttcatagccgaatacacaaacattattataataaacaccctcaccactacaatcttcctaggaacaacatatgacgcactctcccctgaactctacacaacatattttgtcaccaagaccctacttctaacctccctgttcttatgaattcgaacagcatacccccgattccgctacgaccaactcatacacctcctatgaaaaaacttcctaccactcaccctagcattacttatatgatatgtctccatacccattacaatctccagcattccccctcaaacctaagaaatatgtctgataaaagagttactttgatagagtaaataataggagcttaaacccccttatttctaggactatgagaatcgaacccatccctgagaatccaaaattctccgtgccacctatcacaccccatcctaaagtaaggtcagctaaataagctatcgggcccataccccgaaaatgttggttatacccttcccgtactaattaatcccctggcccaacccgtcatctactctaccatctttgcaggcacactcatcacagcgctaagctcgcactgattttttacctgagtaggcctagaaataaacatgctagcttttattccagttctaaccaaaaaaataaaccctcgttccacagaagctgccatcaagtatttcctcacgcaagcaaccgcatccataatccttctaatagctatcctcttcaacaatatactctccggacaatgaaccataaccaatactaccaatcaatactcatcattaataatcataatggctatagcaataaaactaggaatagccccctttcacttctgagtcccagaggttacccaaggcacccctctgacatccggcctgcttcttctcacatgacaaaaactagcccccatctcaatcatataccaaatctctccctcactaaacgtaagccttctcctcactctctcaatcttatccatcatagcaggcagttgaggtggattaaaccaaacccagctacgcaaaatcttagcatactcctcaattacccacataggatgaataatagcagttctaccgtacaaccctaacataaccattcttaatttaactatttatattatcctaactactaccgcattcctactactcaacttaaactccagcaccacgaccctactactatctcgcacctgaaacaagctaacatgactaacacccttaattccatccaccctcctctccctaggaggcctgcccccgctaaccggctttttgcccaaatgggccattatcgaagaattcacaaaaaacaatagcctcatcatccccaccatcatagccaccatcaccctccttaacctctacttctacctacgcctaatctactccacctcaatcacactactccccatatctaacaacgtaaaaataaaatgacagtttgaacatacaaaacccaccccattcctccccacactcatcgcccttaccacgctactcctacctatctccccttttatactaataatcttatagaaatttaggttaaatacagaccaagagccttcaaagccctcagtaagttgcaatacttaatttctgtaacagctaaggactgcaaaaccccactctgcatcaactgaacgcaaatcagccactttaattaagctaagcccttactagaccaatgggacttaaacccacaaacacttagttaacagctaagcaccctaatcaactggcttcaatctacttctcccgccgccgggaaaaaaggcgggagaagccccggcaggtttgaagctgcttcttcgaatttgcaattcaatatgaaaatcacctcggagctggtaaaaagaggcctaacccctgtctttagatttacagtccaatgcttcactcagccattttacctcacccccactgatgttcgccgaccgttgactattctctacaaaccacaaagacattggaacactatacctattattcggcgcatgagctggagtcctaggcacagctctaagcctccttattcgagccgagctgggccagccaggcaaccttctaggtaacgaccacatctacaacgttatcgtcacagcccatgcatttgtaataatcttcttcatagtaatacccatcataatcggaggctttggcaactgactagttcccctaataatcggtgcccccgatatggcgtttccccgcataaacaacataagcttctgactcttacctccctctctcctactcctgctcgcatctgctatagtggaggccggagcaggaacaggttgaacagtctaccctcccttagcagggaactactcccaccctggagcctccgtagacctaaccatcttctccttacacctagcaggtgtctcctctatcttaggggccatcaatttcatcacaacaattatcaatataaaaccccctgccataacccaataccaaacgcccctcttcgtctgatccgtcctaatcacagcagtcctacttctcctatctctcccagtcctagctgctggcatcactatactactaacagaccgcaacctcaacaccaccttcttcgaccccgccggaggaggagaccccattctataccaacacctattctgatttttcggtcaccctgaagtttatattcttatcctaccaggcttcggaataatctcccatattgtaacttactactccggaaaaaaagaaccatttggatacataggtatggtctgagctatgatatcaattggcttcctagggtttatcgtgtgagcacaccatatatttacagtaggaatagacgtagacacacgagcatatttcacctccgctaccataatcatcgctatccccaccggcgtcaaagtatttagctgactcgccacactccacggaagcaatatgaaatgatctgctgcagtgctctgagccctaggattcatctttcttttcaccgtaggtggcctgactggcattgtattagcaaactcatcactagacatcgtactacacgacacgtactacgttgtagcccacttccactatgtcctatcaataggagctgtatttgccatcataggaggcttcattcactgatttcccctattctcaggctacaccctagaccaaacctacgccaaaatccatttcactatcatattcatcggcgtaaatctaactttcttcccacaacactttctcggcctatccggaatgccccgacgttactcggactaccccgatgcatacaccacatgaaacatcctatcatctgtaggctcattcatttctctaacagcagtaatattaataattttcatgatttgagaagccttcgcttcgaagcgaaaagtcctaatagtagaagaaccctccataaacctggagtgactatatggatgccccccaccctaccacacattcgaagaacccgtatacataaaatctagacaaaaaaggaaggaatcgaaccccccaaagctggtttcaagccaaccccatggcctccatgactttttcaaaaaggtattagaaaaaccatttcataactttgtcaaagttaaattataggctaaatcctatatatcttaatggcacatgcagcgcaagtaggtctacaagacgctacttcccctatcatagaagagcttatcacctttcatgatcacgccctcataatcattttccttatctgcttcctagtcctgtatgcccttttcctaacactcacaacaaaactaactaatactaacatctcagacgctcaggaaatagaaaccgtctgaactatcctgcccgccatcatcctagtcctcatcgccctcccatccctacgcatcctttacataacagacgaggtcaacgatccctcccttaccatcaaatcaattggccaccaatggtactgaacctacgagtacaccgactacggcggactaatcttcaactcctacatacttcccccattattcctagaaccaggcgacctgcgactccttgacgttgacaatcgagtagtactcccgattgaagcccccattcgtataataattacatcacaagacgtcttgcactcatgagctgtccccacattaggcttaaaaacagatgcaattcccggacgtctaaaccaaaccactttcaccgctacacgaccgggggtatactacggtcaatgctctgaaatctgtggagcaaaccacagtttcatgcccatcgtcctagaattaattcccctaaaaatctttgaaatagggcccgtatttaccctatagcaccccctctaccccctctagagcccactgtaaagctaacttagcattaaccttttaagttaaagattaagagaaccaacacctctttacagtgaaatgccccaactaaatactaccgtatggcccaccataattacccccatactccttacactattcctcatcacccaactaaaaatattaaacacaaactaccacctacctccctcaccaaagcccataaaaataaaaaattataacaaaccctgagaaccaaaatgaacgaaaatctgttcgcttcattcattgcccccacaatcctaggcctacccgccgcagtactgatcattctatttccccctctattgatccccacctccaaatatctcatcaacaaccgactaatcaccacccaacaatgactaatcaaactaacctcaaaacaaatgataaccatacacaacactaaaggacgaacctgatctcttatactagtatccttaatcatttttattgccacaactaacctcctcggactcctgcctcactcatttacaccaaccacccaactatctataaacctagccatggccatccccttatgagcgggcgcagtgattataggctttcgctctaagattaaaaatgccctagcccacttcttaccacaaggcacacctacaccccttatccccatactagttattatcgaaaccatcagcctactcattcaaccaatagccctggccgtacgcctaaccgctaacattactgcaggccacctactcatgcacctaattggaagcgccaccctagcaatatcaaccattaaccttccctctacacttatcatcttcacaattctaattctactgactatcctagaaatcgctgtcgccttaatccaagcctacgttttcacacttctagtaagcctctacctgcacgacaacacataatgacccaccaatcacatgcctatcatatagtaaaacccagcccatgacccctaacaggggccctctcagccctcctaatgacctccggcctagccatgtgatttcacttccactccataacgctcctcatactaggcctactaaccaacacactaaccatataccaatgatggcgcgatgtaacacgagaaagcacataccaaggccaccacacaccacctgtccaaaaaggccttcgatacgggataatcctatttattacctcagaagtttttttcttcgcaggatttttctgagccttttaccactccagcctagcccctaccccccaattaggagggcactggcccccaacaggcatcaccccgctaaatcccctagaagtcccactcctaaacacatccgtattactcgcatcaggagtatcaatcacctgagctcaccatagtctaatagaaaacaaccgaaaccaaataattcaagcactgcttattacaattttactgggtctctattttaccctcctacaagcctcagagtacttcgagtctcccttcaccatttccgacggcatctacggctcaacattttttgtagccacaggcttccacggacttcacgtcattattggctcaactttcctcactatctgcttcatccgccaactaatatttcactttacatccaaacatcactttggcttcgaagccgccgcctgatactggcattttgtagatgtggtttgactatttctgtatgtctccatctattgatgagggtcttactcttttagtataaatagtaccgttaacttccaattaactagttttgacaacattcaaaaaagagtaataaacttcgccttaattttaataatcaacaccctcctagccttactactaataattattacattttgactaccacaactcaacggctacatagaaaaatccaccccttacgagtgcggcttcgaccctatatcccccgcccgcgtccctttctccataaaattcttcttagtagctattaccttcttattatttgatctagaaattgccctccttttacccctaccatgagccctacaaacaactaacctgccactaatagttatgtcatccctcttattaatcatcatcctagccctaagtctggcctatgagtgactacaaaaaggattagactgaaccgaattggtatatagtttaaacaaaacgaatgatttcgactcattaaattatgataatcatatttaccaaatgcccctcatttacataaatattatactagcatttaccatctcacttctaggaatactagtatatcgctcacacctcatatcctccctactatgcctagaaggaataatactatcgctgttcattatagctactctcataaccctcaacacccactccctcttagccaatattgtgcctattgccatactagtctttgccgcctgcgaagcagcggtgggcctagccctactagtctcaatctccaacacatatggcctagactacgtacataacctaaacctactccaatgctaaaactaatcgtcccaacaattatattactaccactgacatgactttccaaaaaacacataatttgaatcaacacaaccacccacagcctaattattagcatcatccctctactattttttaaccaaatcaacaacaacctatttagctgttccccaaccttttcctccgaccccctaacaacccccctcctaatactaactacctgactcctacccctcacaatcatggcaagccaacgccacttatccagtgaaccactatcacgaaaaaaactctacctctctatactaatctccctacaaatctccttaattataacattcacagccacagaactaatcatattttatatcttcttcgaaaccacacttatccccaccttgactatcatcacccgatgaggcaaccagccagaacgcctgaacgcaggcacatacttcctattctacaccctagtaggctcccttcccctactcatcgcactaatttacactcacaacaccctaggctcactaaacattctactactcactctcactgcccaagaactatcaaactcctgagccaacaacttaatatgactagcttacacaatagcttttatagtaaagatacctctttacggactccacttatgactccctaaagcccatgtcgaagcccccatcgctgggtcaatagtacttgccgcagtactcttaaaactaggcggctatggtataatacgcctcacactcattctcaaccccctgacaaaacacatagcctaccccttccttgtactatccctatgaggcataattataacaagctccatctgcctacgacaaacagacctaaaatcgctcattgcatactcttcaatcagccacatagccctcgtagtaacagccattctcatccaaaccccctgaagcttcaccggcgcagtcattctcataatcgcccacgggcttacatcctcattactattctgcctagcaaactcaaactacgaacgcactcacagtcgcatcataatcctctctcaaggacttcaaactctactcccactaatagctttttgatgacttctagcaagcctcgctaacctcgccttaccccccactattaacctactgggagaactctctgtgctagtaaccacgttctcctgatcaaatatcactctcctacttacaggactcaacatactagtcacagccctatactccctctacatatttaccacaacacaatggggctcactcacccaccacattaacaacataaaaccctcattcacacgagaaaacaccctcatgttcatacacctatcccccattctcctcctatccctcaaccccgacatcattaccgggttttcctcttgtaaatatagtttaaccaaaacatcagattgtgaatctgacaacagaggcttacgaccccttatttaccgagaaagctcacaagaactgctaactcatgcccccatgtctaacaacatggctttctcaacttttaaaggataacagctatccattggtcttaggccccaaaaattttggtgcaactccaaataaaagtaataaccatgcacactactataaccaccctaaccctgacttccctaattccccccatccttaccaccctcgttaaccctaacaaaaaaaactcatacccccattatgtaaaatccattgtcgcatccacctttattatcagtctcttccccacaacaatattcatgtgcctagaccaagaagttattatctcgaactgacactgagccacaacccaaacaacccagctctccctaagcttcaaactagactacttctccataatattcatccctgtagcattgttcgttacatggtccatcatagaattctcactgtgatatataaactcagacccaaacattaatcagttcttcaaatatctactcatcttcctaattaccatactaatcttagttaccgctaacaacctattccaactgttcatcggctgagagggcgtaggaattatatccttcttgctcatcagttgatgatacgcccgagcagatgccaacacagcagccattcaagcaatcctatacaaccgtatcggcgatatcggtttcatcctcgccttagcatgatttatcctacactccaactcatgagacccacaacaaatagcccttctaaacgctaatccaagcctcaccccactactaggcctcctcctagcagcagcaggcaaatcagcccaattaggtctccacccctgactcccctcagccatagaaggccccaccccagtctcagccctactccactcaagcactatagttgtagcaggaatcttcttactcatccgcttccaccccctagcagaaaatagcccactaatccaaactctaacactatgcttaggcgctatcaccactctgttcgcagcagtctgcgcccttacacaaaatgacatcaaaaaaatcgtagccttctccacttcaagtcaactaggactcataatagttacaatcggcatcaaccaaccacacctagcattcctgcacatctgtacccacgccttcttcaaagccatactatttatgtgctccgggtccatcatccacaaccttaacaatgaacaagatattcgaaaaataggaggactactcaaaaccatacctctcacttcaacctccctcaccattggcagcctagcattagcaggaatacctttcctcacaggtttctactccaaagaccacatcatcgaaaccgcaaacatatcatacacaaacgcctgagccctatctattactctcatcgctacctccctgacaagcgcctatagcactcgaataattcttctcaccctaacaggtcaacctcgcttccccacccttactaacattaacgaaaataaccccaccctactaaaccccattaaacgcctggcagccggaagcctattcgcaggatttctcattactaacaacatttcccccgcatcccccttccaaacaacaatccccctctacctaaaactcacagccctcgctgtcactttcctaggacttctaacagccctagacctcaactacctaaccaacaaacttaaaataaaatccccactatgcacattttatttctccaacatactcggattctaccctagcatcacacaccgcacaatcccctatctaggccttcttacgagccaaaacctgcccctactcctcctagacctaacctgactagaaaagctattacctaaaacaatttcacagcaccaaatctccacctccatcatcacctcaacccaaaaaggcataattaaactttacttcctctctttcttcttcccactcatcctaaccctactcctaatcacataacctattcccccgagcaatctcaattacaatatatacaccaacaaacaatgttcaaccagtaactactactaatcaacgcccataatcatacaaagcccccgcaccaataggatcctcccgaatcaaccctgacccctctccttcataaattattcagcttcctacactattaaagtttaccacaaccaccaccccatcatactctttcacccacagcaccaatcctacctccatcgctaaccccactaaaacactcaccaagacctcaacccctgacccccatgcctcaggatactcctcaatagccatcgctgtagtatatccaaagacaaccatcattccccctaaataaattaaaaaaactattaaacccatataacctcccccaaaattcagaataataacacacccgaccacaccgctaacaatcaatactaaacccccataaataggagaaggcttagaagaaaaccccacaaaccccattactaaacccacactcaacagaaacaaagcatacatcattattctcgcacggactacaaccacgaccaatgatatgaaaaaccatcgttgtatttcaactacaagaacaccaatgaccccaatacgcaaaactaaccccctaataaaattaattaaccactcattcatcgacctccccaccccatccaacatctccgcatgatgaaacttcggctcactccttggcgcctgcctgatcctccaaatcaccacaggactattcctagccatgcactactcaccagacgcctcaaccgccttttcatcaatcgcccacatcactcgagacgtaaattatggctgaatcatccgctaccttcacgccaatggcgcctcaatattctttatctgcctcttcctacacatcgggcgaggcctatattacggatcatttctctactcagaaacctgaaacatcggcattatcctcctgcttgcaactatagcaacagccttcataggctatgtcctcccgtgaggccaaatatcattctgaggggccacagtaattacaaacttactatccgccatcccatacattgggacagacctagttcaatgaatctgaggaggctactcagtagacagtcccaccctcacacgattctttacctttcacttcatcttgcccttcattattgcagccctagcagcactccacctcctattcttgcacgaaacgggatcaaacaaccccctaggaatcacctcccattccgataaaatcaccttccacccttactacacaatcaaagacgccctcggcttacttctcttccttctctccttaatgacattaacactattctcaccagacctcctaggcgacccagacaattataccctagccaaccccttaaacacccctccccacatcaagcccgaatgatatttcctattcgcctacacaattctccgatccgtccctaacaaactaggaggcgtccttgccctattactatccatcctcatcctagcaataatccccatcctccatatatccaaacaacaaagcataatatttcgcccactaagccaatcactttattgactcctagccgcagacctcctcattctaacctgaatcggaggacaaccagtaagctacccttttaccatcattggacaagtagcatccgtactatacttcacaacaatcctaatcctaataccaactatctccctaattgaaaacaaaatactcaaatgggcctgtccttgtagtataaactaatacaccagtcttgtaaaccggagatgaaaacctttttccaaggacaaatcagagaaaaagtctttaactccaccattagcacccaaagctaagattctaatttaaactattctctgttctttcatggggaagcagatttgggtaccacccaagtattgactcacccatcaacaaccgctatgtatttcgtacattactgccagccaccatgaatattgtacggtaccataaatacttgaccacctgtagtacataaaaacccaatccacatcaaaaccccctccccatgcttacaagcaagtacagcaatcaaccctcaactatcacacatcaactgcaactccaaagccacccctcacccactaggataccaacaaacctactcacccttaacagtacatagtacataaagccatttaccgtacatagcacattacagtcaaatcccttctcgtccccatggatgacccccctcagataggggtcccttgaccaccatcctccgtgaaatcaatatcccgcacaagagtgctactctcctcgctccgggcccataacacttgggggtagctaaagtgaactgtatccgacatctggttcctacttcagggccataaagcctaaatagcccacacgttccccttaaataagacatcacgatg

SEQ ID NO: 400 - DNA, 16571 bp, Homo sapiens mitochondrial
  3109: "n" refers to a nucleotide at position 3107 of the Cambridge Reference Sequence (CRS, Anderson et al. 1981 Nature 290:457-465), later determined to be absent from the human mtDNA sequence according to the revised CRS (rCRS, Andrews et al. 1999 Nature Genetics 23:147); "n" therefore represents a single nucleotide deletion at a position corresponding to nucleotide 3107 of SEQ ID NO:1 as provided herein.
gatcacaggtctatcaccctattaaccactcacgggagctctccatgcatttggtattttcgtctggggggcatgcacgcgatagcattgcgagacgctggagccggagcaccctatgtcgcagtatctgtctttgattcctgcctcatcctattatttatcgcacctacgttcaatattacaggcgaacatacctactaaagtgtgttaattaattaatgcttgtaggacataataataacaattgaatgtctgcacagccgctttccacacagacatcataacaaaaaatttccaccaaaccccccctcccccccgcttctggccacagcacttaaacacatctctgccaaaccccaaaaacaaagaaccctaacaccagcctaaccagatttcaaattttatcttttggcggtatgcacttttaacagtcaccccccaactaacacattattttcccctcccactcccatactactaatctcatcaatacaacccccgcccatcctacccagcacacacacaccgctgctaaccccataccccgaaccaaccaaaccccaaagacaccccccacagtttatgtagcttacctcctcaaagcaatacactgaaaatgtttagacgggctcacatcaccccataaacaaataggtttggtcctagcctttctattagctcttagtaagattacacatgcaagcatccccgttccagtgagttcaccctctaaatcaccacgatcaaaagggacaagcatcaagcacgcagcaatgcagctcaaaacgcttagcctagccacacccccacgggaaacagcagtgattaacctttagcaataaacgaaagtttaactaagctatactaaccccagggttggtcaatttcgtgccagccaccgcggtcacacgattaacccaagtcaatagaagccggcgtaaagagtgttttagatcaccccctccccaataaagctaaaactcacctgagttgtaaaaaactccagttgacacaaaatagactacgaaagtggctttaacatatctgaacacacaatagctaagacccaaactgggattagataccccactatgcttagccctaaacctcaacagttaaatcaacaaaactgctcgccagaacactacgagccacagcttaaaactcaaaggacctggcggtgcttcatatccctctagaggagcctgttctgtaatcgataaaccccgatcaacctcaccacctcttgctcagcctatataccgccatcttcagcaaaccctgatgaaggctacaaagtaagcgcaagtacccacgtaaagacgttaggtcaaggtgtagcccatgaggtggcaagaaatgggctacattttctaccccagaaaactacgatagcccttatgaaacttaagggtcgaaggtggatttagcagtaaactgagagtagagtgcttagttgaacagggccctgaagcgcgtacacaccgcccgtcaccctcctcaagtatacttcaaaggacatttaactaaaacccctacgcatttatatagaggagacaagtcgtaacatggtaagtgtactggaaagtgcacttggacgaaccagagtgtagcttaacacaaagcacccaacttacacttaggagatttcaacttaacttgaccgctctgagctaaacctagccccaaacccactccaccttactaccagacaaccttagccaaaccatttacccaaataaagtataggcgatagaaattgaaacctggcgcaatagatatagtaccgcaagggaaagatgaaaaattataaccaagcataatatagcaaggactaacccctataccttctgcataatgaattaactagaaataactttgcaaggagagccaaagctaagacccccgaaaccagacgagctacctaagaacagctaaaagagcacacccgtctatgtagcaaaatagtgggaagatttataggtagaggcgacaaacctaccgagcctggtgatagctggttgtccaagatagaatcttagttcaactttaaatttgcccacagaaccctctaaatccccttgtaaatttaactgttagtccaaagaggaacagctctttggacactaggaaaaaaccttgtagagagagtaaaaaatttaacacccatagtaggcctaaaagcagccaccaattaagaaagcgttcaagctcaacacccactacctaaaaaatcccaaacatataactgaactcctcacacccaattggaccaatctatcaccctatagaagaactaatgttagtataagtaacatgaaaacattctcctccgcataagcctgcgtcagattaaaacactgaactgacaattaacagcccaatatctacaatcaaccaacaagtcattattaccctcactgtcaacccaacacaggcatgctcataaggaaaggttaaaaaaagtaaaaggaactcggcaaatcttaccccgcctgtttaccaaaaacatcacctctagcatcaccagtattagaggcaccgcctgcccagtgacacatgtttaacggccgcggtaccctaaccgtgcaaaggtagcataatcacttgttccttaaatagggacctgtatgaatggctccacgagggttcagctgtctcttacttttaaccagtgaaattgacctgcccgtgaagaggcgggcatgacacagcaagacgagaagaccctatggagctttaatttattaatgcaaacagtacctaacaaacccacaggtcctaaactaccaaacctgcattaaaaatttcggttggggcgacctcggagcagaacccaacctccgagcagtacatgctaagacttcaccagtcaaagcgaactactatactcaattgatccaataacttgaccaacggaacaagttaccctagggataacagcgcaatcctattctagagtccatatcaacaatagggtttacgacctcgatgttggatcaggacatcccgatggtgcagccgctattaaaggttcgtttgttcaacgattaaagtcctacgtgatctgagttcagaccggagtaatccaggtcggtttctatctacnttcaaattcctccctgtacgaaaggacaagagaaataaggcctacttcacaaagcgccttcccccgtaaatgatatcatctcaacttagtattatacccacacccacccaagaacagggtttgttaagatggcagagcccggtaatcgcataaaacttaaaactttacagtcagaggttcaattcctcttcttaacaacatacccatggccaacctcctactcctcattgtacccattctaatcgcaatggcattcctaatgcttaccgaacgaaaaattctaggctatatacaactacgcaaaggccccaacgttgtaggcccctacgggctactacaacccttcgctgacgccataaaactcttcaccaaagagcccctaaaacccgccacatctaccatcaccctctacatcaccgccccgaccttagctctcaccatcgctcttctactatgaacccccctccccatacccaaccccctggtcaacctcaacctaggcctcctatttattctagccacctctagcctagccgtttactcaatcctctgatcagggtgagcatcaaactcaaactacgccctgatcggcgcactgcgagcagtagcccaaacaatctcatatgaagtcaccctagccatcattctactatcaacattactaataagtggctcctttaacctctccacccttatcacaacacaagaacacctctgattactcctgccatcatgacccttggccataatatgatttatctccacactagcagagaccaaccgaacccccttcgaccttgccgaaggggagtccgaactagtctcaggcttcaacatcgaatacgccgcaggccccttcgccctattcttcatagccgaatacacaaacattattataataaacaccctcaccactacaatcttcctaggaacaacatatgacgcactctcccctgaactctacacaacatattttgtcaccaagaccctacttctaacctccctgttcttatgaattcgaacagcatacccccgattccgctacgaccaactcatacacctcctatgaaaaaacttcctaccactcaccctagcattacttatatgatatgtctccatacccattacaatctccagcattccccctcaaacctaagaaatatgtctgataaaagagttactttgatagagtaaataataggagcttaaacccccttatttctaggactatgagaatcgaacccatccctgagaatccaaaattctccgtgccacctatcacaccccatcctaaagtaaggtcagctaaataagctatcgggcccataccccgaaaatgttggttatacccttcccgtactaattaatcccctggcccaacccgtcatctactctaccatctttgcaggcacactcatcacagcgctaagctcgcactgattttttacctgagtaggcctagaaataaacatgctagcttttattccagttctaaccaaaaaaataaaccctcgttccacagaagctgccatcaagtatttcctcacgcaagcaaccgcatccataatccttctaatagctatcctcttcaacaatatactctccggacaatgaaccataaccaatactaccaatcaatactcatcattaataatcataatggctatagcaataaaactaggaatagccccctttcacttctgagtcccagaggttacccaaggcacccctctgacatccggcctgcttcttctcacatgacaaaaactagcccccatctcaatcatataccaaatctctccctcactaaacgtaagccttctcctcactctctcaatcttatccatcatagcaggcagttgaggtggattaaaccaaacccagctacgcaaaatcttagcatactcctcaattacccacataggatgaataatagcagttctaccgtacaaccctaacataaccattcttaatttaactatttatattatcctaactactaccgcattcctactactcaacttaaactccagcaccacgaccctactactatctcgcacctgaaacaagctaacatgactaacacccttaattccatccaccctcctctccctaggaggcctgcccccgctaaccggctttttgcccaaatgggccattatcgaagaattcacaaaaaacaatagcctcatcatccccaccatcatagccaccatcaccctccttaacctctacttctacctacgcctaatctactccacctcaatcacactactccccatatctaacaacgtaaaaataaaatgacagtttgaacatacaaaacccaccccattcctccccacactcatcgcccttaccacgctactcctacctatctccccttttatactaataatcttatagaaatttaggttaaatacagaccaagagccttcaaagccctcagtaagttgcaatacttaatttctgtaacagctaaggactgcaaaaccccactctgcatcaactgaacgcaaatcagccactttaattaagctaagcccttactagaccaatgggacttaaacccacaaacacttagttaacagctaagcaccctaatcaactggcttcaatctacttctcccgccgccgggaaaaaaggcgggagaagccccggcaggtttgaagctgcttcttcgaatttgcaattcaatatgaaaatcacctcggagctggtaaaaagaggcctaacccctgtctttagatttacagtccaatgcttcactcagccattttacctcacccccactgatgttcgccgaccgttgactattctctacaaaccacaaagacattggaacactatacctattattcggcgcatgagctggagtcctaggcacagctctaagcctccttattcgagccgagctgggccagccaggcaaccttctaggtaacgaccacatctacaacgttatcgtcacagcccatgcatttgtaataatcttcttcatagtaatacccatcataatcggaggctttggcaactgactagttcccctaataatcggtgcccccgatatggcgtttccccgcataaacaacataagcttctgactcttacctccctctctcctactcctgctcgcatctgctatagtggaggccggagcaggaacaggttgaacagtctaccctcccttagcagggaactactcccaccctggagcctccgtagacctaaccatcttctccttacacctagcaggtgtctcctctatcttaggggccatcaatttcatcacaacaattatcaatataaaaccccctgccataacccaataccaaacgcccctcttcgtctgatccgtcctaatcacagcagtcctacttctcctatctctcccagtcctagctgctggcatcactatactactaacagaccgcaacctcaacaccaccttcttcgaccccgccggaggaggagaccccattctataccaacacctattctgatttttcggtcaccctgaagtttatattcttatcctaccaggcttcggaataatctcccatattgtaacttactactccggaaaaaaagaaccatttggatacataggtatggtctgagctatgatatcaattggcttcctagggtttatcgtgtgagcacaccatatatttacagtaggaatagacgtagacacacgagcatatttcacctccgctaccataatcatcgctatccccaccggcgtcaaagtatttagctgactcgccacactccacggaagcaatatgaaatgatctgctgcagtgctctgagccctaggattcatctttcttttcaccgtaggtggcctgactggcattgtattagcaaactcatcactagacatcgtactacacgacacgtactacgttgtagctcacttccactatgtcctatcaataggagctgtatttgccatcataggaggcttcattcactgatttcccctattctcaggctacaccctagaccaaacctacgccaaaatccatttcactatcatattcatcggcgtaaatctaactttcttcccacaacactttctcggcctatccggaatgccccgacgttactcggactaccccgatgcatacaccacatgaaacatcctatcatctgtaggctcattcatttctctaacagcagtaatattaataattttcatgatttgagaagccttcgcttcgaagcgaaaagtcctaatagtagaagaaccctccataaacctggagtgactatatggatgccccccaccctaccacacattcgaagaacccgtatacataaaatctagacaaaaaaggaaggaatcgaaccccccaaagctggtttcaagccaaccccatggcctccatgactttttcaaaaaggtattagaaaaaccatttcataactttgtcaaagttaaattataggctaaatcctatatatcttaatggcacatgcagcgcaagtaggtctacaagacgctacttcccctatcatagaagagcttatcacctttcatgatcacgccctcataatcattttccttatctgcttcctagtcctgtatgcccttttcctaacactcacaacaaaactaactaatactaacatctcagacgctcaggaaatagaaaccgtctgaactatcctgcccgccatcatcctagtcctcatcgccctcccatccctacgcatcctttacataacagacgaggtcaacgatccctcccttaccatcaaatcaattggccaccaatggtactgaacctacgagtacaccgactacggcggactaatcttcaactcctacatacttcccccattattcctagaaccaggcgacctgcgactccttgacgttgacaatcgagtagtactcccgattgaagcccccattcgtataataattacatcacaagacgtcttgcactcatgagctgtccccacattaggcttaaaaacagatgcaattcccggacgtctaaaccaaaccactttcaccgctacacgaccgggggtatactacggtcaatgctctgaaatctgtggagcaaaccacagtttcatgcccatcgtcctagaattaattcccctaaaaatctttgaaatagggcccgtatttaccctatagcaccccctctaccccctctagagcccactgtaaagctaacttagcattaaccttttaagttaaagattaagagaaccaacacctctttacagtgaaatgccccaactaaatactaccgtatggcccaccataattacccccatactccttacactattcctcatcacccaactaaaaatattaaacacaaactaccacctacctccctcaccaaagcccataaaaataaaaaattataacaaaccctgagaaccaaaatgaacgaaaatctgttcgcttcattcattgcccccacaatcctaggcctacccgccgcagtactgatcattctatttccccctctattgatccccacctccaaatatctcatcaacaaccgactaatcaccacccaacaatgactaatcaaactaacctcaaaacaaatgataaccatacacaacactaaaggacgaacctgatctcttatactagtatccttaatcatttttattgccacaactaacctcctcggactcctgcctcactcatttacaccaaccacccaactatctataaacctagccatggccatccccttatgagcgggcgcagtgattataggctttcgctctaagattaaaaatgccctagcccacttcttaccacaaggcacacctacaccccttatccccatactagttattatcgaaaccatcagcctactcattcaaccaatagccctggccgtacgcctaaccgctaacattactgcaggccacctactcatgcacctaattggaagcgccaccctagcaatatcaaccattaaccttccctctacacttatcatcttcacaattctaattctactgactatcctagaaatcgctgtcgccttaatccaagcctacgttttcacacttctagtaagcctctacctgcacgacaacacataatgacccaccaatcacatgcctatcatatagtaaaacccagcccatgacccctaacaggggccctctcagccctcctaatgacctccggcctagccatgtgatttcacttccactccataacgctcctcatactaggcctactaaccaacacactaaccatataccaatgatggcgcgatgtaacacgagaaagcacataccaaggccaccacacaccacctgtccaaaaaggccttcgatacgggataatcctatttatcacctcagaagtttttttcttcgcaggatttttctgagccttttaccactccagcctagcccctaccccccaattaggagggcactggcccccaacaggcatcaccccgctaaatcccctagaagtcccactcctaaacacatccgtattactcgcatcaggagtatcaatcacctgagctcaccatagtctaatagaaaacaaccgaaaccaaataattcaagcactgcttattacaattttactgggtctctattttaccctcctacaagcctcagagtacttcgagtctcccttcaccatttccgacggcatctacggctcaacattttttgtagccacaggcttccacggacttcacgtcattattggctcaactttcctcactatctgcttcatccgccaactaatatttcactttacatccaaacatcactttggcttcgaagccgccgcctgatactggcattttgtagatgtggtttgactatttctgtatgtctccatctattgatgagggtcttactcttttagtataaatagtaccgttaacttccaattaactagttttgacaacattcaaaaaagagtaataaacttcgccttaattttaataatcaacaccctcctagccttactactaataattattacattttgactaccacaactcaacggctacatagaaaaatccaccccttacgagtgcggcttcgaccctatatcccccgcccgcgtccctttctccataaaattcttcttagtagctattaccttcttattatttgatctagaaattgccctccttttacccctaccatgagccctacaaacaactaacctgccactaatagttatgtcatccctcttattaatcatcatcctagccctaagtctggcctatgagtgactacaaaaaggattagactgaaccgaattggtatatagtttaaacaaaacgaatgatttcgactcattaaattatgataatcatatttaccaaatgcccctcatttacataaatattatactagcatttaccatctcacttctaggaatactagtatatcgctcacacctcatatcctccctactatgcctagaaggaataatactatcgctgttcattatagctactctcataaccctcaacacccactccctcttagccaatattgtgcctattgccatactagtctttgccgcctgcgaagcagcggtgggcctagccctactagtctcaatctccaacacatatggcctagactacgtacataacctaaacctactccaatgctaaaactaatcgtcccaacaattatattactaccactgacatgactttccaaaaaacacataatttgaatcaacacaaccacccacagcctaattattagcatcatccctctactattttttaaccaaatcaacaacaacctatttagctgttccccaaccttttcctccgaccccctaacaacccccctcctaatactaactacctgactcctacccctcacaatcatggcaagccaacgccacttatccagtgaaccactatcacgaaaaaaactctacctctctatactaatctccctacaaatctccttaattataacattcacagccacagaactaatcatattttatatcttcttcgaaaccacacttatccccaccttggctatcatcacccgatgaggcaaccagccagaacgcctgaacgcaggcacatacttcctattctacaccctagtaggctcccttcccctactcatcgcactaatttacactcacaacaccctaggctcactaaacattctactactcactctcactgcccaagaactatcaaactcctgagccaacaacttaatatgactagcttacacaatagcttttatagtaaagatacctctttacggactccacttatgactccctaaagcccatgtcgaagcccccatcgctgggtcaatagtacttgccgcagtactcttaaaactaggcggctatggtataatacgcctcacactcattctcaaccccctgacaaaacacatagcctaccccttccttgtactatccctatgaggcataattataacaagctccatctgcctacgacaaacagacctaaaatcgctcattgcatactcttcaatcagccacatagccctcgtagtaacagccattctcatccaaaccccctgaagcttcaccggcgcagtcattctcataatcgcccacgggcttacatcctcattactattctgcctagcaaactcaaactacgaacgcactcacagtcgcatcataatcctctctcaaggacttcaaactctactcccactaatagctttttgatgacttctagcaagcctcgctaacctcgccttaccccccactattaacctactgggagaactctctgtgctagtaaccacgttctcctgatcaaatatcactctcctacttacaggactcaacatactagtcacagccctatactccctctacatatttaccacaacacaatggggctcactcacccaccacattaacaacataaaaccctcattcacacgagaaaacaccctcatgttcatacacctatcccccattctcctcctatccctcaaccccgacatcattaccgggttttcctcttgtaaatatagtttaaccaaaacatcagattgtgaatctgacaacagaggcttacgaccccttatttaccgagaaagctcacaagaactgctaactcatgcccccatgtctaacaacatggctttctcaacttttaaaggataacagctatccattggtcttaggccccaaaaattttggtgcaactccaaataaaagtaataaccatgcacactactataaccaccctaaccctgacttccctaattccccccatccttaccaccctcgttaaccctaacaaaaaaaactcatacccccattatgtaaaatccattgtcgcatccacctttattatcagtctcttccccacaacaatattcatgtgcctagaccaagaagttattatctcgaactgacactgagccacaacccaaacaacccagctctccctaagcttcaaactagactacttctccataatattcatccctgtagcattgttcgttacatggtccatcatagaattctcactgtgatatataaactcagacccaaacattaatcagttcttcaaatatctactcatcttcctaattaccatactaatcttagttaccgctaacaacctattccaactgttcatcggctgagagggcgtaggaattatatccttcttgctcatcagttgatgatacgcccgagcagatgccaacacagcagccattcaagcaatcctatacaaccgtatcggcgatatcggtttcatcctcgccttagcatgatttatcctacactccaactcatgagacccacaacaaatagcccttctaaacgctaatccaagcctcaccccactactaggcctcctcctagcagcagcaggcaaatcagcccaattaggtctccacccctgactcccctcagccatagaaggccccaccccagtctcagccctactccactcaagcactatagttgtagcaggaatcttcttactcatccgcttccaccccctagcagaaaatagcccactaatccaaactctaacactatgcttaggcgctatcaccactctgttcgcagcagtctgcgcccttacacaaaatgacatcaaaaaaatcgtagccttctccacttcaagtcaactaggactcataatagttacaatcggcatcaaccaaccacacctagcattcctgcacatctgtacccacgccttcttcaaagccatactatttatgtgctccgggtccatcatccacaaccttaacaatgaacaagatattcgaaaaataggaggactactcaaaaccatacctctcacttcaacctccctcaccattggcagcctagcattagcaggaatacctttcctcacaggtttctactccaaagaccacatcatcgaaaccgcaaacatatcatacacaaacgcctgagccctatctattactctcatcgctacctccctgacaagcgcctatagcactcgaataattcttctcaccctaacaggtcaacctcgcttccccacccttactaacattaacgaaaataaccccaccctactaaaccccattaaacgcctggcagccggaagcctattcgcaggatttctcattactaacaacatttcccccgcatcccccttccaaacaacaatccccctctacctaaaactcacagccctcgctgtcactttcctaggacttctaacagccctagacctcaactacctaaccaacaaacttaaaataaaatccccactatgcacattttatttctccaacatactcggattctaccctagcatcacacaccgcacaatcccctatctaggccttcttacgagccaaaacctgcccctactcctcctagacctaacctgactagaaaagctattacctaaaacaatttcacagcaccaaatctccacctccatcatcacctcaacccaaaaaggcataattaaactttacttcctctctttcttcttcccactcatcctaaccctactcctaatcacataacctattcccccgagcaatctcaattacaatatatacaccaacaaacaatgttcaaccagtaactactactaatcaacgcccataatcatacaaagcccccgcaccaataggatcctcccgaatcaaccctgacccctctccttcataaattattcagcttcctacactattaaagtttaccacaaccaccaccccatcatactctttcacccacagcaccaatcctacctccatcgctaaccccactaaaacactcaccaagacctcaacccctgacccccatgcctcaggatactcctcaatagccatcgctgtagtatatccaaagacaaccatcattccccctaaataaattaaaaaaactattaaacccatataacctcccccaaaattcagaataataacacacccgaccacaccgctaacaatcaatactaaacccccataaataggagaaggcttagaagaaaaccccacaaaccccattactaaacccacactcaacagaaacaaagcatacatcattattctcgcacggactacaaccacgaccaatgatatgaaaaaccatcgttgtatttcaactacaagaacaccaatgaccccaatacgcaaaactaaccccctaataaaattaattaaccactcattcatcgacctccccaccccatccaacatctccgcatgatgaaacttcggctcactccttggcgcctgcctgatcctccaaatcaccacaggactattcctagccatgcactactcaccagacgcctcaaccgccttttcatcaatcgcccacatcactcgagacgtaaattatggctgaatcatccgctaccttcacgccaatggcgcctcaatattctttatctgcctcttcctacacatcgggcgaggcctatattacggatcatttctctactcagaaacctgaaacatcggcattatcctcctgcttgcaactatagcaacagccttcataggctatgtcctcccgtgaggccaaatatcattctgaggggccacagtaattacaaacttactatccgccatcccatacattgggacagacctagttcaatgaatctgaggaggctactcagtagacagtcccaccctcacacgattctttacctttcacttcatcttgcccttcattattgcagccctagcagcactccacctcctattcttgcacgaaacgggatcaaacaaccccctaggaatcacctcccattccgataaaatcaccttccacccttactacacaatcaaagacgccctcggcttacttctcttccttctctccttaatgacattaacactattctcaccagacctcctaggcgacccagacaattataccctagccaaccccttaaacacccctccccacatcaagcccgaatgatatttcctattcgcctacacaattctccgatccgtccctaacaaactaggaggcgtccttgccctattactatccatcctcatcctagcaataatccccatcctccatatatccaaacaacaaagcataatatttcgcccactaagccaatcactttattgactcctagccgcagacctcctcattctaacctgaatcggaggacaaccagtaagctacccttttaccatcattggacaagtagcatccgtactatacttcacaacaatcctaatcctaataccaactatctccctaattgaaaacaaaatactcaaatgggcctgtccttgtagtataaactaatacaccagtcttgtaaaccggagatgaaaacctttttccaaggacaaatcagagaaaaagtctttaactccaccattagcacccaaagctaagattctaatttaaactattctctgttctttcatggggaagcagatttgggtaccacccaagtattgactcacccatcaacaaccgctatgtatttcgtacattactgccagccaccatgaatattgtacagtaccataaatacttgaccacctgtagtacataaaaacccaatccacatcaaaaccccctccccatgcttacaagcaagtacagcaatcaaccctcaactatcacacatcaactgcaactccaaagccacccctcacccactaggataccaacaaacctacccaccctcaacagtacatagtacataaagccatttaccgtacatagcacattacagtcaaatcccttctcgtccccatggatgacccccctcagataggggtcccttgaccaccatcctccgtgaaatcaatatcccgcacaagagtgctactctcctcgctccgggcccataacacttgggggtagctaaagtgaactgtatccgacatctggttcctacttcagggtcataaagcctaaatagcccacacgttccccttaaataagacatcacgatg

SEQ ID NO: 401 - DNA, 16568 bp, Homo sapiens mitochondrial
  3106: "n" refers to a nucleotide at position 3107 of the Cambridge Reference Sequence (CRS, Anderson et al. 1981 Nature 290:457-465), later determined to be absent from the human mtDNA sequence according to the revised CRS (rCRS, Andrews et al. 1999 Nature Genetics 23:147); "n" therefore represents a single nucleotide deletion at a position corresponding to nucleotide 3107 of SEQ ID NO:1 as provided herein.
gatcacaggtctatcaccctattaaccactcacgggagctctccatgcatttggtattttcgtttggggggtgtgcacgcgatagcattgcgagacgctggagccggagcaccctatgtcgcagtatctgtctttgattcctgccccatcctattatttatcgcacctacgttcaatattacaggcgaacatacttactaaagtgtgttaattaattaatgcttgtaggacatagtaataacaattgaatgtctgcacagccgctttccacacagacatcataacaaaaaatttccaccaaaccccccctcccccgccttctggccacagcacttaaacacatctctgccaaaccccaaaaacaaagaaccctaacaccagcctaaccagatttcaaattttatcttttggcggtatgcacttttaacagtcaccccccaactaacacattattttcccctcccactcccatactactaatctcatcaatacaacccccgcccatcctacccagcacacacaccgctgctaaccccataccccgaaccaaccaaaccccaaagacaccccccacagtttatgtagcttacctcctcaaagcaatacactgaaaatgtttagacgggctcacatcaccccataaacaaataggtttggtcctggcctttctattagctcttagtaagattacacatgcaagcatccccgttccagtgagttcaccctctaaatcaccacgatcaaaagggacaagcatcaagcacgcagcaatgcagctcaaaacgcttagcctagccacacccccacgggaaacagcagtgattaacctttagcaataaacgaaagtttaactaagctatactaaccccagggttggtcaatttcgtgccagccaccgcggtcacacgattaacccaagtcaatagaagccggcgtaaagagtgttttagatcaccccctccccaataaagctaaaactcacctgagttgtaaaaaactccagttgacacaaaatagactacgaaagtggctttaacatatctgaacacacaatagctaagacccaaactgggattagataccccactatgcttagccctaaacctcaacagttaaatcaacaaaactgctcgccagaacactacgagccacagcttaaaactcaaaggacctggcggtgcttcatatccctctagaggagcctgttctgtaatcgataaaccccgatcaacctcaccacctcttgctcagcctatataccgccatcttcagcaaaccctgatgaaggctacaaagtaagcgcaagtacccacgtaaagacgttaggtcaaggtgtagcccatgaggtggcaagaaatgggctacattttctaccccagaaaactacgatagcccttatgaaacttaagggtcgaaggtggatttagcagtaaactgagagtagagtgcttagttgaacagggccctgaagcgcgtacacaccgcccgtcaccctcctcaagtatacttcaaaggacatttaactaaaacccctacgcatttatatagaggagacaagtcgtaacatggtaagtgtactggaaagtgcacttggacgaaccagagtgtagcttaacacaaagcacccaacttacacttaggagatttcaacttaacttgaccgctctgagctaaacctagccccaaacccactccaccttactaccagacaaccttagccaaaccatttacccagataaagtataggcgatagaaattgaaacctggcgcaatagatatagtaccgcaagggaaagatgaaaaattataaccaagcataatatagcaaggactaacccctataccttctgcataatgaattaactagaaataactttgcaaggagagccaaagctaagacccccgaaaccagacgagctacctaagaacagctaaaagagcacacccgtctatgtagcaaaatagtgggaagatttataggtagaggcgacaaacctaccgagcctggtgatagctggttgtccaagatagaatcttagttcaactttaaatttgcccacagaaccctctaaatccccttgtaaatttaactgttagtccaaagaggaacagctctttggacactaggaaaaaaccttgtagagagagtaaaaaatttaacacccatagtaggcctaaaagcagccaccaattaagaaagcgttcaagctcaacacccactacctaaaaaatcccaaacatataactgaactcctcacacccaattggaccaatctatcaccctatagaagaactaatgttagtataagtaacatgaaaacattctcctccgcataagcctgcgtcagattaaaacactgaactgacaattaacagcccaatatctacaatcaaccaacaagtcattattaccctcactgtcaacccaacacaggcatgctcataaggaaaggttaaaaaaagtaaaaggaactcggcaaatcttaccccgcctgtttaccaaaaacatcacctctagcatcaccagtattagaggcaccgcctgcccagtgacacatgtttaacggccgcggtaccctaaccgtgcaaaggtagcataatcacttgttccttaaatagggacctgtatgaatggctccacgagggttcagctgtctcttacttttaaccagtgaaattgacctgcccgtgaagaggcgggcatgacacagcaagacgagaagaccctatggagctttaatttattaatgcaaacagtacctaacaaacccacaggtcctaaactaccaaacctgcattaaaaatttcggttggggcgacctcggagcagaacccaacctccgagcagtacatgctaagacttcaccagtcaaagcgaactactatactcaattgatccaataacttgaccaacggaacaagttaccctagggataacagcgcaatcctattctagagtccatatcaacaatagggtttacgacctcgatgttggatcaggacatcccgatggtgcagccgctattaaaggttcgtttgttcaacgattaaagtcctacgtgatctgagttcagaccggagtaatccaggtcggtttctatctacnttcaaattcctccctgtacgaaaggacaagagaaataaggcctacttcacaaagcgccttcccccgtaaatgatatcatctcaacttagtattatacccacacccacccaagaacagggtttgttaagatggcagagcccggtaatcgcataaaacttaaaactttacagtcagaggttcaattcctcttcttaacaacatacccatggccaacctcctactcctcattgtacccattctaatcgcaatggcattcctaatgcttaccgaacgaaaaattctaggctatatacaactacgcaaaggccccaacgttgtaggcccctacgggctactacaacccttcgctgacgccataaaactcttcaccaaagagcccctaaaacccgccacatctaccatcaccctctacatcaccgccccgaccttagctctcaccatcgctcttctactatgaacccccctccccatacccaaccccctggtcaacctcaacctaggcctcctatttattctagccacctctagcctagccgtttactcaatcctctgatcagggtgagcatcaaactcaaactacgccctgatcggcgcactgcgagcagtagcccaaacaatctcatatgaagtcaccctagccatcattctactatcaacattactaataagtggctcctttaacctctccacccttatcacaacacaagaacacctctgattactcctgccatcatgacccttggccataatatgatttatctccacactagcagagaccaaccgaacccccttcgaccttgccgaaggggagtccgaactagtctcaggcttcaacatcgaatacgccgcaggccccttcgccctattcttcatagccgaatacacaaacattattataataaacaccctcaccactacaatcttcctaggaacaacatatgacgcactctcccctgaactctacacaacatattttgtcaccaagaccctacttctaacctccctgttcttatgaattcgaacagcatacccccgattccgctacgaccaactcatacacctcctatgaaaaaacttcctaccactcaccctagcattacttatatgatatgtctccatacccattacaatctccagcatcccccctcaaacctaagaaatatgtctgataaaagagttactttgatagagtaaataataggagcttaaacccccttatttctaggactatgagaatcgaacccatccctgagaatccaaaattctccgtgccacctatcacaccccatcctaaagtaaggtcagctaaataagctatcgggcccataccccgaaaatgttggttatacccttcccgtactaattaatcccctggcccaacccgtcatctactctaccatctttgcaggcacactcatcacagcgctaagctcgcactgattttttacctgagtaggcctagaaataaacatgctagcttttattccagttctaaccaaaaaaataaaccctcgttccacagaagctgccatcaagtatttcctcacgcaagcaaccgcatccataatccttctaatagctatcctcttcaacaatatactctccggacaatgaaccataaccaatactaccaatcaatactcatcattaataatcataatggctatagcaataaaactaggaatagccccctttcacttctgagtcccagaggttgcccaaggcacccctctgacatccggcctgcttcttctcacatgacaaaaactagcccccatctcaatcatataccaaatctctccctcactaaacgtaagccttctcctcactctctcaatcttatccatcatagcaggcagttgaggtggattaaaccaaacccagctacgcaaaatcttagcatactcctcaattacccacataggatgaataatagcagttctaccgtacaaccctaacataaccattcttaatttaactatttatattatcctaactactaccgcattcctactactcaacttaaactccagcaccacgaccctactactatctcgcacctgaaacaagctaacatgactaacacccttaattccatccaccctcctctccctaggaggcctgcccccgctaaccggctttttgcccaaatgggccattatcgaagaattcacaaaaaacaatagcctcatcatccccaccatcatagccaccatcaccctccttaacctctacttctacctacgcctaatctactccacctcaatcacactactccccatatctaacaacgtaaaaataaaatgacagtttgaacatacaaaacccaccccattcctccccacactcatcgcccttaccacgctactcctacctatctccccttttatactaataatcttatagaaatttaggttaaatacagaccaagagccttcaaagccctcagtaagttgcaatacttaatttctgtaacagctaaggactgcaaaaccccactctgcatcaactgaacgcaaatcagccactttaattaagctaagcccttactagaccaatgggacttaaacccacaaacacttagttaacagctaagcaccctaatcaactggcttcaatctacttctcccgccgccgggaaaaaaggcgggagaagccccggcaggtttgaagctgcttcttcgaatttgcaattcaatatgaaaatcacctcggagctggtaaaaagaggcctaacccctgtctttagatttacagtccaatgcttcactcagccattttacctcacccccactgatgttcgccgaccgttgactattctctacaaaccacaaagacattggaacactatacctattattcggcgcatgagctggagtcctaggcacagctctaagcctccttattcgagccgagctgggccagccaggcaaccttctaggtaacgaccacatctacaacgttatcgtcacagcccatgcatttgtaataatcttcttcatagtaatacccatcataatcggaggctttggcaactgactagttcccctaataatcggtgcccccgatatggcgtttccccgcataaacaacataagcttctgactcttacctccctctctcctactcctgctcgcatctgctatagtggaggccggagcaggaacaggttgaacagtctaccctcccttagcagggaactactcccaccctggagcctccgtagacctaaccatcttctccttacacctagcaggtgtctcctctatcttaggggccatcaatttcatcacaacaattatcaatataaaaccccctgccataacccaataccaaacgcccctcttcgtctgatccgtcctaatcacagcagtcctacttctcctatctctcccagtcctagctgctggcatcactatactactaacagaccgcaacctcaacaccaccttcttcgaccccgccggaggaggagaccccattctataccaacacctattctgatttttcggtcaccctgaagtttatattcttatcctaccaggcttcggaataatctcccatattgtaacttactactccggaaaaaaagaaccatttggatacataggtatggtctgagctatgatatcaattggcttcctagggtttatcgtgtgagcacaccatatatttacagtaggaatagacgtagacacacgagcatatttcacctccgctaccataatcatcgctatccccaccggcgtcaaagtatttagctgactcgccacactccacggaagcaatatgaaatgatctgctgcagtgctctgagccctaggattcatctttcttttcaccgtaggtggcctgactggcattgtattagcaaactcatcactagacatcgtactacacgacacgtactacgttgtagctcacttccactatgtcctatcaataggagctgtatttgccatcataggaggcttcattcactgatttcccctattctcaggctataccctagaccaaacctacgccaaaatccatttcactatcatattcatcggcgtaaatctaactttcttcccacaacactttctcggcctatccggaatgccccgacgttactcggactaccccgatgcatacaccacatgaaacatcctatcatctgtaggctcattcatttctctaacagcagtaatattaataattttcatgatttgagaagccttcgcttcgaagcgaaaagtcctaatagtagaagaaccctccataaacctggagtgactatatggatgccccccaccctaccacacattcgaagaacccgtatacataaaatctagacaaaaaaggaaggaatcgaaccccccaaagctggtttcaagccaaccccatggcctccatgactttttcaaaaaggtattagaaaaaccatttcataactttgtcaaagttaaattataggctaaatcctatatatcttaatggcacatgcagcgcaagtaggtctacaagacgctacttcccctatcatagaagagcttatcacctttcatgatcacgccctcataatcattttccttatctgcttcctagtcctgtatgcccttttcctaacactcacaacaaaactaactaatactaacatctcagacgctcaggaaatagaaaccgtctgaactatcctgcccgccatcatcctagtcctcatcgccctcccatccctacgcatcctttacataacagacgaggtcaacgatccctcccttaccatcaaatcaattggccaccaatggtactgaacctacgagtacaccgactacggcggactaatcttcaactcctacatacttcccccattattcctagaaccaggcgacctgcgactccttgacgttgacaatcgagtagtactcccgattgaaacccccattcgtataataattacatcacaagacgtcttgcactcatgagctgtccccacattaggcttaaaaacagatgcaattcccggacgtctaaaccaaaccactttcaccgctacacgaccgggggtatactacggtcaatgctctgaaatctgtggagcaaaccacagtttcatgcccatcgtcctagaattaattcccctaaaaatctttgaaatagggcccgtatttaccctatagcaccccctctaccccctctagagcccactgtaaagctaacttagcattaaccttttaagttaaagattaagagaaccaacacctctttacagtgaaatgccccaactaaatactaccgtatggcccaccataattacccccatactccttacactattcctcatcacccaactaaaaatattaaacacaaactaccacctacctccctcaccaaagcccataaaaataaaaaattataacaaaccctgagaaccaaaatgaacgaaaatctgttcgcttcattcattgcccccacaatcctaggcctacccgccgcagtactgatcattctatttccccctctattgatccccacctccaaatatctcatcaacaaccgactaatcaccacccaacaatgactaatcaaactaacctcaaaacaaatgataaccatacacaacactaaaggacgaacctgatctcttatactagtatccttaatcatttttattgccacaactaacctcctcggactcctgccttactcatttacaccaaccacccaactatctataaacctagccatggccatccccttatgagcgggcgcagtgattataggctttcgctctaagattaaaaatgccctagcccacttcttaccacaaggcacacctacaccccttatccccatactagttattatcgaaaccatcagcctactcattcaaccaatagccctggccgtacgcctaaccgctaacattactgcaggccacctactcatgcacctaattggaagcgccaccctagcaatatcaaccattaaccttccctctacacttatcatcttcacaattctaattctactgactatcctagaaatcgctgtcgccttaatccaagcctacgttttcacacttctagtaagcctctacctgcacgacaacacataatgacccaccaatcacatgcctatcatatagtaaaacccagcccatgacccctaacaggggccctctcagccctcctaatgacctccggcctagccatgtgatttcacttccactccataacgctcctcatactaggcctactaaccaacacactaaccatataccaatgatggcgcgatgtaacacgagaaagcacataccaaggccaccacacaccacctgtccaaaaaggccttcgatacgggataatcctatttattacctcagaagtttttttcttcgcaggatttttctgagccttttaccactccagcctagcccctaccccccaattaggagggcactggcccccaacaggcatcaccccgctaaatcccctagaagtcccactcctaaacacatccgtattactcgcatcaggagtatcaatcacctgagctcaccatagtctaatagaaaacaaccgaaaccaaataattcaagcactgcttattacaattttactgggtctctattttaccctcctacaagcctcagagtacttcgagtctcccttcaccatttccgacggcatctacggctcaacattttttgtagccacaggcttccacggacttcacgtcattattggctcaactttcctcactatctgcttcatccgccaactaatatttcactttacatccaaacatcactttggcttcgaagccgccgcctgatactggcattttgtagatgtggtttgactatttctgtatgtctccatctattgatgagggtcttactcttttagtataaatagtaccgttaacttccaattaactagttttgacaacattcaaaaaagagtaataaacttcgccttaattttaataatcaacaccctcctagccttactactaataattattacattttgactaccacaactcaacggctacatagaaaaatccaccccttacgagtgcggcttcgaccctatatcccccgcccgcgtccctttctccataaaattcttcttagtagctattaccttcttattatttgatctagaaattgccctccttttacccctaccatgagccctacaaacaactaacctgccactaatagttatgtcatccctcttattaatcatcatcctagccctaagtctggcctatgagtgactacaaaaaggattagactgaaccgaattggtatatagtttaaacaaaacgaatgatttcgactcattaaattatgataatcatatttaccaaatgcccctcatttacataaatattatactagcatttaccatctcacttctaggaatactagtatatcgctcacacctcatatcctccctactatgcctagaaggaataatactatcgctgttcattatagctactctcataaccctcaacacccactccctcttagccaatattgtgcctattgccatactagtctttgccgcctgcgaagcagcggtgggcctagccctactagtctcaatctccaacacatatggcctagactacgtacataacctaaacctactccaatgctaaaactaatcgtcccaacaattatattactaccactgacatgactttccaaaaaacacataatttgaatcaacacaaccacccacagcctaattattagcatcatccctctactattttttaaccaaatcaacaacaacctatttagctgttccccaaccttttcctccgaccccctaacaacccccctcctaatactaactacctgactcctacccctcacaatcatggcaagccaacgccacttatccagtgaaccactatcacgaaaaaaactctacctctctatactaatctccctacaaatctccttaattataacattcacagccacagaactaatcatattttatatcttcttcgaaaccacacttatccccaccttggctatcatcacccgatgaggcaaccagccagaacgcctgaacgcaggcacatacttcctattctacaccctagtaggctcccttcccctactcatcgcactaatttacactcacaacaccctaggctcactaaacattctactactcactctcactgcccaagaactatcaaactcctgagccaacaacttaatatgactagcttacacaatagcttttatagtaaagatacctctttacggactccacttatgactccctaaagcccatgtcgaagcccccatcgctgggtcaatagtacttgccgcagtactcttaaaactaggcggctatggtataatacgcctcacactcattctcaaccccctgacaaaacacatagcctaccccttccttgtactatccctatgaggcataattataacaagctccatctgcctacgacaaacagacctaaaatcgctcattgcatactcttcaatcagccacatagccctcgtagtaacagccattctcatccaaaccccctgaagcttcaccggcgcagtcattctcataatcgcccacggacttacatcctcattactattctgcctagcaaactcaaactacgaacgcactcacagtcgcatcataatcctctctcaaggacttcaaactctactcccactaatagctttttgatgacttctagcaagcctcgctaacctcgccttaccccccactattaacctactgggagaactctctgtgctagtaaccacgttctcctgatcaaatatcactctcctacttacaggactcaacatactagtcacagccctatactccctctacatatttaccacaacacaatgaggctcactcacccaccacattaacaacataaaaccctcattcacacgagaaaacaccctcatgttcatacacctatcccccattctcctcctatccctcaaccccgacatcattaccgggttttcctcttgtaaatatagtttaaccaaaacatcagattgtgaatctgacaacagaggcttacgaccccttatttaccgagaaagctcacaagaactgctaactcatgcccccatgtctaacaacatggctttctcaacttttaaaggataacagctatccattggtcttaggccccaaaaattttggtgcaactccaaataaaagtaataaccatgcacactactataaccaccctaaccctgacttccctaattccccccatccttaccaccctcgttaaccctaacaaaaaaaactcatacccccattatgtaaaatccattgtcgcatccacctttattatcagtctcttccccacaacaatattcatgtgcctagaccaagaagttattatctcgaactgacactgagccacaacccaaacaacccagctctccctaagcttcaaactagactacttctccataatattcatccctgtagcattgttcgttacatggtccatcatagaattctcactgtgatatataaactcagacccaaacattaatcagttcttcaaatatctactcattttcctaattaccatactaatcttagttaccgctaacaacctattccaactgttcatcggctgagagggcgtaggaattatatccttcttgctcatcagttgatgatacgcccgagcagatgccaacacagcagccattcaagcaatcctatacaaccgtatcggcgatatcggtttcatcctcgccttagcatgatttatcctacactccaactcatgagacccacaacaaatagcccttctaaacgctaatccaagcctcaccccactactaggcctcctcctagcagcagcaggcaaatcagcccaattaggtctccacccctgactcccctcagccatagaaggccccaccccagtctcagccctactccactcaagcactatagttgtagcaggaatcttcttactcatccgcttccaccccctagcagaaaatagcccactaatccaaactctaacactatgcttaggcgctatcaccactctgttcgcagcagtctgcgcccttacacaaaatgacatcaaaaaaatcgtagccttctccacttcaagtcaactaggactcataatagttacaatcggcatcaaccaaccacacctagcattcctgcacatctgtacccacgccttcttcaaagccatactatttatgtgctccgggtccatcatccacaaccttaacaatgaacaagatattcgaaaaataggaggactactcaaaaccatacctctcacttcaacctccctcaccattggcagcctagcattagcaggaatacctttcctcacaggtttctactccaaagaccacatcatcgaaaccgcaaacatatcatacacaaacgcctgagccctatctattactctcatcgctacctccctgacaagcgcctatagcactcgaataattcttctcaccctaacaggtcaacctcgcttccccacccttactaacattaacgaaaataaccccaccctactaaaccccattaaacgcctgacagccggaagcctattcgcaggatttctcattactaacaacatttcccccgcatcccccttccaaacaacaatccccctctacctaaaactcacagccctcgctgtcactttcctaggacttctaacagccctagacctcaactacctaaccaacaaacttaaaataaaatccccactatgcacattttatttctccaacatactcggattctaccctagcatcacacaccgcacaatcccctatctaggccttcttacgagccaaaacctgcccctactcctcctagacctaacctgactagaaaagctattacctaaaacaatttcacagcaccaaatctccacctccatcatcacctcaacccaaaaaggcataattaaactttacttcctctctttcttcttcccactcatcctaaccctactcctaatcacataacctattcccccgagcaatctcaattacaatatatacaccaacaaacaatgttcaaccagtaactactactaatcaacgcccataatcatacaaagcccccgcaccaataggatcctcccgaatcaaccctgacccctctccttcataaattattcagcttcctacactattaaagtttaccacaaccaccaccccatcatactctttcacccacagcaccaatcctacctccatcgctaaccccactaaaacactcaccaagacctcaacccctgacccccatgcctcaggatactcctcaatagccatcgctgtagtatatccaaagacaaccatcattccccctaaataaattaaaaaaactattaaacccatataacctcccccaaaattcagaataataacacacccgaccacaccgctaacaatcaatactaaacccccataaataggagaaggcttagaagaaaaccccacaaaccccattactaaacccacactcaacagaaacaaagcatacatcattattctcgcacggactacaaccacgaccaatgatatgaaaaaccatcgttgtatttcaactacaagaacaccaatgaccccaatacgcaaaattaaccccctaataaaattaattaaccactcattcatcgacctccccaccccatccaacatctccgcatgatgaaacttcggctcactccttggcgcctgcctgatcctccaaatcaccacaggactattcctagccatgcactactcaccagacgcctcaaccgccttttcatcaatcgcccacatcactcgagacgtaaattatggctgaatcatccgctaccttcacgccaatggcgcctcaatattctttatctgcctcttcctacacatcgggcgaggcctatattacggatcatttctctactcagaaacctgaaacatcggcattatcctcctgcttgcaactatagcaacagccttcataggctatgtcctcccgtgaggccaaatatcattctgaggggccacagtaattacaaacttactatccgccatcccatacattgggacagacctagttcaatgaatctgaggaggctactcagtagacagtcccaccctcacacgattctttacctttcacttcatcttgcccttcattattgcagccctagcagcactccacctcctattcttgcacgaaacgggatcaaacaaccccctaggaatcacctcccattccgataaaatcaccttccacccttactacacaatcaaagacgccctcggcttacttctcttccttctctccttaatgacattaacactattctcaccagacctcctaggcgacccagacaattataccctagccaaccccttaaacacccctccccacatcaagcccgaatgatatttcctattcgcctacacaattctccgatccgtccctaacaaactaggaggcgtccttgccctattactatccatcctcatcctagcaataatccccatcctccatatatccaaacaacaaagcataatatttcgcccactaagccaatcactttattgactcctagccgcagacctcctcattctaacctgaatcggaggacaaccagtaagctacccttttaccatcattggacaagtagcatccgtactatacttcacaacaatcctaatcctaataccaactatctccctaattgaaaacaaaatactcaaatgggcctgtccttgtagtataaactaatacaccagtcttgtaaaccggagatgaaaacctttttccaaggacaaatcagagaaaaagtctttaactccaccattagcacccaaagctaagattctaatttaaactattctctgttctttcatggggaagcagatttgggtaccacccaagtattgactcacccatcaacaaccgctatgtatttcgtacattactgccagtcaccatgaatattgtacggtaccataaatacttgaccacctgtagtacataaaaacccaatccacatcaaacccccccccccatgcttacaagcaagtacagcaatcaaccttcaactatcacacatcaactgcaactccaaagccacccctcacccactaggataccaacaaacctatccacccttaacagtacatagtacataaaaccatttaccgtacataacacattacagtcaaatcccttctcgcccccatggatgacccccctcagataggggtcccttgaccaccatcctccgtgaaatcaatatcccgcacaagagtgctactctcctcgctccgggcccataacacttgggggtagctaaagtgaactgtatccgacatctggttcctacttcagggccataaagcctaaatagcccacacgttccccttaaataagacatcacgatg

SEQ ID NO: 402 - DNA, 16571 bp, Homo sapiens mitochondrial
  3109: "n" refers to a nucleotide at position 3107 of the Cambridge Reference Sequence (CRS, Anderson et al. 1981 Nature 290:457-465), later determined to be absent from the human mtDNA sequence according to the revised CRS (rCRS, Andrews et al. 1999 Nature Genetics 23:147); "n" therefore represents a single nucleotide deletion at a position corresponding to nucleotide 3107 of SEQ ID NO:1 as provided herein.
gatcacaggtctatcaccctattaaccactcacgggagctctccatgcatttggtattttcgtctggggggtgtgcacgcgatagcattgcgagacgctggagccggagcaccctatgtcgcagtatctgtctttgattcctgccccatcccattatttatcgcacctacgttcaatattacaggcgaacatacctactaaagtgtgttaattaattaatgcttgtaggacataataataacaattgaatgtctgcacagccgctttccacacagacatcataacaaaaaatttccaccaaaccccccctcccccccgcttctggccacagcacttaaacacatctctgccaaaccccaaaaacaaagaaccctaacaccagcctaaccagatttcaaattttatcttttggcggtatgcacttttaacagtcaccccccaactaacacattattttcccctcccactcccatactactaatctcatcaatacaacccccgcccatcctacccagcacacacacaccgctgctaatcccataccccgaaccaaccaaaccccaaagacaccccccacagtttatgtagcttacctcctcaaagcaatacactgaaaatgtttagacgggctcacatcaccccataaacaaataggtttggtcctagcctttctattagctcttagtaagattacacatgcaagcatccccgttccagtgagttcaccctctaaatcaccacgatcaaaagggacaagcatcaagcacgcaacaatgcagctcaaaacgcttagcctagccacacccccacgggaaacagcagtgattaacctttagcaataaacgaaagtttaactaagctatactaaccccagggttggtcaatttcgtgccagccaccgcggtcacacgattaacccaagtcaatagaagccggcgtaaagagtgttttagatcaccccctccccaataaagctaaaactcacctgagttgtaaaaaactccagttgacacaaaataaactacgaaagtggctttaacatatctgaacacacaatagctaagacccaaactgggattagataccccactatgcttagccctaaacctcaacagttaaatcaacaaaactgctcgccagaacactacgagccacagcttaaaactcaaaggacctggcggtgcttcatatccctctagaggagcctgttctgtaatcgataaaccccgatcaacctcaccacctcttgctcagcctatataccgccatcttcagcaaaccctgatgaaggctacaaagtaagcgcaagtacccacgtaaagacgttaggtcaaggtgtagcccatgaggtggcaagaaatgggctacattttctaccccagaaaactacgatagcccttatgaaacttaagggtcgaaggtggatttagcagtaaactgagagtagagtgcttagttgaacagggccctgaagcgcgtacacaccgcccgtcaccctcctcaagtatacttcaaaggacatttaactaaaacccctacgcatttatatagaggagacaagtcgtaacatggtaagtgtactggaaagtgcacttggacgaaccagagtgtagcttaacacaaagcacccaacttacacttaggagatttcaacttaacttgaccgctctgagctaaacctagccccaaacccactccaccttactaccagacaaccttagccaaaccatttacccaaataaagtataggcgatagaaattgaaacctggcgcaatagatatagtaccgcaagggaaagatgaaaaattataaccaagcataatatagcaaggactaacccctataccttctgcataatgaattaactagaaataactttgcaaggagagccaaagctaagacccccgaaaccagacgagctacctaagaacagctaaaagagcacacccgtctatgtagcaaaatagtgggaagatttataggtagaggcgacaaacctaccgagcctggtgatagctggttgtccaagatagaatcttagttcaactttaaatttgcccacagaaccctctaaatccccttgtaaatttaactgttagtccaaagaggaacagctctttggacactaggaaaaaaccttgtagagagagtaaaaaatttaacacccatagtaggcctaaaagcagccaccaattaagaaagcgttcaagctcaacacccactacctaaaaaatcccaaacatataactgaactcctcacacccaattggaccaatctatcaccctatagaagaactaatgttagtataagtaacatgaaaacattctcctccgcataagcctgcgtcagattaaaacactgaactgacaattaacagcccaatatctacaatcaaccaacaagtcattattacccccactgtcaacccaacacaggcatgctcataaggaaaggttaaaaaaagtaaaaggaactcggcaaatcttaccccgcctgtttaccaaaaacatcacctctagcatcaccagtattagaggcaccgcctgcccagtgacacatgtttaacggccgcggtaccctaaccgtgcaaaggtagcataatcacttgttccttaaatagggacctgtatgaatggctccacgagggttcagctgtctcttacttttaaccagtgaaattgacctgcccgtgaagaggcgggcatgacacagcaagacgagaagaccctatggagctttaatttattaatgcaaacagtacctaacaaacccacaggtcctaaactactaaacctgcattaaaaatttcggttggggcgacctcggagcagaacccaacctccgagcagtacatgctaagacttcaccagtcaaagcgaactactatactcaattgatccaataacttgaccaacggaacaagttaccctagggataacagcgcaatcctattctagagtccatatcaacaatagggtttacgacctcgatgttggatcaggacatcccgatggtgcagccgctattaaaggttcgtttgttcaacgattaaagtcctacgtgatctgagttcagaccggagtaatccaggtcggtttctatctacnttcaaattcctccctgtacgaaaggacaagagaaataaggcctacttcacaaagcgccttcccccgtaaatgatatcatctcaacttagtattatacccacacccacccaagaacagggtttgttaagatggcagagcccggtaatcgcataaaacttaaaactttacagtcagaggttcaattcctcttcttaacaacatacccatggccaacctcctactcctcattgtacccattctaatcgcaatggcattcctaatgcttaccgaacgaaaaattctaggctatatacaactacgcaaaggccccaacgttgtaggcccctacgggctactacaacccttcgctgacgccataaaactcttcaccaaagagcccctaaaacccgccacatctaccatcaccctctacatcaccgccccgaccttagctctcaccatcgctcttctactatgaacccccctccccatacccaaccccctggttaacctcaacctaggcctcctatttattctagccacctctagcctagccgtttactcaatcctctgatcagggtgagcatcaaactcaaactacgccctgatcggcgcactgcgagcagtagcccaaacaatctcatatgaagtcaccctagccatcattctactatcaacattactaataagtggctcctttaacctctccacccttatcacaacacaagaacacctctgattactcctgccatcatgacccttggccataatatgatttatctccacactagcagagaccaaccgaacccccttcgaccttgccgaaggggagtccgaactagtctcaggcttcaacatcgaatacgccgcaggccccttcgccctattcttcatagccgaatacacaaacattattataataaacaccctcaccactacaatcttcctaggaacaacatatgacgcactctcccctgaactctacacaacatattttgtcaccaagaccctacttctgacctccctgttcttatgaattcgaacagcatacccccgattccgctacgaccaactcatacacctcctatgaaaaaacttcctaccactcaccctagcattacttatatgatatgtctccatacccattacaatctccagcattccccctcaaacctaagaaatatgtctgataaaagagttactttgatagagtaaataataggagcttaaacccccttatttctaggactatgagaatcgaacccatccctgagaatccaaaattctccgtgccacctatcacaccccatcctaaagtaaggtcagctaaataagctatcgggcccataccccgaaaatgttggttatacccttcccgtactaattaatcccctggcccaacccgtcatctactctaccatctttgcaggcacactcatcacagcgctaagctcgcactgattttttacctgagtaggcctagaaataaacatgctagcttttattccagttctaaccaaaaaaataaaccctcgttccacagaagctgccatcaagtatttcctcacgcaagcaaccgcatccataatccttctaatagctatcctcttcaacaatatactctccggacaatgaaccataaccaatactaccaatcaatactcatcattaataatcataatggctatagcaataaaactaggaatagccccctttcacttctgagtcccagaggttacccaaggcacccctctgacatccggcctgcttcttctcacatgacaaaaactagcccccatctcaatcatataccaaatctctccctcactaaacgtaagccttctcctcactctctcaatcttatccatcatagcaggcagttgaggtggattaaaccaaacccagctacgcaaaatcttagcatactcctcaattacccacataggatgaataatagcagttctaccgtacaaccctaacataaccattcttaatttaactatttatattatcctaactactaccgcattcctactactcaacttaaactccagcaccacgaccctactactatctcgcacctgaaacaagctaacatgactaacacccttaattccatccaccctcctctccctaggaggcctgcccccgctaaccggctttttgcccaaatgggccattatcgaagaattcacaaaaaacaatagcctcatcatccccaccatcatagccaccatcaccctccttaacctctacttctacctacgcctaatctactcaacctcaatcacactactccccatatctaacaacgtaaaaataaaatgacagtttgaacatacaaaacccaccccattcctccccacactcatcgcccttaccacgctactcctacctatctccccttttatactaataatcttatagaaatttaggttaaatacagaccaagagccttcaaagccctcagtaagttgcaatacttaatttctgtaacagctaaggactgcaaaaccccactctgcatcaactgaacgcaaatcagccactttaattaagctaagcccttactagaccaatgggacttaaacccacaaacacttagttaacagctaagcaccctaatcaactggcttcaatctacttctcccgccgccgggaaaaaaggcgggagaagccccggcaggtttgaagctgcttcttcgaatttgcaattcaatatgaaaatcacctcggagctggtaaaaagaggcctaacccctgtctttagatttacagtccaatgcttcactcagccattttacctcacccccactgatgttcgccgaccgttgactattctctacaaaccacaaagacattggaacactatacctattattcggcgcatgagctggagtcctaggcacagctctaagcctccttattcgagccgagctgggccagccaggcaaccttctaggtaacgaccacatctacaacgttatcgtcacagcccatgcatttgtaataatcttcttcatagtaatacccatcataatcggaggctttggcaactgactagttcccctaataatcggtgcccccgatatggcgtttccccgcataaacaacataagcttctgactcttacctccctctctcctactcctgctcgcatctgctatagtggaggccggagcaggaacaggttgaacagtctaccctcccttagcagggaactactcccaccctggagcctccgtagacctaaccatcttctccttacacctagcaggtgtctcctctatcttaggggccatcaatttcatcacaacaattatcaatataaaaccccctgccataacccaataccaaacgcccctcttcgtctgatccgtcctaatcacagcagtcctacttctcctatctctcccagtcctagctgctggcatcactatactactaacagaccgcaacctcaacaccaccttcttcgaccccgccggaggaggagaccccattctataccaacacctattctgatttttcggtcaccctgaagtttatattcttatcctaccaggcttcggaataatctcccatattgtaacttactactccggaaaaaaagaaccatttggatacataggtatggtctgagctatgatatcaattggcttcctagggtttatcgtgtgagcacaccatatatttacagtaggaatagacgtagacacacgagcatatttcacctccgctaccataatcatcgctatccccaccggcgtcaaagtatttagctgactcgccacactccacggaagcaatatgaaatgatctgctgcagtgctctgagccctaggattcatctttcttttcaccgtaggtggcctgactggcattgtattagcaaactcatcactagacatcgtactacacgacacgtactacgttgtagctcacttccactatgtcctatcaataggagctgtatttgccatcataggaggcttcattcactgatttcccctattctcaggctacaccctagaccaaacctacgccaaaatccatttcactatcatattcatcggcgtaaatctaaccttcttcccacaacactttctcggcctatccggaatgccccgacgttactcggactaccccgatgcatacaccacatgaaatatcctatcatctgtaggttcattcatttctctaacagcagtaatattaataattttcatgatttgagaagccttcgcttcgaagcgaaaagtcctaatagtagaagaaccctccataaacctggagtgactatatggatgccccccaccctaccacacattcgaagaacccgtatacataaaatctagacaaaaaaggaaggaatcgaaccccccaaagctggtttcaagccaaccccatggcctccatgactttttcaaaaagatattagaaaaaccatttcataactttgtcaaagttaaattataggctaaatcctatatatcttaatggcacatgcagcgcaagtaggtctacaagacgctacttcccctatcatagaagagcttatcacctttcatgatcacgccctcataatcattttccttatctgcttcctagtcctgtatgcccttttcctaacactcacaacaaaactaactaatactaacatctcagacgctcaggaaatagagaccgtctgaactatcctgcccgccatcatcctagtcctcatcgccctcccatccctacgcatcctttacataacagacgaggtcaacgatccctcccttaccatcaaatcaattggccaccaatggtactgaacctacgagtacaccgactacggcggactaatcttcaactcctacatacttcccccattattcctagaaccaggcgacctgcgactccttgacgttgacaatcgagtagtactcccgattgaagcccccattcgtataataattacatcacaagacgtcttgcactcatgagctgtccccacattaggcttaaaaacagatgcaattcccggacgtctaaaccaaaccactttcaccgctacacgaccgggggtatactacggtcaatgctctgaaatctgtggagcaaaccacagtttcatacccatcgtcctagaattaattcccctaaaaatctttgaaatagggcccgtatttaccctatagcaccccctctaccccctctagagcccactgtaaagctaacttagcattaaccttttaagttaaagattaagagaaccaacacctctttacagtgaaatgccccaactaaatactaccgtatggcccaccataattacccccatactccttacactattcctcatcacccaactaaaaatattaaacacaaactaccacctacctccctcaccaaagcccataaaaataaaaaattataacaaaccctgagaaccaaaatgaacgaaaatctgttcgcttcattcattgcccccacaatcctaggcctacccgccgcagtactgatcattctatttccccctctattgatccccacctccaaatatctcatcaacaaccgactaatcaccacccaacaatgactaatcaaactaacctcaaaacaaatgatagccatacacaacactaaaggacgaacctgatctcttatactagtatccttaatcatttttattgccacaactaacctcctcggactcctgcctcactcatttacaccaaccacccaactatctataaacctagccatggccatccccttatgagcgggcgcagtgattataggctttcgctctaagattaaaaatgccctagcccacttcttaccacaaggcacacctacaccccttatccccatactagttattatcgaaaccatcagcctactcattcaaccaatagccctggccgtacgcctaaccgctaacattactgcaggccacctactcatgcacctaattggaagcgccaccctagcaatatcaaccattaaccttccctctacacttatcatcttcacaattctaattctactgactatcctagaaatcgctgtcgccttaatccaagcctacgttttcacacttctagtaagcctctacctgcacgacaacacataatgacccaccaatcgcatgcctatcatatagtaaaacccagcccatgacccctaacaggggccctctcagccctcctaatgacctccggcctagccatgtgatttcacttccactccataacgctcctcatactaggcctactaaccaacacactaaccatataccaatgatggcgcgatgtaacacgagaaagcacataccaaggccaccacacaccacctgtccaaaaaggccttcgatacgggataatcctatttattacctcagaagtttttttcttcgcaggatttttctgagccttttaccactccagcctagcccctaccccccaactaggagggcactggcccccaacaggcatcaccccgctaaatcccctagaagtcccactcctaaacacatccgtattactcgcatcaggagtatcaatcacctgagctcaccatagtctaatagaaaacaaccgaaaccaaataattcaagcactgcttattacaattttactgggtctctattttaccctcctacaagcctcagagtacttcgagtctcccttcaccatttccgacggcatctacggctcaacattttttgtagccacaggcttccacggacttcacgtcattattggctcaactttcctcactatctgcttcatccgccaactaatatttcactttacatccaaacatcactttggcttcgaagccgccgcctgatactggcattttgtagatgtggtttgactatttctgtatgtctccatctattgatgagggtcttactcttttagtataaatagtaccgttaacttccaattaactagttttgacaacattcaaaaaagagtaataaacttcgccttaattttaataatcaacaccctcctagccttactactaataatcattacattttgactaccacaactcaacggctacatagaaaaatccaccccttacgagtgcggcttcgaccctatatcccccgcccgcgtccctttctccataaaattcttcttagtagctattaccttcttattatttgatctagaaattgccctccttttacccctaccatgagccctacaaacaactaacctgccactaatagttatgtcatccctcttattaatcatcatcctagccctaagtctggcctatgagtgactacaaaaaggattagactgagccgaattggtatatagtttaaacaaaacgaatgatttcgactcattaaattatgataatcatatttaccaaatgcccctcatttacataaatattatactagcatttaccatctcacttctaggaatactagtatatcgctcacacctcatatcctccctactatgcctagaaggaataatactatcgctgttcattatagctactctcataaccctcaacacccactccctcttagccaatattgtgcctattgccatactagtctttgccgcctgcgaagcagcggtgggcctagccctactagtctcaatctccaacacatatggcctagactacgtacataacctaaacctactccaatgctaaaactaatcgtcccaacaattatattactaccactgacatgactttccaaaaaacacataatttgaatcaacacaaccacccacagcctaattattagcatcatccccctactattttttaaccaaatcaacaacaacctatttagctgttccccaaccttttcctccgaccccctaacaacccccctcctaatactaactacctgactcctacccctcacaatcatggcaagccaacgccacttatccagtgaaccactatcacgaaaaaaactctacctctctatactaatctccctacaaatctccttaattataacattcacagccacagaactaatcatattttatatcttcttcgaaaccacacttatccccaccttggctatcatcacccgatgaggcaaccagccagaacgcctgaacgcaggcacatacttcctattctacaccctagtaggctcccttcccctactcatcgcactaatttacactcacaacaccctaggctcactaaacattctactactcactctcactgcccaagaactatcaaactcctgagccaacaacttaatatgactagcttacacaatagcttttatagtaaagatacctctttacggactccacttatgactccctaaagcccatgtcgaagcccccatcgctgggtcaatagtacttgccgcagtactcttaaaactaggcggctatggtataatacgcctcacactcattctcaaccccctgacaaaacacatagcctaccccttccttgtactatccctatgaggcataattataacaagctccatctgcctacgacaaacagacctaaaatcgctcattgcatactcttcaatcagccacatagccctcgtagtaacagccattctcatccaaaccccctgaagcttcaccggcgcagtcattctcataatcgcccacggacttacatcctcattactattctgcctagcaaactcaaactacgaacgcactcacagtcgcatcataatcctctctcaaggacttcaaactctactcccactaatagctttttgatgacttctagcaagcctcgctaacctcgccttaccccccactattaacctactgggagaactctctgtgctagtaaccacattctcctgatcaaatatcactctcctactcacaggactcaacatactagtcacagccctatactccctctacatatttaccacaacacaatggggctcactcacccaccacattaacaacataaaaccctcattcacacgagaaaacaccctcatgttcatacacctatcccccattctcctcctatccctcaaccccgacatcattaccgggttttcctcttgtaaatatagtttaaccaaaacatcagattgtgaatctgacaacagaggcttacgaccccttatttaccgagaaagctcacaagaactgctaactcatgcccccatgtctaacaacatggctttctcaacttttaaaggataacagctatccattggtcttaggccccaaaaattttggtgcaactccaaataaaagtaataaccatgcacactactataaccaccctaaccctgacttccctaattccccccatccttaccaccctcgttaaccctaacaaaaaaaactcatacccccattatgtaaaatccattgtcgcatccacctttattatcagtctcttccccacaacaatattcatgtgcctagaccaagaagttattatctcgaactgacactgagccacaacccaaacaacccagctctccctaagcttcaaactagactacttctccataatattcatccctgtagcattgttcgttacatggtccatcatagaattctcactgtgatatataaactcagacccaaacattaatcagttcttcaagtatctactcattttcctaattaccatactaatcttagttaccgctaacaacctattccaactgttcatcggctgagagggcgtaggaattatatccttcttgctcatcagttgatgatacgcccgagcagatgccaacacagcagccattcaagcaatcctatacaaccgtatcggcgatatcggtttcatcctcgccttagcatgatttatcctacactccaactcatgagacccacaacaaatagcccttctaaacgctaatccaagcctcaccccactactaggcctcctcctagcagcagcaggcaaatcagcccaattaggtctccacccctgactcccctcagccatagaaggccccaccccagtctcagccctactccactcaagcactatagttgtagcaggaatcttcttactcatccgcttccaccccctagcagaaaatagcccactaatccaaactctaacactatgcttaggcgctatcaccactctgttcgcagcagtctgcgcccttacacaaaatgacatcaaaaaaatcgtagccttctccacttcaagtcaactaggactcataatagttacaatcggcatcaaccaaccacacctagcattcctgcacatctgtacccacgccttcttcaaagccatactatttatgtgctccgggtccatcatccacaaccttaacaatgaacaagatattcgaaaaataggaggactactcaaaaccatacctctcacttcaacctccctcaccattggcagcctagcattagcaggaatacctttcctcacaggtttctactccaaagaccacatcatcgaaaccgcaaacatatcatacacaaacgcctgagccctatctattactctcatcgctacctccctaacaagcgcctatagcactcgaataattcttctcaccctaacaggtcaacctcgcttccctacccttactaacattaacgaaaataaccccaccctactaaaccccattaaacgcctggcagccggaagcctattcgcaggatttctcattactaacaacatttcccccgcatcccccttccaaacaacaatccccctctacctaaaactcacggccctcgctgtcactttcctaggacttctaacagccctagacctcaactacctaaccaacaaacttaaaataaaatccccactatgcacattttatttctccaacatactcggattctaccctagcatcacacaccgcacaatcccctatctaggccttcttacgagccaaaacctgcccctactcctcctagacctaacctgactagaaaagctattacctaaaacaatttcacagcaccaaatctccacctccatcatcacctcaacccaaaaaggcataattaaactttacttcctctctttcttcttcccactcatcctaaccctactcctaatcacataacctattcccccgagcaatctcaattacaatacatacaccaacaaacaatgttcaaccagtaactactactaatcaacgcccataatcatacaaagcccccgcaccaataggatcctcccgaatcaaccctgacccctctccttcataaattattcagcttcctacactattaaagtttaccacaaccaccaccccatcatactctttcacccacagcaccaatcctacctccatcgctaaccccactaaaacactcaccaagacctcaacccctgacccccatgcctcaggatactcctcaatagccatcgctgtagtatatccaaagacaaccatcattccccctaaataaattaaaaaaactattaaacccatataacctcccccaaaattcagaataataacacacccgaccacgccgctaacaatcaatactaaacccccataaataggagaaggcttagaagaaaaccccacaaaccccattactaaacccacactcaacagaaacaaagcatacatcattattctcgcacggactacaaccacgaccaatgatatgaaaaaccatcgttgtatttcaactacaagaacaccaatgaccccaatacgcaaaattaaccccctaataaaattaattaaccactcattcatcgacctccccaccccatccaacatctccgcatgatgaaacttcggctcactccttggcgcctgcctgatcctccaaatcaccacaggactattcctagccatgcactactcaccagacgcctcaaccgccttttcatcaatcgcccacatcactcgagacgtaaattatggctgaatcatccgctaccttcacgccaatggcgcctcaatattctttatctgcctcttcctacacatcgggcgaggcctatattacggatcatttctctactcagaaacctgaaacatcggcattatcctcctgcttgcaactatagcaacagccttcataggctatgtcctcccgtgaggccaaatatcattctgaggggccacagtaattacaaacttactatccgccatcccatacattgggacagacctagttcaatgaatctgaggaggctactcagtagacagtcccaccctcacacgattctttacctttcacttcatcttacccttcattattgcagccctagcagcactccacctcctattcttgcacgaaacgggatcaaacaaccccctaggaatcacctcccattccgataaaatcaccttccacccttactacacaatcaaagacgccctcggcttacttctcttccttctctccttaatgacattaacactattctcaccagacctcctaggcgacccagacaattataccctagccaaccccttaaacacccctccccacatcaagcccgaatgatatttcctattcgcctacacaattctccgatccgtccctaacaaactaggaggcgtccttgccctattactatccatcctcatcctagcaataatccccatcctccatatatccaaacaacaaagcataatatttcgcccactaagccaatcactttattgactcctagccgcagacctcctcattctaacctgaatcggaggacaaccagtaagctacccctttaccatcattggacaagtagcatccgtactatacttcacaacaatcctaatcctaataccaactatctccctaattgaaaacaaaatactcaaatgggcctgtccttgtagtataaactaatacaccagtcttgtaaaccggagatgaaaacctttttccaaggacaaatcagagaaaaagtctttaactccaccattagcacccaaagctaagattctaatttaaactattctctgttctttcatggggaagcagatttgggtaccacccaagtattgactcacccatcaacaaccgctatgtatttcgtacattactgccagccaccatgaatattgtacggtaccataaatacttgaccacctgtagtacataaaaacccaatccacatcaaaacccccccctcatgcttacaagcaagtacagcaatcaaccttcaactatcacacatcaactgcaactccaaagccacccctcacccactaggatatcaacaaacctacccatccttaacagtacatggtacataaagccatttaccgtacatagcacattacagtcaaatcccttctcgtccccatggatgacccccctcagataggagtcccttgaccaccatcctccgtgaaatcaatatcccgcacaagagtgctactctcctcgctccgggcccataacacttgggggtagctaaagtgaactgtatccgacatctggttcctacttcagggtcataaagcctaaatagcccacacgttccccttaaataagacatcacgatg

SEQ ID NO: 403 - DNA, 16570 bp, Homo sapiens mitochondrial
  3108: "n" refers to a nucleotide at position 3107 of the Cambridge Reference Sequence (CRS, Anderson et al. 1981 Nature 290:457-465), later determined to be absent from the human mtDNA sequence according to the revised CRS (rCRS, Andrews et al. 1999 Nature Genetics 23:147); "n" therefore represents a single nucleotide deletion at a position corresponding to nucleotide 3107 of SEQ ID NO:1 as provided herein.
gatcacaggtctatcaccctattaaccactcacgggagctctccatgcatttggtattttcgtctggggggtatgcacgcgatagcattgcgagacgctggagccggagcaccctatgtcgcagtatctgtctttgattcctgcctcatcctattatttatcgcacctacgttcaatattacaggcgaacatacttactaaagtgtgttaattaattaatgcttgtaggacataataataacaattgaatgtctgcacagccgctttccacacagacatcataacaaaaaatttccaccaaaccccccctcccccgccttctggccacagcacttaaacacatctctgccaaaccccaaaaacaaagaaccctaacaccagcctaaccagatttcaaattttatcttttggcggtatgcacttttaacagtcaccccccaactaacacattattttcccctcccactcccatactactaatctcatcaatacaacccccgcccatcctacccagcacacacacaccgctgctaaccccataccccgaaccaaccaaaccccaaagacaccccccacagtttatgtagcttacctcctcaaagcaatacactgaaaatgtttagacgggctcacatcaccccataaacaaataggtttggtcctagcctttctattagctcttagtaagattacacatgcaagcatccccgttccagtgagttcaccctctaaatcaccacgatcaaaagggacaagcatcaagcacgcagcaatgcagctcaaaacgcttagcctagccacacccccacgggaaacagcagtgattaacctttagcaataaacgaaagtttaactaagctatactaaccccagggttggtcaatttcgtgccagccaccgcggtcacacgattaacccaagtcaatagaagccggcgtaaagagtgttttagatcaccccctccccaataaagctaaaactcacctgagttgtaaaaaactccagttgacacaaaatagactacgaaagtggctttaacatatctgaacacacaatagctaagacccaaactgggattagataccccactatgcttagccctaaacctcaacagttaaatcaacaaaactgctcgccagaacactacgagccacagcttaaaactcaaaggacctggcggtgcttcatatccctctagaggagcctgttctgtaatcgataaaccccgatcaacctcaccacctcttgctcagcctatataccgccatcttcagcaaaccctgatgaaggctacaaagtaagcgcaagtacccacgtaaagacgttaggtcaaggtgtagcccatgaggtggcaagaaatgggctacattttctaccccagaaaactacgatagcccttatgaaacttaagggtcgaaggtggatttagcagtaaactgagagtagagtgcttagttgaacagggccctgaagcgcgtacacaccgcccgtcaccctcctcaagtatacttcaaaggacatttaactaaaacccctacgcatttatatagaggagacaagtcgtaacatggtaagtgtactggaaagtgcacttggacgaaccagagtgtagcttaacacaaagcacccaacttacacttaggagatttcaacttaacttgaccgctctgagctaaacctagccccaaacccactccaccttactaccagacaaccttagccaaaccatttacccaaataaagtataggcgatagaaattgaaacctggcgcaatagatatagtaccgcaagggaaagatgaaaaattataaccaagcataatatagcaaggactaacccctataccttctgcataatgaattaactagaaataactttgcaaggagagccaaagctaagacccccgaaaccagacgagctacctaagaacagctaaaagagcacacccgtctatgtagcaaaatagtgggaagatttataggtagaggcgacaaacctaccgagcctggtgatagctggttgtccaagatagaatcttagttcaactttaaatttgcccacagaaccctctaaatccccttgtaaatttaactgttagtccaaagaggaacagctctttggacactaggaaaaaaccttgtagagagagtaaaaaatttaacacccatagtaggcctaaaagcagccaccaattaagaaagcgttcaagctcaacacccactacctaaaaaatcccaaacatataactgaactcctcacacccaattggaccaatctatcaccctatagaagaactaatgttagtataagtaacatgaaaacattctcctccgcataagcctgcgtcagattaaaacactgaactgacaattaacagcccaatatctacaatcaaccaacaagtcattattaccctcactgtcaacccaacacaggcatgctcataaggaaaggttaaaaaaagtaaaaggaactcggcaaatcttaccccgcctgtttaccaaaaacatcacctctagcatcaccagtattagaggcaccgcctgcccagtgacacatgtttaacggccgcggtaccctaaccgtgcaaaggtagcataatcacttgttccttaaatagggacctgtatgaatggctccacgagggttcagctgtctcttacttttaaccagtgaaattgacctgcccgtgaagaggcgggcataacacagcaagacgagaagaccctatggagctttaatttattaatgcaaacagtacctaacaaacccacaggtcctaaactaccaaacctgcattaaaaatttcggttggggcgacctcggagcagaacccaacctccgagcagtacatgctaagacttcaccagtcaaagcgaactactatactcaattgatccaataacttgaccaacggaacaagttaccctagggataacagcgcaatcctattctagagtccatatcaacaatagggtttacgacctcgatgttggatcaggacatcccgatggtgcagccgctattaaaggttcgtttgttcaacgattaaagtcctacgtgatctgagttcagaccggagtaatccaggtcggtttctatctacnttcaaattcctccctgtacgaaaggacaagagaaataaggcctacttcacaaagcgccttcccccgtaaatgatatcatctcaacttagtattatacccacacccacccaagaacagggtttgttaagatggcagagcccggtaatcgcataaaacttaaaactttacagtcagaggttcaattcctcttcttaacaacatacccatggccaacctcctactcctcattgtacccattctaatcgcaatggcattcctaatgcttaccgaacgaaaaattctaggctatatacaactacgcaaaggccccaacgttgtaggcccctacgggctactacaacccttcgctgacgccataaaactcttcaccaaagagcccctaaaacccgccacatctaccatcaccctctacatcaccgccccgaccttagctctcaccatcgctcttctactatgaacccccctccccatacccaaccccctggtcaacctcaacctaggcctcctatttattctagccacctctagcctagccgtttactcaatcctctgatcagggtgagcatcaaactcaaactacgccctgatcggcgcactgcgagcagtagcccaaacaatctcatatgaagtcaccctagccatcattctactatcaacattactaataagtggctcctttaacctctccacccttatcacaacacaagaacacctctgattactcctgccatcatgacccttggccataatatgatttatctccacactagcagagaccaaccgaacccccttcgaccttgccgaaggggagtccgaactagtctcaggcttcaacatcgaatacgccgcaggccccttcgccctattcttcatagccgaatacacaaacattattataataaacaccctcaccactacaatcttcctaggaacaacatatgacgcactctcccctgaactctacacaacatattttgtcaccaagaccctacttctaacctccctgttcttatgaattcgaacagcatacccccgattccgctacgaccaactcatacacctcctatgaaaaaacttcctaccactcaccctagcattacttatatgatatgtctccatacccattacaatctccagcattccccctcaaacctaagaaatatgtctgataaaagagttactttgatagagtaaataataggagcttaaacccccttatttctaggactatgagaatcgaacccatccctgagaatccaaaattctccgtgccacctatcacaccccatcctaaagtaaggtcagctaaataagctatcgggcccataccccgaaaatgttggttatacccttcccgtactaattaatcccctggcccaacccgtcatctactctaccatctttgcaggcacactcatcacagcgctaagctcgcactgattttttacctgagtaggcctagaaataaacatgctagcttttattccagttctaaccaaaaaaataaaccctcgttccacagaagctgccatcaagtatttcctcacgcaagcaaccgcatccataatccttctaatagctatcctcttcaacaatatactctccggacaatgaaccataaccaatactaccaatcaatactcatcattaataatcataatggctatagcaataaaactaggaatagccccctttcacttctgagtcccagaggttacccaaggcacccctctgacatccggcctgcttcttctcacatgacaaaaactagcccccatctcaatcatataccaaatctctccctcactaaacgtaagccttctcctcactctctcaatcttatccatcatagcaggcagttgaggtggattaaaccaaacccagctacgcaaaatcttagcatactcctcaattacccacataggatgaataatagcagttctaccgtacaaccctaacataaccattcttaatttaactatttatattatcctaactactaccgcattcctactactcaacttaaactccagcaccacgaccctactactatctcgcacctgaaacaagctaacatgactaacacccttaattccatccaccctcctctccctaggaggcctgcccccgctaaccggctttttgcccaaatgggccattatcgaagaattcacaaaaaacaatagcctcatcatccccaccatcatagccaccatcaccctccttaacctctacttctacctacgcctaatctactccacctcaatcacactactccccatatctaacaacgtaaaaataaaatgacagtttgaacatacaaaacccaccccattcctccccacactcatcgcccttaccacgctactcctacctatctccccttttatactaataatcttatagaaatttaggttaaatacagaccaagagccttcaaagccctcagtaagttgcaatacttaatttctgtaacagctaaggactgcaaaaccccactctgcatcaactgaacgcaaatcagccactttaattaagctaagcccttactagaccaatgggacttaaacccacaaacacttagttaacagctaagcaccctaatcaactggcttcaatctacttctcccgccgccgggaaaaaaggcgggagaagccccggcaggtttgaagctgcttcttcgaatttgcaattcaatatgaaaatcacctcggagctggtaaaaagaggcctaacccctgtctttagatttacagtccaatgcttcactcagccattttacctcacccccactgatgttcgccgaccgttgactattctctacaaaccacaaagacattggaacactatacctattattcggcgcatgagctggagtcctaggcacagctctaagcctccttattcgagccgagctgggccagccaggcaaccttctaggtaacgaccacatctacaacgttatcgtcacagcccatgcatttgtaataatcttcttcatagtaatacccatcataatcggaggctttggcaactgactagttcccctaataatcggtgcccccgatatggcgtttccccgcataaacaacataagcttctgactcttacctccctctctcctactcctgctcgcatctgctatagtggaggccggagcaggaacaggttgaacagtctaccctcccttagcagggaactactcccaccctggagcctccgtagacctaaccatcttctccttacacctagcaggtgtctcctctatcttaggggccatcaatttcatcacaacaattatcaatataaaaccccctgccataacccaataccaaacgcccctcttcgtctgatccgtcctaatcacagcagtcctacttctcctatctctcccagtcctagctgctggcatcactatactactaacagaccgcaacctcaacaccaccttcttcgaccccgccggaggaggagaccccattctataccaacacctattctgatttttcggtcaccctgaagtttatattcttatcctaccaggcttcggaataatctcccatattgtaacttactactccggaaaaaaagaaccatttggatacataggtatggtctgagctatgatatcaattggcttcctagggtttatcgtgtgagcacaccatatatttacagtaggaatagacgtagacacacgagcatatttcacctccgctaccataatcatcgctatccccaccggcgtcaaagtatttagctgactcgccacactccacggaagcaatatgaaatgatctgctgcagtgctctgagccctaggattcatctttcttttcaccgtaggtggcctgactggcattgtattagcaaactcatcactagacatcgtactacacgacacgtactacgttgtagcccacttccactatgtcctatcaataggagctgtatttgccatcataggaggcttcattcactgatttcccctattctcaggctacaccctagaccaaacctacgccaaaatccatttcactatcatattcatcggcgtaaatctaactttcttcccacaacactttctcggcctatccggaatgccccgacgttactcggactaccccgatgcatacaccacatgaaacatcctatcatctgtaggctcattcatttctctaacagcagtaatattaataattttcatgatttgagaagccttcgcttcgaagcgaaaagtcctaatagtagaagaaccctccataaacctggagtgactatatggatgccccccaccctaccacacattcgaagaacccgtatacataaaatctagacaaaaaaggaaggaatcgaaccccccaaagctggtttcaagccaaccccatggcctccatgactttttcaaaaaggtattagaaaaaccatttcataactttgtcaaagttaaattataggctaaatcctatatatcttaatggcacatgcagcgcaagtaggtctacaagacgctacttcccctatcatagaagagcttatcacctttcatgatcacgccctcataatcattttccttatctgcttcctagtcctgtatgcccttttcctaacactcacaacaaaactaactaatactaacatctcagacgctcaggaaatagaaaccgtctgaactatcctgcccgccatcatcctagtcctcatcgccctcccatccctacgcatcctttacataacagacgaggtcaacgatccctcccttaccatcaaatcaattggccaccaatggtactgaacctacgagtacaccgactacggcggactaatcttcaactcctacatacttcccccattattcctagaaccaggcgacctgcgactccttgacgttgacaatcgagtagtactcccgattgaagcccccattcgtataataattacatcacaagacgtcttgcactcatgagctgtccccacattaggcttaaaaacagatgcaattcccggacgtctaaaccaaaccactttcaccgctacacgaccgggggtatactacggtcaatgctctgaaatctgtggagcaaaccacagtttcatgcccatcgtcctagaattaattcccctaaaaatctttgaaatagggcccgtatttaccctatagcaccccctctaccccctctagagcccactgtaaagctaacttagcattaaccttttaagttaaagattaagagaaccaacacctctttacagtgaaatgccccaactaaatactaccgtatggcccaccataattacccccatactccttacactattcctcatcacccaactaaaaatattaaacacaaactaccacctacctccctcaccaaagcccataaaaataaaaaattataacaaaccctgagaaccaaaatgaacgaaaatctgttcgcttcattcattgcccccacaatcctaggcctacccgccgcagtactgatcattctatttccccctctattgatccccacctccaaatatctcatcaacaaccgactaatcaccacccaacaatgactaatcaaactaacctcaaaacaaatgataaccatacacaacactaaaggacgaacctgatctcttatactagtatccttaatcatttttattgccacaactaacctcctcggactcctgcctcactcatttacaccaaccacccaactatctataaacctagccatggccatccccttatgagcgggcgcagtgattataggctttcgctctaagattaaaaatgccctagcccacttcttaccacaaggcacacctacaccccttatccccatactagttattatcgaaaccatcagcctactcattcaaccaatagccctggccgtacgcctaaccgctaacattactgcaggccacctactcatgcacctaattggaagcgccaccctagcaatatcaaccattaaccttccctctacacttatcatcttcacaattctaattctactgactatcctagaaatcgctgtcgccttaatccaagcctacgttttcacacttctagtaagcctctacctgcacgacaacacataatgacccaccaatcacatgcctatcatatagtaaaacccagcccatgacccctaacaggggccctctcagccctcctaatgacctccggcctagccatgtgatttcacttccactccataacgctcctcatactaggcctactaaccaacacactaaccatataccaatgatggcgcgatgtaacacgagaaagcacataccaaggccaccacacaccacctgtccaaaaaggccttcgatacgggataatcctatttattacctcagaagtttttttcttcgcaggatttttctgagccttttaccactccagcctagcccctaccccccaattaggagggcactggcccccaacaggcatcaccccgctaaatcccctagaagtcccactcctaaacacatccgtattactcgcatcaggagtatcaatcacctgagctcaccatagtctaatagaaaacaaccgaaaccaaataattcaagcactgcttattacaattttactgggtctctattttaccctcctacaagcctcagagtacttcgagtctcccttcaccatttccgacggcatctacggctcaacattttttgtagccacaggcttccacggacttcacgtcattattggctcaactttcctcactatctgcttcatccgccaactaatatttcactttacatccaaacatcactttggcttcgaagccgccgcctgatactggcattttgtagatgtggtttgactatttctgtatgtctccatctattgatgagggtcttactcttttagtataaatagtaccgttaacttccaattaactagttttgacaacattcaaaaaagagtaataaacttcgccttaattttaataatcaacaccctcctagccttactactaataattattacattttgactaccacaactcaacggctacatagaaaaatccaccccttacgagtgcggcttcgaccctatatcccccgcccgcgtccctttctccataaaattcttcttagtagctattaccttcttattatttgatctagaaattgccctccttttacccctaccatgagccctacaaacaactaacctgccactaatagttatgtcatccctcttattaatcatcatcctagccctaagtctggcctatgagtgactacaaaaaggattagactgaaccgaattggtatatagtttaaacaaaacgaatgatttcgactcattaaattatgataatcatatttaccaaatgcccctcatttacataaatattatactagcatttaccatctcacttctaggaatactagtatatcgctcacacctcatatcctccctactatgcctagaaggaataatactatcgctgttcattatagctactctcataaccctcaacacccactccctcttagccaatattgtgcctattgccatactagtctttgccgcctgcgaagcagcggtgggcctagccctactagtctcaatctccaacacatatggcctagactacgtacataacctaaacctactccaatgctaaaactaatcgtcccaacaattatattactaccactgacatgactttccaaaaaacacataatttgaatcaacacaaccacccacagcctaattattagcatcatccctctactattttttaaccaaatcaacaacaacctatttagctgttccccaaccttttcctccgaccccctaacaacccccctcctaatactaactacctgactcctacccctcacaatcatggcaagccaacgccacttatccagtgaaccactatcacgaaaaaaactctacctctctatactaatctccctacaaatctccttaattataacattcacagccacagaactaatcatattttatatcttcttcgaaaccacacttatccccaccttggctatcatcacccgatgaggcaaccagccagaacgcctgaacgcaggcacatacttcctattctacaccctagtaggctcccttcccctactcatcgcactaatttacactcacaacaccctaggctcactaaacattctactactcactctcactgcccaagaactatcaaactcctgagccaacaacttaatatgactagcttacacaatagcttttatagtaaagatacctctttacggactccacttatgactccctaaagcccatgtcgaagcccccatcgctgggtcaatagtacttgccgcagtactcttaaaactaggcggctatggtataatacgcctcacactcattctcaaccccctgacaaaacacatagcctaccccttccttgtactatccctatgaggcataattataacaagctccatctgcctacgacaaacagacctaaaatcgctcattgcatactcttcaatcagccacatagccctcgtagtaacagccattctcatccaaaccccctgaagcttcaccggcgcagtcattctcataatcgcccacgggcttacatcctcattactattctgcctagcaaactcaaactacgaacgcactcacagtcgcatcataatcctctctcaaggacttcaaactctactcccactaatagctttttgatgacttctagcaagcctcgctaacctcgccttaccccccactattaacctactgggagaactctctgtgctagtaaccacgttctcctgatcaaatatcactctcctacttacaggactcaacatactagtcacagccctatactccctctacatatttaccacaacacaatggggctcactcacccaccacattaacaacataaaaccctcattcacacgagaaaacaccctcatgttcatacacctatcccccattctcctcctatccctcaaccccgacatcattaccgggttttcctcttgtaaatatagtttaaccaaaacatcagattgtgaatctgacaacagaggcttacgaccccttatttaccgagaaagctcacaagaactgctaactcatgcccccatgtctaacaacatggctttctcaacttttaaaggataacagctatccattggtcttaggccccaaaaattttggtgcaactccaaataaaagtaataaccatgcacactactataaccaccctaaccctgacttccctaattccccccatccttaccaccctcgttaaccctaacaaaaaaaactcatacccccattatgtaaaatccattgtcgcatccacctttattatcagtctcttccccacaacaatattcatgtgcctagaccaagaagttattatctcgaactgacactgagccacaacccaaacaacccagctctccctaagcttcaaactagactacttctccataatattcatccctgtagcattgttcgttacatggtccatcatagaattctcactgtgatatataaactcagacccaaacattaatcagttcttcaaatatctactcatcttcctaattaccatactaatcttagttaccgctaacaacctattccaactgttcatcggctgagagggcgtaggaattatatccttcttgctcatcagttgatgatacgcccgagcagatgccaacacagcagccattcaagcaatcctatacaaccgtatcggcgatatcggtttcatcctcgccttagcatgatttatcctacactccaactcatgagacccacaacaaatagcccttctaaacgctaatccaagcctcaccccactactaggcctcctcctagcagcagcaggcaaatcagcccaattaggtctccacccctgactcccctcagccatagaaggccccaccccagtctcagccctactccactcaagcactatagttgtagcaggaatcttcttactcatccgcttccaccccctagcagaaaatagcccactaatccaaactctaacactatgcttaggcgctatcaccactctgttcgcagcagtctgcgcccttacacaaaatgacatcaaaaaaatcgtagccttctccacttcaagtcaactaggactcataatagttacaatcggcatcaaccaaccacacctagcattcctgcacatctgtacccacgccttcttcaaagccatactatttatgtgctccgggtccatcatccacaaccttaacaatgaacaagatattcgaaaaataggaggactactcaaaaccatacctctcacttcaacctccctcaccattggcagcctagcattagcaggaatacctttcctcacaggtttctactccaaagaccacatcatcgaaaccgcaaacatatcatacacaaacgcctgagccctatctattactctcatcgctacctccctgacaagcgcctatagcactcgaataattcttctcaccctaacaggtcaacctcgcttccccacccttactaacattaacgaaaataaccccaccctactaaaccccattaaacgcctggcagccggaagcctattcgcaggatttctcattactaacaacatttcccccgcatcccccttccaaacaacaatccccctctacctaaaactcacagccctcgctgtcactttcctaggacttctaacagccctagacctcaactacctaaccaacaaacttaaaataaaatccccactatgcacattttatttctccaacatactcggattctaccctagcatcacacaccgcacaatcccctatctaggccttcttacgagccaaaacctgcccctactcctcctagacctaacctgactagaaaagctattacctaaaacaatttcacagcaccaaatctccacctccatcatcacctcaacccaaaaaggcataattaaactttacttcctctctttcttcttcccactcatcctaaccctactcctaatcacataacctattcccccgagcaatctcaattacaatatatacaccaacaaacaatgttcaaccagtaactactactaatcaacgcccataatcatacaaagcccccgcaccaataggatcctcccgaatcaaccctgacccctctccttcataaattattcagcttcctacactattaaagtttaccacaaccaccaccccatcatactctttcacccacagcaccaatcctacctccatcgctaaccccactaaaacactcaccaagacctcaacccctgacccccatgcctcaggatactcctcaatagccatcgctgtagtatatccaaagacaaccatcattccccctaaataaattaaaaaaactattaaacccatataacctcccccaaaattcagaataataacacacccgaccacaccgctaacaatcaatactaaacccccataaataggagaaggcttagaagaaaaccccacaaaccccattactaaacccacactcaacagaaacaaagcatacatcattattctcgcacggactacaaccacgaccaatgatatgaaaaaccatcgttgtatttcaactacaagaacaccaatgaccccaatacgcaaaactaaccccctaataaaattaattaaccactcattcatcgacctccccaccccatccaacatctccgcatgatgaaacttcggctcactccttggcgcctgcctgatcctccaaatcaccacaggactattcctagccatgcactactcaccagacgcctcaaccgccttttcatcaatcgcccacatcactcgagacgtaaattatggctgaatcatccgctaccttcacgccaatggcgcctcaatattctttatctgcctcttcctacacatcgggcgaggcctatattacggatcatttctctactcagaaacctgaaacatcggcattatcctcctgcttgcaactatagcaacagccttcataggctatgtcctcccgtgaggccaaatatcattctgaggggccacagtaattacaaacttactatccgccatcccatacattgggacagacctagttcaatgaatctgaggaggctactcagtagacagtcccaccctcacacgattctttacctttcacttcatcttgcccttcattattgcagccctagcagcactccacctcctattcttgcacgaaacgggatcaaacaaccccctaggaatcacctcccattccgataaaatcaccttccacccttactacacaatcaaagacgccctcggcttacttctcttccttctctccttaatgacattaacactattctcaccagacctcctaggcgacccagacaattataccctagccaaccccttaaacacccctccccacatcaagcccgaatgatatttcctattcgcctacacaattctccgatccgtccctaacaaactaggaggcgtccttgccctattactatccatcctcatcctagcaataatccccatcctccatatatccaaacaacaaagcataatatttcgcccactaagccaatcactttattgactcctagccgcagacctcctcattctaacctgaatcggaggacaaccagtaagctacccttttaccatcattggacaagtagcatccgtactatacttcacaacaatcctaatcctaataccaactatctccctaattgaaaacaaaatactcaaatgggcctgtccttgtagtataaactaatacaccagtcttgtaaaccggagatgaaaacctttttccaaggacaaatcagagaaaaagtctttaactccaccattagcacccaaagctaagattctaatttaaactattctctgttctttcatggggaagcagatttgggtaccacccaagtattgactcacccatcaacaaccgctatgtatctcgtacattactgccagccaccatgaatattgtacggtaccataaatacttgaccacctgtagtacataaaaacccaatccacatcaaaaccccctccccatgcttacaagcaagtacagcaatcaaccttcaactatcacacatcaactgcaactccaaagccacccctcacccactaggataccaacaaacctacccacccttaacagtacatagtacataaagccatttaccgtacatagcacattacagtcaaatcccttctcgtccccatggatgacccccctcagataggggtcccttgaccaccatcctccgtgaaatcaatatcccgcacaagagtgctactctcctcgctccgggcccataacacttgggggtagctaaagtgaactgtatccgacatctggttcctacttcagggtcataaagcctaaatagcccacacgttccccttaaataagacatcacgatg

SEQ ID NO: 404 - DNA, 16571 bp, Homo sapiens mitochondrial
  3109: "n" refers to a nucleotide at position 3107 of the Cambridge Reference Sequence (CRS, Anderson et al. 1981 Nature 290:457-465), later determined to be absent from the human mtDNA sequence according to the revised CRS (rCRS, Andrews et al. 1999 Nature Genetics 23:147); "n" therefore represents a single nucleotide deletion at a position corresponding to nucleotide 3107 of SEQ ID NO:1 as provided herein.
gatcacaggtctatcaccctattaaccactcacgggagctctccatgcatttggtattttcgtctggggggtgtgcacgcgatagcattgcgagacgctggagccggagcaccctatgtcgcagtatctgtctttgattcctgcctcatcctattatttatcgcacctacgttcaatattacagacgaacatacttactaaagtgtgttaattaattaatgcttgtaagacataataataacaattgaatgtctgcacagccgctttccacacagacatcataacaaaaaattttcaccaaaccccccctcccccccgcttctggccacagcacttaaacacatctctgccaaaccccaaaaacaaagaaccctaacaccagcctaaccagatttcaaattttatcttttggcggtatgcacttttaacagtcaccccccaactaacacattattttcccctctcactcccatactactaatctcatcaacacaacccccgcccatcctacccagcacacacacaccgctgctaaccccataccccgaaccaaccaaaccccaaagacaccccccacagtttatgtagcttacctcctcaaagcaatacactgaaaatgtttagacgggctcacatcaccccataaacaaataggtttggtcctagcctttctattagctcttagtaagattacacatgcaagcatccccgttccagtgagttcaccctctaaatcaccacgatcaaaagggacaagcatcaagcacgcagcaatgcagctcaaaacgcttagcctagccacacccccacgggaaacagcagtgattaacctttagcaataaacgaaagtttaactaagctatactaaccccagggttggtcaatttcgtgccagccaccgcggtcacacgattaacccaagtcaatagaagccggcgtaaagagtgttttagatcaccccctccccaataaagctaaaactcacctgagttgtaaaaaactccagttgacacaaaatagactacgaaagtggctttaacatatctgaacacacaatagctaagacccaaactgggattagataccccactatgcttagccctaaacctcaacagttaaatcaacaaaactgctcgccagaacactacgagccacagcttaaaactcaaaggacctggcggtgcttcatatccctctagaggagcctgttctgtaatcgataaaccccgatcaacctcaccacctcttgctcagcctatataccgccatcttcagcaaaccctgatgaaggctacaaagtaagcgcaagtacccacgtaaagacgttaggtcaaggtgtagcccatgaggtggcaagaaatgggctacattttctaccccagaaaactacgatagcccttatgaaacttaagggtcgaaggtggatttagcagtaaactgagagtagagtgcttagttgaacagggccctgaagcgcgtacacaccgcccgtcaccctcctcaagtatacttcaaaggacatttaactaaaacccctacgcatttatatagaggagacaagtcgtaacatggtaagtgtactggaaagtgcacttggacgaaccagagtgtagcttaacacaaagcacccaacttacacttaggagatttcaacttaacttgaccgctctgagctaaacctagccccaaacccactccaccttactaccagacaaccttagccaaaccatttacccaaataaagtataggcgatagaaattgaaacctggcgcaatagatatagtaccgcaagggaaagatgaaaaattataaccaagcataatatagcaaggactaacccctataccttctgcataatgaattaactagaaataactttgcaaggagagccaaagctaagacccccgaaaccagacgagctacctaagaacagctaaaagagcacacccgtctatgtagcaaaatagtgggaagatttataggtagaggcgacaaacctaccgagcctggtgatagctggttgtccaagatagaatcttagttcaactttaaatttgcccacagaaccctctaaatccccttgtaaatttaactgttagtccaaagaggaacagctctttggacactaggaaaaaaccttgtagagagagtaaaaaatttaacacccatagtaggcctaaaagcagccaccaattaagaaagcgttcaagctcaacacccactacctaaaaaatcccaaacatataactgaactcctcacacccaattggaccaatctatcaccctatagaagaactaatgttagtataagtaacatgaaaacattctcctccgcataagcctgcgtcagattaaaacactgaactgacaattaacagcccaatatctacaatcaaccaacaagtcattattaccctcactgtcaacccaacacaggcatgctcataaggaaaggttaaaaaaagtaaaaggaactcggcaaatcttaccccgcctgtttaccaaaaacatcacctctagcatcaccagtattagaggcaccgcctgcccagtgacacatgtttaacggccgcggtaccctaaccgtgcaaaggtagcataatcacttgttccttaaatagggacctgtatgaatggctccacgagggttcagctgtctcttacttttaaccagtgaaattgacctgcccgtgaagaggcgggcatgacacagcaagacgagaagaccctatggagctttaatttattaatgcaaacagtacctaacaaacccacaggtcctaaactaccaaacctgcattaaaaatttcggttggggcgacctcggagcagaacccaacctccgagcagtacatgctaagacttcaccagtcaaagcgaactactatactcaattgatccaataacttgaccaacggaacaagttaccctagggataacagcgcaatcctattctagagtccatatcaacaatagggtttacgacctcgatgttggatcaggacatcccaatggtgcagccgctattaaaggttcgtttgttcaacgattaaagtcctacgtgatctgagttcagaccggagtaatccaggtcggtttctatctacnttcaaattcctccctgtacgaaaggacaagagaaataaggcctacttcacaaagcgccttcccccgtaaatgatatcatctcaacttagtattatacccacacccacccaagaacagggtttgttaagatggcagagcccggtaatcgcataaaacttaaaactttacagtcagaggttcaattcctcttcttaacaacatacccatggccaacctcctactcctcattgtacccattctaatcgcaatggcattcctaatgcttaccgaacgaaaaattctaggctatatacaactacgcaaaggccccaacgttgtaggcccctacgggctactacaacccttcgctgacgccataaaactcttcaccaaagagcccctaaaacccgccacatctaccatcaccctctacatcaccgccccgaccttagctctcaccatcgctcttctactatgaacccccctccccatacccaaccccctggtcaacctcaacctaggcctcctatttattctagccacctctagcctagccgtttactcaatcctctgatcagggtgagcatcaaactcaaactacgccctgatcggcgcactgcgagcagtagcccaaacaatctcatatgaagtcaccctagccatcattctactatcaacattactaataagtggctcctttaacctctccacccttatcacaacacaagaacacctctgattactcctgccatcatgacccttggccataatatgatttatctccacactagcagagaccaaccgaacccccttcgaccttgccgaaggggagtccgaactagtctcaggcttcaacatcgaatacgccgcaggccccttcgccctattcttcatagccgaatacacaaacattattataataaacaccctcaccactacaatcttcctaggaacaacatatgacgcactctcccctgaactctacacaacatattttgtcaccaagaccctacttctaacctccctgttcttatgaattcgaacagcatacccccgattccgctacgaccaactcatacacctcctatgaaaaaacttcctaccactcaccctagcattacttatatgacatgtctccatacccattacaatctccagcattccccctcaaacctaagaaatatgtctgataaaagagttactttgatagagtaaataataggagcttaaacccccttatttctaggactatgagaatcgaacccatccctgagaatccaaaattctccgtgccacctatcacaccccatcctaaagtaaggtcagctaaataagctatcgggcccataccccgaaaatgttggttatacccttcccgtactaattaatcccctggcccaacccgtcatctactctaccatctttgcaggcacactcatcacagcgctaagctcgcactgattttttacctgagtaggcctagaaataaacatgctagcttttattccagttctaaccaaaaaaataaaccctcgttccacagaagctgccatcaagtatttcctcacgcaagcaaccgcatccataatccttctaatagctatcctcttcaacaatatactctccggacaatgaaccataaccaatactaccaatcaatactcatcattaataatcataatggctatagcaataaaactaggaatagccccctttcacttctgagtcccagaggttacccaaggcacccctctgacatccggcctgcttcttctcacatgacaaaaactagcccccatctcaatcatataccaaatctctccctcactaaacgtaagccttctcctcactctctcaatcttatccatcatagcaggcagttgaggtggattaaaccaaacccagctacgcaaaatcttagcatactcctcaattacccacataggatgaataatagcagttctaccgtacaaccctaacataaccattcttaatttaactatttatattatcctaactactaccgcattcctactactcaacttaaactccagcaccacgaccctactactatctcgcacctgaaacaagctaacatgactaacacccttaattccatccaccctcctctccctaggaggcctgcccccgctaaccggctttttgcccaaatgggccattatcgaagaattcacaaaaaacaatagcctcatcatccccaccatcatagccaccatcaccctccttaacctctacttctacctacgcctaatctactccacctcaatcacactactccccatatctaacaacgtaaaaataaaatgacagtttgaacatacaaaacccaccccattcctccccacactcatcgcccttaccacgctactcctacctatctccccttttatactaataatcttatagaaatttaggttaaatacagaccaagagccttcaaagccctcagtaagttgcaatacttaatttctgtaacagctaaggactgcaaaaccccactctgcatcaactgaacgcaaatcagccactttaattaagctaagcccttactagaccaatgggacttaaacccacaaacacttagttaacagctaagcaccctaatcaactggcttcaatctacttctcccgccgccgggaaaaaaggcgggagaagccccggcaggtttgaagctgcttcttcgaatttgcaattcaatatgaaaatcacctcggagctggtaaaaagaggcctaacccctgtctttagatttacagtccaatgcttcactcagccattttacctcacccccactgatgttcgccgaccgttgactattctctacaaaccacaaagacattggaacactatacctattattcggcgcatgagctggagtcctaggcacagctctaagcctccttattcgagccgagctgggccagccaggcaaccttctaggtaacgaccacatctacaacgttatcgtcacagcccatgcatttgtaataatcttcttcatagtaatacccatcataatcggaggctttggcaactgactagttcccctaataatcggtgcccccgatatggcgtttccccgcataaacaacataagcttctgactcttacctccctctctcctactcctgctcgcatctgctatagtggaggccggagcaggaacaggttgaacagtctaccctcccttagcagggaactactcccaccctggagcctccgtagacctaaccatcttctccttacacctagcaggtgtctcctctatcttaggggccatcaatttcatcacaacaattatcaatataaaaccccctgccataacccaataccaaacgcccctcttcgtctgatcagtcctaatcacagcagtcctacttctcctatctctcccagtcctagctgctggcatcactatactactaacagaccgcaacctcaacactaccttcttcgaccccgccggaggaggagaccccattctataccaacacctattctgatttttcggtcaccctgaagtttatattcttatcctaccaggcttcggaataatctcccatattgtaacttactactccggaaaaaaagaaccatttggatacataggtatggtctgagctatgatatcaattggcttcctagggtttatcgtgtgagcacaccatatatttacagtaggaatagacgtagacacacgagcatatttcacctccgctaccataatcatcgctatccccaccggcgtcaaagtatttagctgactcgccacactccacggaagcaatatgaaatgatctgctgcagtgctctgagccctaggattcatctttcttttcaccgtaggtggcctgactggcattgtattagcaaactcatcactagacatcgtactacacgacacgtactacgttgtagctcacttccactatgtcctatcaataggagctgtatttgccatcataggaggcttcattcactgatttcccctattctcaggctacaccctagaccaaacctacgccaaaatccatttcactatcatattcatcggcgtaaatctaactttcttcccacaacactttctcggcctatccggaatgccccgacgttactcggactaccccgatgcatacaccacatgaaacatcctatcatctgtaggctcattcatttctctaacagcagtaatattaataattttcatgatttgagaagccttcgcttcgaagcgaaaagtcctaatagtagaagaaccctccataaacctggagtgactatatggatgccccccaccctaccacacattcgaagaacccgtatacataaaatctagacaaaaaaggaaggaatcgaaccccccaaagctggtttcaagccaaccccatggcctccatgactttttcaaaaaggtattagaaaaaccatttcataactttgtcaaagttaaattataggctaaatcctatatatcttaatggcacatgcagcgcaagtaggtctacaagacgctacttcccctatcatagaagagcttatcacctttcatgatcacgccctcataatcattttccttatctgcttcctagtcctgtatgcccttttcctaacactcacaacaaaactaactaatactaacatctcagacgctcaggaaatagaaaccgtctgaactatcctgcccgccatcatcctagtcctcatcgccctcccatccctacgcatcctttacataacagacgaggtcaacgatccctcccttaccatcaaatcaattggccaccaatggtactgaacctacgagtacaccgactacggcggactaatcttcaactcctacatacttcccccattattcctagaaccaggcgacctgcgactccttgacgttgacaatcgagtagtactcccgattgaagcccccattcgtataataattacatcacaagacgtcttgcactcatgagctgtccccacattaggcttaaaaacagatgcaattcccggacgtctaaaccaaaccactttcaccgctacacgaccgggggtatactacggtcaatgctctgaaatctgtggagcaaaccacagtttcatgcccatcgtcctagaattaattcccctaaaaatctttgaaatagggcccgtatttaccctatagcaccccctctaccccctctagagcccactgtaaagctaacttagcattaaccttttaagttaaagattaagagaaccaacacctctttacagtgaaatgccccaactaaatactaccgtatggcccaccataattacccccatactccttacactattcctcatcacccaactaaaaatattaaacacaaactaccacctacctccctcaccaaagcccataaaaataaaaaattataacaaaccctgagaaccaaaatgaacgaaaatctgttcgcttcattcattgcccccacaatcctaggcctacccgccgcagtactgatcattctatttccccctctattgatccccacctccaaatatctcatcaacaaccgactaatcaccacccaacaatgactaatcaaactaacctcaaaacaaatgataaccatacacaacactaaaggacgaacctgatctcttatactagtatccttaatcatttttattgccacaactaacctcctcggactcctgcctcactcatttacaccaaccacccaactatctataaacctagccatggccatccccttatgagcgggcgcagtgattataggctttcgctctaagattaaaaatgccctagcccacttcttaccacaaggcacacctacaccccttatccccatactagttattatcgaaaccatcagcctactcattcaaccaatagccctggccgtacgcctaaccgctaacattactgcaggccacctactcatgcacctaattggaagcgccaccctagcaatatcaaccattaaccttccctctacacttatcatcttcacaattctaattctactgactatcctagaaatcgctgtcgccttaatccaagcctacgttttcacacttctagtaagcctctacctgcacgacaacacataatgacccaccaatcacatgcctatcatatagtaaaacccagcccatgacccctaacaggggccctctcagccctcctaatgacctccggcctagccatgtgatttcacttccactccataacgctcctcatactaggcctactaaccaacacactaaccatataccaatgatggcgcgatgtaacacgagaaagcacataccaaggccaccacacaccacctgtccaaaaaggccttcgatacgggataatcctatttattacctcagaagtttttttcttcgcaggatttttctgagccttttaccactccagcctagcccctaccccccaattaggagggcactggcccccaacaggcatcaccccgctaaatcccctagaagtcccactcctaaacacatccgtattactcgcatcaggagtatcaatcacctgagctcaccatagtctaatagaaaacaaccgaaaccaaataattcaagcactgcttattacaattttactgggtctctattttaccctcctacaagcctcagagtacttcgagtctcccttcaccatttccgacggcatctacggctcaacattttttgtagccacaggcttccacggacttcacgtcattattggctcaactttcctcactatctgcttcatccgccaactaatatttcactttacatccaaacatcactttggcttcgaagccgccgcctgatactggcattttgtagatgtggtttgactatttctgtatgtctccatctattgatgagggtcttactcttttagtataaatagtaccgttaacttccaattaactagttttgacaacattcaaaaaagagtaataaacttcgccttaattttaataatcaacaccctcctagccttactactaataattattacattttgactaccacaactcaacggctacatagaaaaatccaccccttacgagtgcggcttcgaccctatatcccccgcccgcgtccctttctccataaaattcttcttagtagctattaccttcttattatttgatctagaaattgccctccttttacccctaccatgagccctacaaacaactaacctgccactaatagttatgtcatccctcttattaatcatcatcctagccctaagtctggcctatgagtgactacaaaaaggattagactgagccgaattggtatatagtttaaacaaaacgaatgatttcgactcattaaattatgataatcatatttaccaaatgcccctcatttacataaatattatactagcatttaccatctcacttctaggaatactagtatatcgctcacacctcatatcctccctactatgcctagaaggaataatactatcgctgttcattatagctactctcataaccctcaacacccactccctcttagccaatattgtgcctattgccatactagtctttgccgcctgcgaagcagcggtgggcctagccctactagtctcaatctccaacacatatggcctagactacgtacataacctaaacctactccaatgctaaaactaatcgtcccaacaattatattactaccactgacatgactttccaaaaaacacataatttgaatcaacacaaccacccacagcctaattattagcatcatccctctactattttttaaccaaatcaacaacaacctatttagctgttccccaaccttttcctccgaccccctaacaacccccctcctaatactaactacctgactcctacccctcacaatcatggcaagccaacgccacttatccagtgaaccactatcacgaaaaaaactctacctctctatactaatctccctacaaatctccttaattataacattcacagccacagaactaatcatattttatatcttcttcgaaaccacacttatccccaccttggctatcatcacccgatgaggcaaccagccagaacgcctgaacgcaggcacatacttcctattctacaccctagtaggctcccttcccctactcatcgcactgatttacactcacaacaccctaggctcactaaacattctactactcactctcactgcccaagaactatcaaactcctgagccaacaacttaatatgactagcttacacaatagcttttatagtaaagatacctctttacggactccacttatgactccctaaagcccatgtcgaagcccccatcgctgggtcaatagtacttgccgcagtactcttaaaactaggcggctatggtataatacgcctcacactcattctcaaccccctgacaaaacacatagcctaccccttccttgtactatccctatgaggcataattataacaagctccatctgcctacgacaaacagacctaaaatcgctcattgcatactcttcaatcagccacatagccctcgtagtaacagccattctcatccaaaccccctgaagcttcaccggcgcagtcattctcataatcgcccacggacttacatcctcattactattctgcctagcaaactcaaactacgaacgcactcacagtcgcatcataatcctctctcaaggacttcaaactctactcccactaatagctttttgatgacttctagcaagcctcgctaacctcgccttaccccccactattaacctactgggagaactctctgtgctagtaaccacgttctcctgatcaaatatcactctcctacttacaggactcaacatactagtcacagccctatactccctctacatatttaccacaacacaatggggctcactcacccaccacattaacaacataaaaccctcattcacacgagaaaacaccctcatgttcatacacctatcccccattctcctcctatccctcaaccccgacatcattaccggattttcctcttgtaaatatagtttaaccaaaacatcagattgtgaatctgacaacagaggcttacgaccccttatttaccgagaaagctcacaagaactgctaactcatgcccccatgtctaacaacatggctttctcaacttttaaaggataacagctatccattggtcttaggccccaaaaattttggtgcaactccaaataaaagtaataaccatgcacactactataaccaccctaaccctgacttccctaattccccccatccttaccaccctcgttaaccctaacaaaaaaaactcatacccccattatgtaaaatccattgtcgcatccacctttattatcagtctcttccccacaacaatattcatgtgcctagaccaagaagttattatctcgaactgacactgagccacaacccaaacaacccagctctccctaagcttcaaactagactacttctccataatattcatccctgtggcattgttcgttacatggtccatcatagaattctcactgtgatatataaactcagacccaaacattaatcagttcttcaaatatctactcatcttcctaattaccatactaatcttagttaccgctaacaacctattccaactgttcatcggctgagagggcgtaggaattatatccttcttgctcatcagttgatgatacgcccgagcagatgccaacacagcagccattcaagcaatcctatacaaccgtatcggcgatatcggtttcatcctcgccttagcatgatttatcctacactccaactcatgagacccacaacaaatagcccttctaaacgctaatccaagcctcaccccactactaggcctcctcctagcagcagcaggcaaatcagcccaattaggtctccacccctgactcccctcagccatagaaggccccaccccagtctcagccctactccactcaagcactatagttgtagcaggaatcttcttactcatccgcttccaccccctagcagaaaatagcccactaatccaaactctaacactatgcttaggcgctatcaccactctgttcgcagcagtctgcgcccttacacaaaatgacatcaaaaaaatcgtagccttctccacttcaagtcaactaggactcataatagttacaatcggcatcaaccaaccacacctagcattcctgcacatctgtacccacgccttcttcaaagccatactatttatgtgctccgggtccatcatccacaaccttaacaatgaacaagatattcgaaaaataggaggactactcaaaaccatacctctcacttcaacctccctcaccattggcagcctagcattagcaggaatacctttcctcacaggtttctactccaaagaccacatcatcgaaaccgcaaacatatcatacacaaacgcctgagccctatctattactctcatcgctacctccctgacaagcgcctatagcactcgaataattcttctcaccctaacaggtcaacctcgcttccccacccttactaacattaacgaaaataaccccgccctactaaaccccattaaacgcctgacagccggaagcctattcgcaggatttctcattactaacaacatttcccccgcatcccccttccaaacaacaatccccctctacctaaaactcacagccctcgctgtcactttcctaggacttctaacagccctagacctcaactacctaaccaacaaacttaaaataaaatccccactatgcacattttatttctccaacatactcggattctaccctagcatcacacaccgcacaatcccctatctaggccttcttacgagccaaaacctgcccctactcctcctagacctaacctgactagaaaagctattacctaaaacaatttcacagcaccaaatctccacctccatcatcacctcaacccaaaaaggcataattaaactttacttcctctctttcttcttcccactcatcctaaccctactcctaatcacataacctattcccccgagcaatctcaattacaatatatacaccaacaaacaatgttcaaccagtaactactactaatcaacgcccataatcatacaaagcccccgcaccaataggatcctcccgaatcaaccctgacccctctccttcataaattattcagcttcctacactattaaagtttaccacaaccaccaccccatcatactctttcacccacagcaccaatcctacctccatcgctaaccccactaaaacactcaccaagacctcaacccctgacccccatgcctcaggatactcctcaatagccatcgctgtagtatatccaaagacaaccatcattccccctaaataaattaaaaaaactattaaacccatataacctcccccaaaattcagaataataacacacccgaccacaccgctaacaatcaatactaaacccccataaataggagaaggcttagaagaaaaccccacaaaccccattactaaacccacactcaacagaaacaaagcatacatcattattctcgcacggactacaaccacgaccaatgatatgaaaaaccatcgttgtatttcaactacaagaacaccaatgaccccaatacgcaaaattaaccccctaataaaattaattaaccactcactcatcgacctccccaccccatccaacatctccgcatgatgaaacttcggctcactccttggcgcctgcctgatcctccaaatcaccacaggactattcctagccatgcactactcaccagacgcctcaaccgccttttcatcaatcgcccacatcactcgagacgtaaattatggctgaatcatccgctaccttcacgccaatggcgcctcaatattctttatctgcctcttcctacacatcgggcgaggcctatattacggatcatttctctactcagaaacctgaaacatcggcattatcctcctgcttgcaactatagcaacagccttcataggctatgtcctcccgtgaggccaaatatcattctgaggggccacagtaattacaaacttactatccgccatcccatacattgggacagacctagttcaatgaatctgaggaggctactcagtagacagtcccaccctcacacgattctttacctttcacttcatcttgcccttcattattgcagccctagcagcactccacctcctattcttgcacgaaacgggatcaaacaaccccctaggaatcacctcccattccgataaaatcaccttccacccttactacacaatcaaagacgccctcggcttacttctcttcattctctccttaatgacattaacactattctcaccagacctcctaggcgacccagacaattataccctagccaaccccttaaacacccctccccacatcaagcccgaatgatatttcctattcgcctacacaattctccgatccgtccctaacaaactaggaggcgtccttgccctattactatccatcctcatcctagcaataatccccatcctccatatatccaaacaacaaagcataatatttcgcccactaagccaatcactttattgactcctagccgcagacctcctcattctaacctgaatcggaggacaaccagtaagctacccttttaccatcattggacaagtagcatccgtactatacttcacaacaatcctaatcctaataccaactatctccctaattgaaaacaaaatactcaaatgggcctgtccttgtagtataaactaatacaccagtcttgtaaaccggagatgaaaacctttttccaaggacaaatcagagaaaaagtctttaactccaccattagcacccaaagctaagattctaatttaaactattctctgttctttcatggggaagcagatttgggtaccacccaagtattgacttacccatcaacaaccgctatgtacttcgtacattactgccagccaccatgaatattgcacggtaccataaatacttgaccacctgtagtacataaaaacccaatccacatcaaaaccccctccccatgcttacaagcaagtacagcaatcaaccctcaactatcacacatcaactgcaactccaaagccacctctcacccactaggataccaacaaacctacccacccttaacagtacatagtacataaagccatttaccgtacatagcacattacagtcaaatcccttctcgtccccatggatgacccccctcagataggggtcccttgaccaccatcctccgtgaaatcaatatcccgcacaagagtgctactctcctcgctccgggcccataacacttgggggtagctaaagtgaactgtatccgacatctggttcctacttcagggtcataaagcctaaatagcccacacgttccccttaaataagacatcacgatg

SEQ ID NO: 405 - DNA, 16572 bp, Homo sapiens mitochondrial
  3110: "n" refers to a nucleotide at position 3107 of the Cambridge Reference Sequence (CRS, Anderson et al. 1981 Nature 290:457-465), later determined to be absent from the human mtDNA sequence according to the revised CRS (rCRS, Andrews et al. 1999 Nature Genetics 23:147); "n" therefore represents a single nucleotide deletion at a position corresponding to nucleotide 3107 of SEQ ID NO:1 as provided herein.
gatcacaggtctatcaccctattaaccactcacgggagctctccatgcatttggtattttcgtctggggggtgtgcacgcgatagcattgcgagacgctggagccggagcaccctatgtcgcagtatctgtctttgattcctgcctcatcccattatttatcgcacctacgttcaatattacaggcgaacatacttactaaagtgtgttaattaatcaatgcttgtaggacataataataacaattgaatgtctgcacagccgctttccacacagacatcataacaaaaaatttccaccaaaccccccctcccccgccttctggccacagcacttaaacatatctctgccaaaccccaaaaacaaagaaccctaacaccagcctaaccagatttcaaattttatcttttggcggtatgcacttttaacagtcaccccccaactaacacattattttcccctcccactcccatactactaatctcatcaatacaacccccgcccatcctgcccagcacacacacaccacgctgctaaccccataccccgaaccaaccaaaccccaaagacaccccccacagtttatgtagcttacctcctcaaagcaatacactgaaaatgtttagacgggctcacatcaccccataaacaaataggtttggtcctagcctttctattagctcttagtaagattacacatgcaagcatccccgttccagtgagttcaccctctaaatcaccacgatcaaaagggacaagcatcaagcacgcagcaatgcagctcaaaacgcttagcctagccacacccccacgggaaacagcagtgattaacctttagcaataaacgaaagtttaactaagctatactaaccccagggttggtcaatttcgtgccagccaccgcggtcacacgattaacccaagtcaatagaagccggcgtaaagagtgttttagatcaccccctccccaataaagctaaaactcacctgagttgtaaaaaactccagttgacacaaaatagactacgaaagtggctttaacatatctgaacacacaatagctaagacccaaactgggattagataccccactatgcttagccctaaacctcaacagttaaatcaacaaaactgctcgccagaacactacgagccacagcttaaaactcaaaggacctggcggtgcttcatatccctctagaggagcctgttctgtaatcgataaaccccgatcaacctcaccacctcttgctcagcctatataccgccatcttcagcaaaccctgatgaaggctacaaagtaagcgcaagtacccacgtaaagacgttaggtcaaggtgtagcccatgaggtggcaagaaatgggctacattttctaccccagaaaactacgatagcccttatgaaacttaagggtcgaaggtggatttagcagtaaactgagagtagagtgcttagttgaacagggccctgaagcgcgtacacaccgcccgtcaccctcctcaagtatacttcaaaggacatttaactaaaacccctacgcatttatatagaggagacaagtcgtaacatggtaagtgtactggaaagtgcacttggacgaaccagagtgtagcttaacacaaagcacccaacttacacttaggagatttcaacttaacttgaccgctctgagctaaacctagccccaaacccactccaccttactaccagacaaccttagccaaaccatttacccaaataaagtataggcgatagaaattgaaacctggcgcaatagatatagtaccgcaagggaaagatgaaaaattatagccaagcataatatagcaaggactaacccctataccttctgcataatgaattaactagaaataactttgcaaggagagccaaagctaagacccccgaaaccagacgagctacctaagaacagctaaaagagcacacccgtctatgtagcaaaatagtgggaagatttataggtagaggcgacaaacctaccgagcctggtgatagctggttgtccaagatagaatcttagttcaactttaaatttgcccacagaaccctctaaatccccttgtaaatttaactgttagtccaaagaggaacagctctttggacactaggaaaaaaccttgtagagagagtaaaaaatttaacacccatagtaggcctaaaagcagccaccaattaagaaagcgttcaagctcaacacccactacctaaaaaatcccaaacatataactgaactcctcacacccaattggaccaatctatcaccctatagaagaactaatgttagtataagtaacatgaaaacattctcctccgcataagcctgcgtcagattaaaacactgaactgacaattaacagcccaatatctacaatcaaccaacaagtcattattaccctcactgtcaacccaacacaggcatgctcataaggaaaggttaaaaaaagtaaaaggaactcggcaaatcttaccccgcctgtttaccaaaaacatcacctctagcatcaccagtattagaggcaccgcctgcccagtgacacatgtttaacggccgcggtaccctaaccgtgcaaaggtagcataatcacttgttccttaaatagggacctgtatgaatggctccacgagggttcagctgtctcttacttttaaccagtgaaattgacctgcccgtgaagaggcgggcatgacacagcaagacgagaagaccctatggagctttaatttattaatgcaaacagtacctaacaaacccacaggtcctaaactaccaaacctgcattaaaaatttcggttggggcgacctcggagcagaacccaacctccgagcagtacatgctaagacttcaccagtcaaagcgaactactatactcaattgatccaataacttgaccaacggaacaagttaccctagggataacagcgcaatcctattctagagtccatatcaacaatagggtttacgacctcgatgttggatcaggacatcccgatggtgcagccgctattaaaggttcgtttgttcaacgattaaagtcctacgtgatctgagttcagaccggagtaatccaggtcggtttctatctacnttcaaatttctccctgtacgaaaggacaagagaaataaggcctacttcacaaagcgccttcccccgtaaatgatatcatctcaacttagtattatacccacacccacccaagaacagggtttgttaagatggcagagcccggtaatcgcataaaacttaaaactttacagtcagaggttcaattcctcttcttaacaacatacccatggccaacctcctactcctcattgtacccattctaatcgcaatggcattcctaatgcttaccgaacgaaaaattctaggctatatacaactacgcaaaggccccaacgttgtaggcccctacgggctactacaacccttcgctgacgccataaaactcttcaccaaagagcccctaaaacccgccacatctaccatcaccctctacatcaccgccccgaccttagctctcaccatcgctcttctactatgaacccccctccccatacccaaccccctggtcaacctcaacctaggcctcctatttattctagccacctctagcctagccgtttactcaatcctctgatcagggtgagcatcaaactcaaactacgccctgatcggcgcactgcgagcagtagcccagacaatctcatatgaagtcaccctagccatcattctactatcaacattactaataagtggctcctttaacctctccacccttatcacaacacaagaacacctctgattactcctgccatcatgacccttggccataatatgatttatctccacactagcagagaccaaccgaacccccttcgaccttgccgaaggggagtccgaactagtctcaggcttcaacatcgaatacgccgcaggccccttcgccctattcttcatagccgaatacacaaacattattataataaacaccctcaccactacaatcttcctaggaacaacatatgacgcactctcccctgaactctacacaacatattttgtcaccaagaccctacttctaacctccctgttcttatgaattcgaacagcatacccccgattccgctacgaccaactcatacacctcctatgaaaaaacttcctaccactcaccctagcattacttatatgatatgtctccatacccattacaatctccagcattccccctcaaacctaagaaatatgtctgataaaagagttactttgatagagtaaataataggagcttaaacccccttatttctaggactatgagaatcgaacccatccctgagaatccaaaattctccgtgccacctatcacaccccatcctaaagtaaggtcagctaaataagctatcgggcccataccccgaaaatgttggttatacccttcccgtactaattaatcccctggcccaacccgtcatctactctaccatctttgcaggcacactcatcacagcgctaagctcgcactgattttttacctgagtaggcctagaaataaacatgctagcttttattccagttctaaccaaaaaaataaaccctcgttccacagaagctgccatcaagtatttcctcacgcaagcaaccgcatccataatccttctaatagctatcctcttcaacaatatactctccggacaatgaaccataaccaatactaccaatcaatactcatcattaataatcataatggctatagcaataaaactaggaatagccccctttcacttctgagtcccagaggttacccaaggcacccctctgacatccggcctgcttcttctcacatgacaaaaactagcccccatctcaatcatataccaaatctctccctcactaaacgtaagccttctcctcactctctcaatcttatccatcatagcaggcagttgaggtggattaaaccaaacccagctacgcaaaatcttagcatactcctcaattacccacataggatgaataatagcagttctaccgtacaaccctaacataaccattcttaatttaactatttatattatcctaactactaccgcattcctactactcaacttaaactccagcaccacgaccctactactatctcgcacctgaaacaagctaacatgactaacacccttaattccatccaccctcctctccctaggaggcctgcccccgctaaccggctttttgcccaaatgggccattatcgaagaattcacaaaaaacaatagcctcatcatccccaccatcatagccaccatcaccctccttaacctctacttctacctacgcctaatctactccacctcaatcacactactccccatgtctaacaacgtaaaaataaaatgacagtttgaacacacaaaacccaccccattcctccccacactcatcgcccttaccacgctactcctacctatctccccttttatactaataatcttatagaaatttaggttaaatacagaccaagagccttcaaagccctcagtaagttgcaatacttaatttctgtaacagctaaggactgcaaaaccccactctgcatcaactgaacgcaaatcagccactttaattaagctaagcccttactagaccaatgggacttaaacccacaaacacttagttaacagctaagcaccctaatcaactggcttcaatctacttctcccgccgccgggaaaaaaggcgggagaagccccggcaggtttgaagctgcttcttcgaatttgcaattcaatatgaaaatcacctcggagctggtaaaaagaggcctaacccctgtctttagatttacagtccaatgcttcactcagccattttacctcacccccactgatgttcgccgaccgttgactattctctacaaaccacaaagacattggaacactatacctattattcggcgcatgagctggagtcctaggcacagctctaagcctccttattcgagccgagctgggccagccaggcaaccttttaggtaacgaccacatctacaacgttatcgtcacagcccatgcatttgtaataatcttcttcatagtaatacccatcataatcggaggctttggcaactgactagtccccctaataatcggtgcccccgatatggcgtttccccgcataaacaacataagcttctgactcttacctccctctctcctactcctgctcgcatctgctatagtggaggccggagcaggaacaggttgaacagtctaccctcccttagcagggaactactcccaccctggagcctccgtagacctaaccatcttctccttacacctagcaggtgtctcctctatcttaggggccatcaatttcatcacaacaattatcaatataaaaccccctgccataacccaataccaaacgcccctcttcgtctgatccgtcctaatcacagcagtcctacttctcctatctctcccagtcctagctgctggcatcactatactactaacagaccgcaacctcaacaccaccttcttcgaccccgccggaggaggagaccccattctataccaacacctattctgatttttcggtcaccctgaagtttatattcttatcctaccaggcttcggaataatctcccatattgtaacttactactccggaaaaaaagaaccatttggatacataggtatggtctgagctatgatatcaattggcttcctagggtttatcgtgtgagcacaccatatatttacagtaggaatagacgtagacacacgagcatatttcacctccgctaccataatcatcgctatccccaccggcgtcaaagtatttagctgactcgccacactccacggaagcaatatgaaatgatctgctgcagtgctctgagccctaggattcatctttcttttcaccgtaggtggcctgactggcattgtattagcaaactcatcactagacatcgtactacacgacacgtactacgttgtagctcacttccactatgtcctatcaataggagctgtatttgccatcataggaggcctcattcactgatttcccctattctcaggctacaccctagaccaaacctacgccaaaatccatttcactatcatattcatcggcgtaaatctaactttcttcccacaacactttctcggcctatccggaatgccccgacgttactcggactaccccgatgcatacaccacatgaaacatcctatcatctgtaggctcattcatttctctaacagcagtaatattaataattttcatgatttgagaagccttcgcttcgaagcgaaaagtcctaatagtagaagaaccctccataaacctggagtgactatatggatgccccccaccctaccacacattcgaagaacccgtatacataaaatctagacaaaaaaggaaggaatcgaaccccccaaagctggtttcaagccaaccccatggcctccatgactttttcaaaaaggtattagaaaaaccatttcataactttgtcaaagttaaattataggctaaatcctatatatcttaatggcacatgcagcgcaagtaggtctacaagacgctacttcccctatcatagaagagcttatcacctttcatgatcacgccctcataatcattttccttatctgcttcctagtcctgtatgcccttttcctaacactcacaacaaaactaactaatactaacatctcagacgctcaggaaatagaaaccgtctgaactatcctgcccgccatcatcctagtcctcatcgccctcccatccctacgcatcctttacataacagacgaggtcaacgatccctcccttaccatcaaatcaattggccaccaatggtactgaacctacgagtacaccgactacggcggactaatcttcaactcctacatacttcccccattattcctagaaccaggcgacctgcgactccttgacgttgacaatcgagtagtactcccgattgaagcccccattcgtataataattacatcacaagacgtcttgcactcatgagctgtccccacattaggcttaaaaacagatgcaattcccggacgtctaaaccaaaccactttcaccgctacacgaccgggggtatactacggtcaatgctctgaaatctgtggagcaaaccacagtttcatgcccatcgtcctagaattaattcccctaaaaatctttgaaatagggcccgtatttaccctatagcaccccctctaccccctctagagcccactgtaaagctaacttagcattaaccttttaagttaaagattaagagaaccaacacctctttacagtgaaatgccccaactaaatactaccgtatggcccaccataattacccccatactccttacactattcctcatcacccaactaaaaatattaaacacaaactaccacctacctccctcaccaaagcccataaaaataaaaaattataacaaaccctgagaaccaaaatgaacgaaaatctgttcgcttcattcattgcccccacaatcctaggcctacccgccgcagtactgatcattctatttccccctctattgatccccacctccaaatatctcatcaacaaccgactaatcaccacccaacaatgactaatcaaactaacctcaaaacaaatgataaccatacacaacactaaaggacgaacctgatctcttatactagtatccttaatcatttttattgccacaactaacctcctcggactcctgcctcactcatttacaccaaccacccaactatctataaacctagccatggccatccccttatgagcgggcgcagtgattataggctttcgctctaagattaaaaatgccctagcccacttcttaccacaaggcacacctacaccccttatccccatactagttattatcgaaaccatcagcctactcattcaaccaatagccctggccgtacgcctaaccgctaacattactgcaggccacctactcatgcacctaattggaagcgccaccctagcaatatcaaccattaaccttccctctacacttatcatcttcacaattctaattctactgactatcctagaaatcgctgtcgccttaatccaagcctacgttttcacacttctagtaagcctctacctgcacgacaacacataatgacccaccaatcacatgcctatcatatagtaaaacccagcccatgacccctaacaggggccctctcagccctcctaatgacctccggcctagccatgtgatttcacttccactccataacgctcctcatactaggcctactaaccaacacactaaccatataccaatgatggcgcgatgtaacacgagaaagcacataccaaggccaccacacaccacctgtccaaaaaggccttcgatacgggataatcctatttattacctcagaagtttttttcttcgcaggatttttctgagccttttaccactccagcctagcccctaccccccaattaggagggcactggcccccaacaggcatcaccccgctaaatcccctagaagtcccactcctaaacacatccgtattactcgcatcaggagtatcaatcacctgagctcaccatagtctaatagaaaacaaccgaaaccaaataattcaagcactgcttattacaattttactgggtctctattttaccctcctacaagcctcagagtacttcgagtctcccttcaccatttccgacggcatctacggctcaacattttttgtagccacaggcttccacggacttcacgtcattattggctcaactttcctcactatctgcttcatccgccaactaatatttcactttacatccaaacatcactttggcttcgaagccgccgcctgatactggcattttgtagatgtggtttgactatttctgtatgtctccatctattgatgagggtcttactcttttagtataaatagtaccgttaacttccaattaactagttttgacaacattcaaaaaagagtaataaacttcgccttaattttaataatcaacaccctcctagccttactactaataattattacattttgactaccacaactcaacggctacatagaaaaatccaccccttacgagtgcggcttcgaccctatatcccccgcccgcgtccctttctccataaaattcttcttagtagctattaccttcttattatttgatctagaaattgccctccttttacccctaccatgagccctacaaacaactaacctgccactaatagttatgtcatccctcttattaatcatcatcctagccctaagtctggcctatgagtgactacaaaaaggattagactgaaccgaattggtatatagtttaaacaaaacgaatgatttcgactcattaaattatgataatcatatttaccaaatgcccctcatttacataaatattatactagcatttaccatctcacttctaggaatactagtatatcgctcacacctcatatcctccctactatgcctagaaggaataatactatcgctgttcattatagctactctcataaccctcaacacccactccctcttagccaatattgtgcctattgccatactagtctttgccgcctgcgaagcagcggtgggcctagccctactagtctcaatctccaacacatatggcctagactacgtacataacctaaacctactccaatgctaaaactaatcgtcccaacaattatattactaccactgacatgactttccaaaaaacacataatttgaatcaacacaaccacccacagcctaattattagcatcatccctctgctattttttaaccaaatcaacaacaacctatttagctgttccccaaccttttcctccgaccccctaacaacccccctcctaatactaactacctgactcctacccctcacaatcatggcaagccaacgccacttatccagtgaaccactatcacgaaaaaaactctacctctctatactaatctccctacaaatctccttaattataacattcacagccacagaactaatcatattttatatcttcttcgaaaccacacttatccccaccttggctatcatcacccgatgaggcaaccagccagaacgcctgaacgcaggtacatacttcctattctacaccctagtaggctcccttcccctactcatcgcactaatttacactcacaacaccctaggctcactaaacattctactactcactctcactgcccaagaactatcaaactcctgagccaacaacttaatatgactagcttacacaatagcttttatagtaaagatacctctttacggactccacttatgactccctaaagcccatgtcgaagcccccatcgctgggtcaatagtacttgccgcagtactcttgaaactaggcggctatggtataatacgcctcacactcattctcaaccccctgacaaaacacatagcctaccccttccttgtactatccctatgaggcataattataacaagctccatctgcctacgacaaacagacctaaaatcgctcattgcatactcttcaatcagccacatagccctcgtagtaacagccattctcatccaaaccccctgaagcttcaccggcgcagtcattctcataatcgcccacggacttacatcctcactactattctgcctagcaaactcaaactacgaacgcactcacagtcgcatcataatcctctctcaaggacttcaaactctactcccactaatagctttttgatgacttctagcaagcctcgctaacctcgccttaccccccactattaacctactgggagaactctctgtgctagtaaccacgttctcctgatcaaatatcactctcctacttacaggactcaacatactagtcacagccctatactccctctacatatttaccacaacacaatggggctcactcacccaccacattaacaacataaaaccctcattcacacgagaaaacaccctcatgttcatacacctatcccccattctcctcctatccctcaaccccgacatcattaccgggttttcctcttgtaaatatagtttaaccaaaacatcagattgtgaatctgacaacagaggcttacgaccccttatttaccgagaaagctcacaagaactgctaactcatgcccccatgtctaacaacatggctttctcaacttttaaaggataacagctatccattggtcttaggccccaagaattttggtgcaactccaaataaaagtaataaccatgcacactactataaccaccctaaccctaacttccctaattccccccatccttaccaccctcgttaaccctaacaaaaaaaactcatacccccattatgtaaaatccattgtcgcatccacctttattatcagtctcttccccacaacaatattcatgtgcctagaccaagaagttattatctcgaactgacactgagccacaacccaaacaacccagctctccctaagcttcaaactagactacttctccataatattcatccctgtagcattgttcgttacatggtccatcatagaattctcactgtgatatataaactcagacccaaacattaatcagttcttcaaatatctactcatcttcctaattaccatactaatcttagttaccgctaacaacctattccaactgttcatcggctgagagggcgtaggaattatatccttcttgctcatcagttgatgatacgcccgagcagatgccaacacagcagccattcaagcaatcctatacaaccgtatcggcgatatcggtttcatcctcgccttagcatgatttatcctacactccaactcatgagacccacaacaaatagcccttctaaacgctaatccaagcctcaccccactactaggcctcctcctagcagcagcaggcaaatcagcccaattaggcctccacccctgactcccctcagccatagaaggccccaccccagtctcagccctactccactcaagcactatagttgtagcaggaatcttcttactcatccgcttccaccccctagcagaaaatagcccactaatccaaactctaacactatgcttaggcgctatcaccactctgttcgcagcagtctgcgcccttacacaaaatgacatcaaaaaaatcgtagccttctccacttcaagtcaactaggactcataatagttacaatcggcatcaaccaaccacacctagcattcctgcacatctgtacccacgccttcttcaaagccatactatttatgtgctccgggtccatcatccacaaccttaacaatgaacaagatattcgaaaaataggaggactactcaaaaccatacctctcacttcaacctccctcaccattggcagcctagcattagcaggaatacctttcctcacaggtttctactccaaagaccacatcatcgaaaccgcaaacatatcatacacaaacgcctgagccctatctattactctcatcgctacctccctgacaagcgcctatagcactcgaataattcttctcaccctaacaggtcaacctcgcttccccacccttactaacattaacgaaaataaccccaccctactaaaccccattaaacgcctggcagccggaagcctattcgcaggattcctcattactaacaacatttcccccgcatcccccttccaaacaacaatccccctctacctaaaactcacagccctcgctgtcactttcctaggacttctaacagccctagacctcaactacctaaccaacaaacttaaaataaaatccccactatgcacattttatttctccaacatactcggattctaccctagcatcacacaccgcacaatcccctatctagcccttcttacgagccaaaacctgcccctactcctcctagacctaacctgactagaaaagctattacctaaaacaatttcacagcaccaaatctccacctccatcatcacctcaacccaaaaaggcataattaaactttacttcctctctttcttcttcccactcatcctaaccctactcctaatcacataacctattcccccgagcaatctcaattacaatatatacaccaacaaacaatgttcaaccagtaactactactaatcaacgcccataatcatacaaagcccccgcaccaataggatcctcccgaatcaaccctgacccctctccttcataaattattcagcttcctacactattaaagtttaccacaaccaccaccccatcatactctttcacccacagcaccaatcctacctccatcgctaaccccactaaaacactcaccaagacctcaacccctgacccccatgcctcaggatactcctcaatagccatcgctgtagtatatccaaagacaaccatcattccccctaaataaattaaaaaaactattaaacccatataacctcccccaaaattcagaataataacacacccgaccacaccgctaacaatcaatactaaacccccataaataggagaaggcttagaagaaaaccccacaaaccccattactaaacccacactcaacagaaacaaagcatacatcattattctcgcacggactacaaccacgaccaatgatatgaaaaaccatcgttgtatttcaactacaagaacaccaatgaccccaatacgcaaaattaaccccctaataaaattaattaaccactcattcatcgacctccccaccccatccaacatctccgcatgatgaaacttcggctcactccttggcgcctgcctgatcctccaaatcaccacaggactattcctagccatgcactactcaccagacgcctcaaccgccttttcatcaatcgcccacatcactcgagacgtaaattatggctgaatcatccgctaccttcacgccaatggcgcctcaatattctttatctgcctcttcctacacatcgggcgaggcctatattacggatcatttctctactcagaaacctgaaacatcggcattatcctcctgcttgcaactatagcaacagccttcataggctatgtcctcccgtgaggccaaatatcattctgaggggccacagtaattacaaacttactatccgccatcccatacattgggacagacctagttcaatgaatctgaggaggctactcagtagacagtcccaccctcacacgattctttacctttcacttcatcttgcccttcattattgcagccctagcagcactccacctcctattcttgcacgaaacgggatcaaacaaccccctaggaatcacctcccattccgataaaatcaccttccacccttactacacaatcaaagacgccctcggcttacttctcttccttctctccttaatgacattaacactattctcaccagacctcctaggcgacccagacaattataccctagccaaccccttaaacacccctccccacatcaagcccgaatgatatttcctattcgcctacacaattctccgatccgtccctaacaaactaggaggcgtccttgccctattactatccatcctcatcctagcaataatccccatcctccatatatccaaacaacaaagcataatatttcgcccactaagccaatcactttattgactcctagccgcagacctcctcattctaacctgaatcggaggacaaccagtaagctacccttttaccatcattggacaagtagcatccgtactatacttcacaacaatcctaatcctaataccaactatctccctaattgaaaacaaaatactcaaatgggcctgtccttgtagtataaactagtacaccagtcttgtaaaccggagatgaaaacctttttccaaggacaaatcagagaaaaagtctttaactccaccattagcacccaaagctaagattctaatttaaactattctctgttctttcatggggaagcagatttgggtgccacccaagtattgactcacccatcaacaaccgctatgtatttcgtacattactgccagccaccatgaatattgtaccgtaccataaatacttgaccacctgtagtacataaaaacccaatccacatcaaacccccccccccatgcttacaagcaagtacagcaatcaaccctcaactatcacacatcaactgcaactccaaagccacccctcacccactaggataccaacaaacctacccacccttaacagtacatagtacataaagccatttaccgtacatagcacattacagtcaaatcccttctcgcccccatggatgacccccctcagataggggtcccttgaccaccatcctccgtgaaatcaatatcccgcacaagagtgctactctcctcgctccgggcccataacacttgggggtagctaaagtgaactgtatccgacatctggttcctacttcagggtcataaagcctaaatagcccacacgttccccttaaataagacatcacgatg

SEQ ID NO: 406 - DNA, 16570 bp, Homo sapiens mitochondrial
  3108: "n" refers to a nucleotide at position 3107 of the Cambridge Reference Sequence (CRS, Anderson et al. 1981 Nature 290:457-465), later determined to be absent from the human mtDNA sequence according to the revised CRS (rCRS, Andrews et al. 1999 Nature Genetics 23:147); "n" therefore represents a single nucleotide deletion at a position corresponding to nucleotide 3107 of SEQ ID NO:1 as provided herein.
gatcacaggtctatcaccctattaaccactcacgggagctctccatgcatttggtattttcgtctggggggtatgcacgcgatagcattgcgagacgctggagccggagcaccctatgtcgcagtatctgtctttgattcctgcctcatcctattatttatcgcacctacgttcaatattacaggcgaacatacttactaaagtgtgttaattaattaatgcttgtaggacataataataacaattgaatgtctgcacagccgctttccacacagacatcataacaaaaaatttccaccaaaccccccctcccccgccttctggccacagcacttaaacacatctctgccaaaccccaaaaacaaagaaccctaacaccagcctaaccagatttcaaattttatcttttggcggtatgcacttttaacagtcaccccccaactaacacattattttcccctcccactcccatactactaatctcatcaatacaacccccgcccatcctacccagcacacacacaccgctgctaaccccataccccgaaccaaccaaaccccaaagacaccccccacagtttatgtagcttacctcctcaaagcaatacactgaaaatgtttagacgggctcacatcaccccataaacaaataggtttggtcctagcctttctattagctcttagtaagattacacatgcaagcatccccgttccagtgagttcaccctctaaatcaccacgatcaaaagggacaagcatcaagcacgcagcaatgcagctcaaaacgcttagcctagccacacccccacgggaaacagcagtgattaacctttagcaataaacgaaagtttaactaagctatactaaccccagggttggtcaatttcgtgccagccaccgcggtcacacgattaacccaagtcaatagaagccggcgtaaagagtgttttagatcaccccctccccaataaagctaaaactcacctgagttgtaaaaaactccagttgacacaaaatagactacgaaagtggctttaacatatctgaacacacaatagctaagacccaaactgggattagataccccactatgcttagccctaaacctcaacagttaaatcaacaaaactgctcgccagaacactacgagccacagcttaaaactcaaaggacctggcggtgcttcatatccctctagaggagcctgttctgtaatcgataaaccccgatcaacctcaccacctcttgctcagcctatataccgccatcttcagcaaaccctgatgaaggctacaaagtaagcgcaagtacccacgtaaagacgttaggtcaaggtgtagcccatgaggtggcaagaaatgggctacattttctaccccagaaaactacgatagcccttatgaaacttaagggtcgaaggtggatttagcagtaaactaagagtagagtgcttagttgaacagggccctgaagcgcgtacacaccgcccgtcaccctcctcaagtatacttcaaaggacatttaactaaaacccctacgcatttatatagaggagacaagtcgtaacatggtaagtgtactggaaagtgcacttggacgaaccagagtgtagcttaacacaaagcacccaacttacacttaggagatttcaacttaacttgaccgctctgagctaaacctagccccaaacccactccaccttactaccagacaaccttagccaaaccatttacccaaataaagtataggcgatagaaattgaaacctggcgcaatagatatagtaccgcaagggaaagatgaaaaattataaccaagcataatatagcaaggactaacccctataccttctgcataatgaattaactagaaataactttgcaaggagagccaaagctaagacccccgaaaccagacgagctacctaagaacagctaaaagagcacacccgtctatgtagcaaaatagtgggaagatttataggtagaggcgacaaacctaccgagcctggtgatagctggttgtccaagatagaatcttagttcaactttaaatttgcccacagaaccctctaaatccccttgtaaatttaactgttagtccaaagaggaacagctctttggacactaggaaaaaaccttgtagagagagtaaaaaatttaacacccatagtaggcctaaaagcagccaccaattaagaaagcgttcaagctcaacacccactacctaaaaaatcccaaacatataactgaactcctcacacccaattggaccaatctatcaccctatagaagaactaatgttagtataagtaacatgaaaacattctcctccgcataagcctgcgtcagattaaaacactgaactgacaattaacagcccaatatctacaatcaaccaacaagtcattattaccctcactgtcaacccaacacaggcatgctcataaggaaaggttaaaaaaagtaaaaggaactcggcaaatcttaccccgcctgtttaccaaaaacatcacctctagcatcaccagtattagaggcaccgcctgcccagtgacacatgtttaacggccgcggtaccctaaccgtgcaaaggtagcataatcacttgttccttaaatagggacctgtatgaatggctccacgagggttcagctgtctcttacttttaaccagtgaaattgacctgcccgtgaagaggcgggcataacacagcaagacgagaagaccctatggagctttaatttattaatgcaaacagtacctaacaaacccacaggtcctaaactaccaaacctgcattaaaaatttcggttggggcgacctcggagcagaacccaacctccgagcagtacatgctaagacttcaccagtcaaagcgaactactatactcaattgatccaataacttgaccaacggaacaagttaccctagggataacagcgcaatcctattctagagtccatatcaacaatagggtttacgacctcgatgttggatcaggacatcccgatggtgcagccgctattaaaggttcgtttgttcaacgattaaagtcctacgtgatctgagttcagaccggagtaatccaggtcggtttctatctacnttcaaattcctccctgtacgaaaggacaagagaaataaggcctacttcacaaagcgccttcccccgtaaatgatatcatctcaacttagtattatacccacacccacccaagaacagggtttgttaagatggcagagcccggtaatcgcataaaacttaaaactttacagtcagaggttcaattcctcttcttaacaacatacccatggccaacctcctactcctcattgtacccattctaatcgcaatggcattcctaatgcttaccgaacgaaaaattctaggctatatacaactacgcaaaggccccaacgttgtaggcccctacggactactacaacccttcgctgacgccataaaactcttcaccaaagagcccctaaaacccgccacatctaccatcaccctctacatcaccgccccgaccttagctctcaccatcgctcttctactatgaacccccctccccatacccaaccccctggtcaacctcaacctaggcctcctatttattctagccacctctagcctagccgtttactcaatcctctgatcagggtgagcatcaaactcaaactacgccctgatcggcgcactgcgagcagtagcccaaacaatctcatatgaagtcaccctagccatcattctactatcaacattactaataagtggctcctttaacctctccacccttatcacaacacaagaacacctctgattactcctgccatcatgacccttggccataatatgatttatctccacactagcagagaccaaccgaacccccttcgaccttgccgaaggggagtccgaactagtctcaggcttcaacatcgaatacgccgcaggccccttcgccctattcttcatagccgaatacacaaacattattataataaacaccctcaccactacaatcttcctaggaacaacatatgacgcactctcccctgaactctacacaacatattttgtcaccaagaccctacttctaacctccctgttcttatgaattcgaacagcatacccccgattccgctacgaccaactcatacacctcctatgaaaaaacttcctaccactcaccctagcattacttatatgatatgtctccatacccattacaatctccagcattccccctcaaacctaagaaatatgtctgataaaagagttactttgatagagtaaataataggagcttaaacccccttatttctaggactatgagaatcgaacccatccctgagaatccaaaattctccgtgccacctatcacaccccatcctaaagtaaggtcagctaaataagctatcgggcccataccccgaaaatgttggttatacccttcccgtactaattaatcccctggcccaacccgtcatctactctaccatctttgcaggcacactcatcacagcgctaagctcgcactgattttttacctgagtaggcctagaaataaacatgctagcttttattccagttctaaccaaaaaaataaaccctcgttccacagaagctgccatcaagtatttcctcacgcaagcaaccgcatccataatccttctaatagctatcctcttcaacaatatactctccggacaatgaaccataaccaatactaccaatcaatactcatcattaataatcataatagctatagcaataaaactaggaatagccccctttcacttctgagtcccagaggttacccaaggcacccctctgacatccggcctgcttcttctcacatgacaaaaactagcccccatctcaatcatataccaaatctctccctcactaaacgtaagccttctcctcactctctcaatcttatccatcatagcaggcagttgaggtggattaaaccaaacccagctacgcaaaatcttagcatactcctcaattacccacataggatgaataatagcagttctaccgtacaaccctaacataaccattcttaatttaactatttatattatcctaactactaccgcattcctactactcaacttaaactccagcaccacgaccctactactatctcgcacctgaaacaagctaacatgactaacacccttaattccatccaccctcctctccctaggaggcctgcccccgctaaccggctttttgcccaaatgggccattatcgaagaattcacaaaaaacaatagcctcatcatccccaccatcatagccaccatcaccctccttaacctctacttctacctacgcctaatctactccacctcaatcacactactccccatatctaacaacgtaaaaataaaatgacagtttgaacatacaaaacccaccccattcctccccacactcatcgcccttaccacgctactcctacctatctccccttttatactaataatcttatagaaatttaggttaaatacagaccaagagccttcaaagccctcagtaagttgcaatacttaatttctgtaacagctaaggactgcaaaaccccactctgcatcaactgaacgcaaatcagccactttaattaagctaagcccttactagaccaatgggacttaaacccacaaacacttagttaacagctaagcaccctaatcaactggcttcaatctacttctcccgccgccgggaaaaaaggcgggagaagccccggcaggtttgaagctgcttcttcgaatttgcaattcaatatgaaaatcacctcggagctggtaaaaagaggcctaacccctgtctttagatttacagtccaatgcttcactcagccattttacctcacccccactgatgttcgccgaccgttgactattctctacaaaccacaaagacattggaacactatacctattattcggcgcatgagctggagtcctaggcacagctctaagcctccttattcgagccgagctgggccagccaggcaaccttctaggtaacgaccacatctacaacgttatcgtcacagcccatgcatttgtaataatcttcttcatagtaatacccatcataatcggaggctttggcaactgactagttcccctaataatcggtgcccccgatatggcgtttccccgcataaacaacataagcttctgactcttacctccctctctcctactcctgctcgcatctgctatagtggaggccggagcaggaacaggttgaacagtctaccctcccttagcagggaactactcccaccctggagcctccgtagacctaaccatcttctccttacacctagcaggtgtctcctctatcttaggggccatcaatttcatcacaacaattatcaatataaaaccccctgccataacccaataccaaacgcccctcttcgtctgatccgtcctaatcacagcagtcctacttctcctatctctcccagtcctagctgctggcatcactatactactaacagaccgcaacctcaacaccaccttcttcgaccccgccggaggaggagaccccattctataccaacacctattctgatttttcggtcaccctgaagtttatattcttatcctaccaggcttcggaataatctcccatattgtaacttactactccggaaaaaaagaaccatttggatacataggtatggtctgagctatgatatcaattggcttcctagggtttatcgtgtgagcacaccatatatttacagtaggaatagacgtagacacacgagcatatttcacctccgctaccataatcatcgctatccccaccggcgtcaaagtatttagctgactcgccacactccacggaagcaatatgaaatgatctgctgcagtgctctgagccctaggattcatctttcttttcaccgtaggtggcctgactggcattgtattagcaaactcatcactagacatcgtactacacgacacgtactacgttgtagcccacttccactatgtcctatcaataggagctgtatttgccatcataggaggcttcattcactgatttcccctattctcaggctacaccctagaccaaacctacgccaaaatccatttcactatcatattcatcggcgtaaatctaactttcttcccacaacactttctcggcctatccggaatgccccgacgttactcggactaccccgatgcatacaccacatgaaacatcctatcatctgtaggctcattcatttctctaacagcagtaatattaataattttcatgatttgagaagccttcgcttcgaagcgaaaagtcctaatagtagaagaaccctccataaacctggagtgactatatggatgccccccaccctaccacacattcgaagaacccgtatacataaaatctagacaaaaaaggaaggaatcgaaccccccaaagctggtttcaagccaaccccatggcctccatgactttttcaaaaaggtattagaaaaaccatttcataactttgtcaaagttaaattataggctaaatcctatatatcttaatggcacatgcagcgcaagtaggtctacaagacgctacttcccctatcatagaagagcttatcacctttcatgatcacgccctcataatcattttccttatctgcttcctagtcctgtatgcccttttcctaacactcacaacaaaactaactaatactaacatctcagacgctcaggaaatagaaaccgtctgaactatcctgcccgccatcatcctagtcctcatcgccctcccatccctacgcatcctttacataacagacgaggtcaacgatccctcccttaccatcaaatcaattggccaccaatggtactgaacctacgagtacaccgactacggcggactaatcttcaactcctacatacttcccccattattcctagaaccaggcgacctgcgactccttgacgttgacaatcgagtagtactcccgattgaagcccccattcgtataataattacatcacaagacgtcttgcactcatgagctgtccccacattaggcttaaaaacagatgcaattcccggacgtctaaaccaaaccactttcaccgctacacgaccgggggtatactacggtcaatgctctgaaatctgtggagcaaaccacagtttcatgcccatcgtcctagaattaattcccctaaaaatctttgaaatagggcccgtatttaccctatagcaccccctctaccccctctagagcccactgtaaagctaacttagcattaaccttttaagttaaagattaagagaaccaacacctctttacagtgaaatgccccaactaaatactaccgtatggcccaccataattacccccatactccttacactattcctcatcacccaactaaaaatattaaacacaaactaccacctacctccctcaccaaagcccataaaaataaaaaattataacaaaccctgagaaccaaaatgaacgaaaatctgttcgcttcattcattgcccccacaatcctaggcctacccgccgcagtactgatcattctatttccccctctattgatccccacctccaaatatctcatcaacaaccgactaatcaccacccaacaatgactaatcaaactaacctcaaaacaaatgataaccatacacaacactaaaggacgaacctgatctcttatactagtatccttaatcatttttattgccacaactaacctcctcggactcctgcctcactcatttacaccaaccacccaactatctataaacctagccatggccatccccttatgagcgggcgcagtgattataggctttcgctctaagattaaaaatgccctagcccacttcttaccacaaggcacacctacaccccttatccccatactagttattatcgaaaccatcagcctactcattcaaccaatagccctggccgtacgcctaaccgctaacattactgcaggccacctactcatgcacctaattggaagcgccaccctagcaatatcaaccattaaccttccctctacacttatcatcttcacaattctaattctactgactatcctagaaatcgctgtcgccttaatccaagcctacgttttcacacttctagtaagcctctacctgcacgacaacacataatgacccaccaatcacatgcctatcatatagtaaaacccagcccatgacccctaacaggggccctctcagccctcctaatgacctccggcctagccatgtgatttcacttccactccataacgctcctcatactaggcctactaaccaacacactaaccatataccaatgatggcgcgatgtaacacgagaaagcacataccaaggccaccacacaccacctgtccaaaaaggccttcgatacgggataatcctatttattacctcagaagtttttttcttcgcaggatttttctgagccttttaccactccagcctagcccctaccccccaattaggagggcactggcccccaacaggcatcaccccgctaaatcccctagaagtcccactcctaaacacatccgtattactcgcatcaggagtatcaatcacctgagctcaccatagtctaatagaaaacaaccgaaaccaaataattcaagcactgcttattacaattttactgggtctctattttaccctcctacaagcctcagagtacttcgagtctcccttcaccatttccgacggcatctacggctcaacattttttgtagccacaggcttccacggacttcacgtcattattggctcaactttcctcactatctgcttcatccgccaactaatatttcactttacatccaaacatcactttggcttcgaagccgccgcctgatactggcattttgtagatgtggtttgactatttctgtatgtctccatctattgatgagggtcttactcttttagtataaatagtaccgttaacttccaattaactagttttgacaacattcaaaaaagagtaataaacttcgccttaattttaataatcaacaccctcctagccttactactaataattattacattttgactaccacaactcaacggctacatagaaaaatccaccccttacgagtgcggcttcgaccctatatcccccgcccgcgtccctttctccataaaattcttcttagtagctattaccttcttattatttgatctagaaattgccctccttttacccctaccatgagccctacaaacaactaacctgccactaatagttatgtcatccctcttattaatcatcatcctagccctaagtctggcctatgagtgactacaaaaaggattagactgaaccgaattggtatatagtttaaacaaaacgaatgatttcgactcattaaattatgataatcatatttaccaaatgcccctcatttacataaatattatactagcatttaccatctcacttctaggaatactagtatatcgctcacacctcatatcctccctactatgcctagaaggaataatactatcgctgttcattatagctactctcataaccctcaacacccactccctcttagccaatattgtgcctattgccatactagtctttgccgcctgcgaagcagcggtgggcctagccctactagtctcaatctccaacacatatggcctagactacgtacataacctaaacctactccaatgctaaaactaatcgtcccaacaattatattactaccactgacatgactctccaaaaaacacataatttgaatcaacacaaccacccacagcctaattattagcatcatccctctactattttttaaccaaatcaacagcaacctatttagctgttccccaaccttttcctccgaccccctaacaacccccctcctaatactaactacctgactcctacccctcacaatcatggcaagccaacgccacttatccagtgaaccactatcacgaaaaaaactctacctctctatactaatctccctacaaatctccttaattataacattcacagccacagaactaatcatattttatatcttcttcgaaaccacacttatccccaccttggctatcatcacccgatgaggcaaccagccagaacgcctgaacgcaggcacatacttcctattctacaccctagtaggctcccttcccctactcatcgcactaatttacactcacaacaccctaggctcactaaacattctactactcactctcactgcccaagaactatcaaactcctgagccaacaacttaatatgactagcttacacaatagcttttatagtaaagatacctctttacggactccacttatgactccctaaagcccatgtcgaagcccccatcgctgggtcaatagtacttgccgcagtactcttaaaactaggcggctatggtataatacgcctcacactcattctcaaccccctgacaaaacacatagcctaccccttccttgtactatccctatgaggcataattataacaagctccatctgcctacgacaaacagacctaaaatcgctcattgcatactcttcaatcagccacatagccctcgtagtaacagccattctcatccaaaccccctgaagcttcaccggcgcagtcattctcataatcgcccacgggcttacatcctcattactattctgcctagcaaactcaaactacgaacgcactcacagtcgcatcataatcctctctcaaggacttcaaactctactcccactaatagctttttgatgacttctagcaagcctcgctaacctcgccttaccccccactattaacctactgggagaactctctgtgctagtaaccacgttctcctgatcaaatatcactctcctacttacaggactcaacatactagtcacagccctatactccctctacatatttaccacaacacaatggggctcactcacccaccacattaacaacataaaaccctcattcacacgagaaaacaccctcatgttcatacacctatcccccattctcctcctatccctcaaccccgacatcattaccgggttttcctcttgtaaatatagtttaaccaaaacatcagattgtgaatctgacaacagaggcttacgaccccttatttaccgagaaagctcacaagaactgctaactcatgcccccatgtctaacaacatggctttctcaacttttaaaggataacagctatccattggtcttaggccccaaaaattttggtgcaactccaaataaaagtaataaccatgcacactactataaccaccctaaccctgacttccctaattccccccatccttaccaccctcgttaaccctaacaaaaaaaactcatacccccattatgtaaaatccattgtcgcatccacctttattatcagtctcttccccacaacaatattcatgtgcctagaccaagaagttattatctcgaactgacactgagccacaacccaaacaacccagctctccctaagcttcaaactagactacttctccataatattcatccctgtagcattgttcgttacatggtccatcatagaattctcactgtgatatataaactcagacccaaacattaatcagttcttcaaatatctactcatcttcctaattaccatactaatcttagttaccgctaacaacctattccaactgttcatcggctgagagggcgtaggaattatatccttcttgctcatcagttgatgatacgcccgagcagatgccaacacagcagccattcaagcaatcctatacaaccgtatcggcgatatcggtttcatcctcgccttagcatgatttatcctacactccaactcatgagacccacaacaaatagcccttctaaacgctaatccaagcctcaccccactactaggcctcctcctagcagcagcaggcaaatcagcccaattaggtctccacccctgactcccctcagccatagaaggccccaccccagtctcagccctactccactcaagcactatagttgtagcaggaatcttcttactcatccgcttccaccccctagcagaaaatagcccactaatccaaactctaacactatgcttaggcgctatcaccactctgttcgcagcagtctgcgcccttacacaaaatgacatcaaaaaaatcgtagccttctccacttcaagtcaactaggactcataatagttacaatcggcatcaaccaaccacacctagcattcctgcacatctgtacccacgccttcttcaaagccatactatttatgtgctccgggtccatcatccacaaccttaacaatgaacaagatattcgaaaaataggaggactactcaaaaccatacctctcacttcaacctccctcaccattggcagcctagcattagcaggaatacctttcctcacaggtttctactccaaagaccacatcatcgaaaccgcaaacatatcatacacaaacgcctgagccctatctattactctcatcgctacctccctgacaagcgcctatagcactcgaataattcttctcaccctaacaggtcaacctcgcttccccacccttactaacattaacgaaaataaccccaccctactaaaccccattaaacgcctggcagccggaagcctattcgcaggatttctcattactaacaacatttcccccgcatcccccttccaaacaacaatccccctctacctaaaactcacagccctcgctgtcactttcctaggacttctaacagccctagacctcaactacctaaccaacaaacttaaaataaaatccccactatgcacattttatttctccaacatgctcggattctaccctagcatcacacaccgcacaatcccctatctaggccttcttacgagccaaaacctgcccctactcctcctagacctaacctgactagaaaagctattacctaaaacaatttcacagcaccaaatctccacctccatcatcacctcaacccaaaaaggcataattaaactttacttcctctctttcttcttcccactcatcctaaccctactcctaatcacataacctattcccccgagcaatctcaattacaatatatacaccaacaaacaatgttcaaccagtaactactactaatcaacgcccataatcatacaaagcccccgcaccaataggatcctcccgaatcaaccctgacccctctccttcataaattattcagcttcctacactattaaagtttaccacaaccaccaccccatcatactctttcacccacagcaccaatcctacctccatcgctaaccccactaaaacactcaccaagacctcaacccctgacccccatgcctcaggatactcctcaatagccatcgctgtagtatatccaaagacaaccatcattccccctaaataaattaaaaaaactattaaacccatataacctcccccaaaattcagaataataacacacccgaccacaccgctaacaatcaatactaaacccccataaataggagaaggcttagaagaaaaccccacaaaccccattactaaacccacactcaacagaaacaaagcatacatcattattctcgcacggactacaaccacgaccaatgatatgaaaaaccatcgttgtatttcaactacaagaacaccaatgaccccaatacgcaaaactaaccccctaataaaattaattaaccactcattcatcgacctccccaccccatccaacatctccgcatgatgaaacttcggctcactccttggcgcctgcctgatcctccaaatcaccacaggactattcctagccatgcactactcaccagacgcctcaaccgccttttcatcaatcgcccacatcactcgagacgtaaattatggctgaatcatccgctaccttcacgccaatggcgcctcaatattctttatctgcctcttcctacacatcgggcgaggcctatattacggatcatttctctactcagaaacctgaaacatcggcattatcctcctgcttgcaactatagcaacagccttcataggctatgtcctcccgtgaggccaaatatcattctgaggggccacagtaattacaaacttactatccgccatcccatacattgggacagacctagttcaatgaatctgaggaggctactcagtagacagtcccaccctcacacgattctttacctttcacttcatcttgcccttcattattgcagccctagcagcactccacctcctattcttgcacgaaacgggatcaaacaaccccctaggaatcacctcccattccgataaaatcaccttccacccttactacacaatcaaagacgccctcggcttacttctcttccttctctccttaatgacattaacactattctcaccagacctcctaggcgacccagacaattataccctagccaaccccttaaacacccctccccacatcaagcccgaatgatatttcctattcgcctacacaattctccgatccgtccctaacaaactaggaggcgtccttgccctattactatccatcctcatcctagcaataatccccatcctccatatatccaaacaacaaagcataatatttcgcccactaagccaatcactttattgactcctagccgcagacctcctcattctaacctgaatcggaggacaaccagtaagctacccttttaccatcattggacaagtagcatccgtactatacttcacaacaatcctaatcctaataccaactatctccctaattgaaaacaaaatactcaaatgggcctgtccttgtagtataaactaatacaccagtcttgtaaaccggagatgaaaacctttttccaaggacaaatcagagaaaaagtctttaactccaccattagcacccaaagctaagattctaatttaaactattctctgttctttcatggggaagcagatttgggtaccacccaagtattgactcacccatcaacaaccgctatgtatttcgtacattactgccagccaccatgaatattgtacggtaccataaatacttgaccacctgtagtacataaaaacccaatccacatcaaaaccccctccccatgcttacaagcaagtacagcaatcaaccctcaactatcacacatcaactgcaactccaaagccacccctcacccactagaataccaacaaacctacccacccttaacagtacatagtacataaagccatttaccgtacatagcacattacagtcaaatcccttctcgtccccatggatgacccccctcagataggggtcccttgaccaccatcctccgtgaaatcaatatcccgcacaagagtgctactctcctcgctccgggcccataacacttgggggtagctaaagtgaactgtatccgacatctggttcctacttcagggccataaagcctaaatagcccacacgttccccttaaataagacatcacgatg

SEQ ID NO: 407 - DNA, 16569 bp, Homo sapiens mitochondrial
  3107: "n" refers to a nucleotide at position 3107 of the Cambridge Reference Sequence (CRS, Anderson et al. 1981 Nature 290:457-465), later determined to be absent from the human mtDNA sequence according to the revised CRS (rCRS, Andrews et al. 1999 Nature Genetics 23:147); "n" therefore represents a single nucleotide deletion at a position corresponding to nucleotide 3107 of SEQ ID NO:1 as provided herein.
gatcacaggtctatcaccctattaaccactcacgggagctctccatgcatttggtattttcgtctggggggtatgcacgcgatagcattgcgagacgctggagccggagcaccctatgtcgcagtatctgtctttgattcctgcctcatcctattatttatcgcacctacgttcaatattacaggcgaacatacttactaaagtgtgttaattaattaatgcttgtaggacataataacaacaattgaatgtctgcacagccgctttccacacagacatcataacaaaaaatttccaccaaaccccccctcccccgcttctggccacagcacttaaacacatctctgccaaaccccaaaaacaaagaaccctaacaccagcctaaccagatttcaaattttatcttttggcggtatgcacttttaacagtcaccccccaactaacacattattttcccctcccactcccatactactaatctcatcaatacaacccccgcccatcctacccagcacacacacaccgctgctaaccccataccccgaaccaaccaaaccccaaagacaccccccacagtttatgtagcttacctcctcaaagcaatacactgaaaatgtttagacgggctcacatcaccccataaacaaataggtttggtcctagcctttctattagctcttagtaagattacacatgcaagcatccccgttccagtgagttcaccctctaaatcaccacgatcaaaagggacaagcatcaagcacgcagcaatgcagctcaaaacgcttagcctagccacacccccacgggaaacagcagtgattaacctttagcaataaacgaaagtttaactaagctatactaaccccagggttggtcaatttcgtgccagccaccgcggtcacacgattaacccaagtcaatagaagccggcgtaaagagtgttttagatcaccccctccccaataaagctaaaactcacctgagttgtaaaaaactccagttgacacaaaatagactacgaaagtggctttaacatatctgaacacacaatagctaagacccaaactgggattagataccccactatgcttagccctaaacctcaacagttaaatcaacaaaactgctcgccagaacactacgagccacagcttaaaactcaaaggacctggcggtgcttcatatccctctagaggagcctgttctgtaatcgataaaccccgatcaacctcaccacctcttgctcagcctatataccgccatcttcagcaaaccctgatgaaggctacaaagtaagcgcaagtacccacgtaaagacgttaggtcaaggtgtagcccatgaggtggcaagaaatgggctacattttctaccccagaaaactacgatagcccttatgaaacttaagggtcgaaggtggatttagcagtaaactgagagtagagtgcttagttgaacagggccctgaagcgcgtacacaccgcccgtcaccctcctcaagtatacttcaaaggacatttaactaaaacccctacgcatttatatagaggagacaagtcgtaacatggtaagtgtactggaaagtgcacttggacgaaccagagtgtagcttaacacaaagcacccaacttacacttaggagatttcaacttaacttgaccgctctgagctaaacctagccccaaacccactccaccttactaccagacaaccttagccaaaccatttacccaaataaagtataggcgatagaaattgaaacctggcgcaatagatatagtaccgcaagggaaagatgaaaaattataaccaagcataatatagcaaggactaacccctataccttctgcataatgaattaactagaaataactttgcaaggagagccaaagctaagacccccgaaaccagacgagctacctaagaacagctaaaagagcacacccgtctatgtagcaaaatagtgggaagatttataggtagaggcgacaaacctaccgagcctggtgatagctggttgtccaagatagaatcttagttcaactttaaatttgcccacagaaccctctaaatccccttgtaaatttaactgttagtccaaagaggaacagctctttggacactaggaaaaaaccttgtagagagagtaaaaaatttaacacccatagtaggcctaaaagcagccaccaattaagaaagcgttcaagctcaacacccactacctaaaaaatcccaaacatataactgaactcctcacacccaattggaccaatctatcaccctatagaagaactaatgttagtataagtaacatgaaaacattctcctccgcataagcctgcgtcagattaaaacactgaactgacaattaacagcccaatatctacaatcaaccaacaagtcattattaccctcactgtcaacccaacacaggcatgctcataaggaaaggttaaaaaaagtaaaaggaactcggcaaatcttaccccgcctgtttaccaaaaacatcacctctagcatcaccagtattagaggcaccgcctgcccagtgacacatgtttaacggccgcggtaccctaaccgtgcaaaggtagcataatcacttgttccttaaatagggacctgtatgaatggctccacgagggttcagctgtctcttacttttaaccagtgaaattgacctgcccgtgaagaggcgggcataacacagcaagacgagaagaccctatggagctttaatttattaatgcaaacagtacctaacaaacccacaggtcctaaactaccaaacctgcattaaaaatttcggttggggcgacctcggagcagaacccaacctccgagcagtacatgctaagacttcaccagtcaaagcgaactactatactcaattgatccaataacttgaccaacggaacaagttaccctagggataacagcgcaatcctattctagagtccatatcaacaatagggtttacgacctcgatgttggatcaggacatcccgatggtgcagccgctattaaaggttcgtttgttcaacgattaaagtcctacgtgatctgagttcagaccggagtaatccaggtcggtttctatctacnttcaaattcctccctgtacgaaaggacaagagaaataaggcctacttcacaaagcgccttcccccgtaaatgatatcatctcaacttagtattatacccacacccacccaagaacagggtttgttaagatggcagagcccggtaatcgcataaaacttaaaactttacagtcagaggttcaattcctcttcttaacaacatacccatggccaacctcctactcctcattgtacccattctaatcgcaatggcattcctaatgcttaccgaacgaaaaattctaggctatatacaactacgcaaaggccccaacgttgtaggcccctacgggctactacaacccttcgctgacgccataaaactcttcaccaaagagcccctaaaacccgccacatctaccatcaccctctacatcaccgccccgaccttagctctcaccatcgctcttctactatgaacccccctccccatacccaaccccctggtcaacctcaacctaggcctcctatttattctagccacctctagcctagccgtttactcaatcctctgatcagggtgagcatcaaactcaaactacgccctgatcggcgcactgcgagcagtagcccaaacaatctcatatgaagtcaccctagccatcattctactatcaacattactaataagtggctcctttaacctctccacccttatcacaacacaagaacacctctgattactcctgccatcatgacccttggccataatatgatttatctccacactagcagagaccaaccgaacccccttcgaccttgccgaaggggagtccgaactagtctcaggcttcaacatcgaatacgccgcaggccccttcgccctattcttcatagccgaatacacaaacattattataataaacaccctcaccactacaatcttcctaggaacaacatatgacgcactctcccctgaactctacacaacatattttgtcaccaagaccctacttctaacctccctgttcttatgaattcgaacagcatacccccgattccgctacgaccaactcatacacctcctatgaaaaaacttcctaccactcaccctagcattacttatatgatatgtctccatacccattacaatctccagcattccccctcaaacctaagaaatatgtctgataaaagagttactttgatagagtaaataataggagcttaaacccccttatttctaggactatgagaatcgaacccatccctgagaatccaaaattctccgtgccacctatcacaccccatcctaaagtaaggtcagctaaataagctatcgggcccataccccgaaaatgttggttatacccttcccgtactaattaatcccctggcccaacccgtcatctactctaccatctttgcaggcacactcatcacagcgctaagctcgcactgattttttacctgagtaggcctagaaataaacatgctagcttttattccagttctaaccaaaaaaataaaccctcgttccacagaagctgccatcaagtatttcctcacgcaagcaaccgcatccataatccttctaatagctatcctcttcaacaatatactctccggacaatgaaccataaccaatactaccaatcaatactcatcattaataatcataatggctatagcaataaaactaggaatagccccctttcacttctgagtcccagaggttacccaaggcacccctctgacatccggcctgcttcttctcacatgacaaaaactagcccccatctcaatcatataccaaatctctccctcactaaacgtaagccttctcctcactctctcaatcttatccatcatagcaggcagttgaggtggattaaaccaaacccagctacgcaaaatcttagcatactcctcaattacccacataggatgaataatagcagttctaccgtacaaccctaacataaccattcttaatttaactatttatattatcctaactactaccgcattcctactactcaacttaaactccagcaccacgaccctactactatctcgcacctgaaacaagctaacatgactaacacccttaattccatccaccctcctctccctaggaggcctgcccccgctaaccggctttttgcccaaatgggccattatcgaagaattcacaaaaaacaatagcctcatcatccccaccatcatagccaccatcaccctccttaacctctacttctacctacgcctaatctactccacctcaatcacactactccccatatctaacaacgtaaaaataaaatgacagtttgaacatacaaaacccaccccattcctccccacactcatcgcccttaccacgctactcctacctatctccccttttatactaataatcttatagaaatttaggttaaatacagaccaagagccttcaaagccctcagtaagttgcaatacttaatttctgtaacagctaaggactgcaaaaccccactctgcatcaactgaacgcaaatcagccactttaattaagctaagcccttactagaccaatgggacttaaacccacaaacacttagttaacagctaagcaccctaatcaactggcttcaatctacttctcccgccgccgggaaaaaaggcgggagaagccccggcaggtttgaagctgcttcttcgaatttgcaattcaatatgaaaatcacctcggagctggtaaaaagaggcctaacccctgtctttagatttacagtccaatgcttcactcagccattttacctcacccccactgatgttcgccgaccgttgactattctctacaaaccacaaagacattggaacactatacctattattcggcgcatgagctggagtcctaggcacagctctaagcctccttattcgagccgagctgggccagccaggcaaccttctaggtaacgaccacatctacaacgttatcgtcacagcccatgcatttgtaataatcttcttcatagtaatacccatcataatcggaggctttggcaactgactagttcccctaataatcggtgcccccgatatggcgtttccccgcataaacaacataagcttctgactcttacctccctctctcctactcctgctcgcatctgctatagtggaggccggagcaggaacaggttgaacagtctaccctcccttagcagggaactactcccaccctggagcctccgtagacctaaccatcttctccttacacctagcaggtgtctcctctatcttaggggccatcaatttcatcacaacaattatcaatataaaaccccctgccataacccaataccaaacgcccctcttcgtctgatccgtcctaatcacagcagtcctacttctcctatctctcccagtcctagctgctggcatcactatactactaacagaccgcaacctcaacaccaccttcttcgaccccgccggaggaggagaccccattctataccaacacctattctgatttttcggtcaccctgaagtttatattcttatcctaccaggcttcggaataatctcccatattgtaacttactactccggaaaaaaagaaccatttggatacataggtatggtctgagctatgatatcaattggcttcctagggtttatcgtgtgagcacaccatatatttacagtaggaatagacgtagacacacgagcatatttcacctccgctaccataatcatcgctatccccaccggcgtcaaagtatttagttgactcgccacactccacggaagcaatatgaaatgatctgctgcagtgctctgagccctaggattcatctttcttttcaccgtaggtggcctgactggcattgtattagcaaactcatcactagacatcgtactacacgacacgtactacgttgtagcccacttccactatgtcctatcaataggagctgtatttgccatcataggaggcttcattcactgatttcccctattctcaggctacaccctagaccaaacctacgccaaaatccatttcactatcatattcatcggcgtaaatctaactttcttcccacaacactttctcggcctatccggaatgccccgacgttactcggactaccccgatgcatacaccacatgaaacatcctatcatctgtaggctcattcatttctctaacagcagtaatattaataattttcatgatttgagaagccttcgcttcgaagcgaaaagtcctaatagtagaagaaccctccataaacctggagtgactatatggatgccccccaccctaccacacattcgaagaacccgtatacataaaatctagacaaaaaaggaaggaatcgaaccccccaaagctggtttcaagccaaccccatggcctccatgactttttcaaaaaggtattagaaaaaccatttcataactttgtcaaagttaaattataggctaaatcctatatatcttaatggcacatgcagcgcaagtaggtctacaagacgctacttcccctatcatagaagagcttatcacctttcatgatcacgccctcataatcattttccttatctgcttcctagtcctgtatgcccttttcctaacactcacaacaaaactaactaatactaacatctcagacgctcaggaaatagaaaccgtctgaactatcctgcccgccatcatcctagtcctcatcgccctcccatccctacgcatcctttacataacagacgaggtcaacgatccctcccttaccatcaaatcaattggccaccaatggtactgaacctacgagtacaccgactacggcggactaatcttcaactcctacatacttcccccattattcctagaaccaggcgacctgcgactccttgacgttgacaatcgagtagtactcccgattgaagcccccattcgtataataattacatcacaagacgtcttgcactcatgagctgtccccacattaggcttaaaaacagatgcaattcccggacgtctaaaccaaaccactttcaccgctacacgaccgggggtatactacggtcaatgctctgaaatctgtggagcaaaccacagtttcatgcccatcgtcctagaattaattcccctaaaaatctttgaaatagggcccgtatttaccctatagcaccccctctaccccctctagagcccactgtaaagctaacttagcattaaccttttaagttaaagattaagagaaccaacacctctttacagtgaaatgccccaactaaatactaccgtatggcccaccataattacccccatactccttacactattcctcatcacccaactaaaaatattaaacacaaactaccacctacctccctcaccaaagcccataaaaataaaaaattataacaaaccctgagaaccaaaatgaacgaaaatctgttcgcttcattcattgcccccacaatcctaggcctacccgccgcagtactgatcattctatttccccctctattgatccccacctccaaatatctcatcaacaaccgactaatcaccacccaacaatgactaatcaaactaacctcaaaacaaatgataaccatacacaacactaaaggacgaacctgatctcttatactagtatccttaatcatttttattgccacaactaacctcctcggactcctgcctcactcatttacaccaaccacccaactatctataaacctagccatggccatccccttatgagcgggcgcagtgattataggctttcgctctaagattaaaaatgccctagcccacttcttaccacaaggcacacctacaccccttatccccatactagttattatcgaaaccatcagcctactcattcaaccaatagccctggccgtacgcctaaccgctaacattactgcaggccacctactcatgcacctaattggaagcgccaccctagcaatatcaaccattaaccttccctctacacttatcatcttcacaattctaattctactgactatcctagaaatcgctgtcgccttaatccaagcctacgttttcacacttctagtaagcctctacctgcacgacaacacataatgacccaccaatcacatgcctatcatatagtaaaacccagcccatgacccctaacaggggccctctcagccctcctaatgacctccggcctagccatgtgatttcacttccactccataacgctcctcatactaggcctactaaccaacacactaaccatataccaatgatggcgcgatgtaacacgagaaagcacataccaaggccaccacacaccacctgtccaaaaaggccttcgatacgggataatcctatttattacctcagaagtttttttcttcgcaggatttttctgagccttttaccactccagcctagcccctaccccccaattaggagggcactggcccccaacaggcatcaccccgctaaatcccctagaagtcccactcctaaacacatccgtattactcgcatcaggagtatcaatcacctgagctcaccatagtctaatagaaaacaaccgaaaccaaataattcaagcactgcttattacaattttactgggtctctattttaccctcctacaagcctcagagtacttcgagtctcccttcaccatttccgacggcatctacggctcaacattttttgtaaccacaggcttccacggacttcacgtcattattggctcaactttcctcactatctgcttcatccgccaactaatatttcactttacatccaaacatcactttggcttcgaagccgccgcctgatactggcattttgtagatgtggtttgactatttctgtatgtctccatctattgatgagggtcttactcttttagtataaatagtaccgttaacttccaattaactagttttgacaacattcaaaaaagagtaataaacttcgccttaattttaataatcaacaccctcctagccttactactaataattattacattttgactaccacaactcaacggctacatagaaaaatccaccccttacgagtgcggcttcgaccctatatcccccgcccgcgtccctttctccataaaattcttcttagtagctattaccttcttattatttgatctagaaattgccctccttttacccctaccatgagccctacaaacaactaacctgccactaatagttatgtcatccctcttattaatcatcatcctagccctaagtctggcctatgagtgactacaaaaaggattagactgaaccgaattggtatatagtttaaacaaaacgaatgatttcgactcattaaattatgataatcatatttaccaaatgcccctcatttacataaatattatactagcatttaccatctcacttctaggaatactagtatatcgctcacacctcatatcctccctactatgcctagaaggaataatactatcgctgttcattatagctactctcataaccctcaacacccactccctcttagccaatattgtgcctattgccatactagtctttgccgcctgcgaagcagcggtgggcctagccctactagtctcaatctccaacacatatggcctagactacgtacataacctaaacctactccaatgctaaaactaatcgtcccaacaattatattactaccactgacatgactttccaaaaaacacataatttgaatcaacacaaccacccacagcctaattattagcatcatccctctactattttttaaccaaatcaacaacaacctatttagctgttccccaaccttttcctccgaccccctaacaacccccctcctaatactaactacctgactcctacccctcacaatcatggcaagccaacgccacttatccagtgaaccactatcacgaaaaaaactctacctctctatactaatctccctacaaatctccttaattataacattcacagccacagaactaatcatattttatatcttcttcgaaaccacacttatccccaccttggttatcatcacccgatgaggcaaccagccagaacgcctgaacgcaggcacatacttcctattctacaccctagtaggctcccttcccctactcatcgcactaatttacactcacaacaccctaggctcactaaacattctactactcactctcactgcccaagaactatcaaactcctgagccaacaacttaatatgactagcttacacaatagcttttatagtaaagatacctctttacggactccacttatgactccctaaagcccatgtcgaagcccccatcgctgggtcaatagtacttgccgcagtactcttaaaactaggcggctatggtataatacgcctcacactcattctcaaccccctgacaaaacacatagcctaccccttccttgtactatccctatgaggcataattataacaagctccatctgcctacgacaaacagacctaaaatcgctcattgcatactcttcaatcagccacatagccctcgtagtaacagccattctcatccaaaccccctgaagcttcaccggcgcagtcattctcataatcgcccacgggcttacatcctcattactattctgcctagcaaactcaaactacgaacgcactcacagtcgcatcataatcctctctcaaggacttcaaactctactcccactaatagctttttgatgacttctagcaagcctcgctaacctcgccttaccccccactattaacctactgggagaactctctgtgctagtaaccacgttctcctgatcaaatatcactctcctacttacaggactcaacatactagtcacagccctatactccctctacatatttaccacaacacaatggggctcactcacccaccacattaacaacataaaaccctcattcacacgagaaaacaccctcatgttcatacacctatcccccattctcctcctatccctcaaccccgacatcattaccgggttttcctcttgtaaatatagtttaaccaaaacatcagattgtgaatctgacaacagaggcttacgaccccttatttaccgagaaagctcacaagaactgctaactcatgcccccatgtctaacaacatggctttctcaacttttaaaggataacagctatccattggtcttaggccccaaaaattttggtgcaactccaaataaaagtaataaccatgcacactactataaccaccctaaccctgacttccctaattccccccatccttaccaccctcgttaaccctaacaaaaaaaactcatacccccattatgtaaaatccattgtcgcatccacctttattatcagtctcttccccacaacaatattcatgtgcctagaccaagaagttattatctcgaactgacactgagccacaacccaaacaacccagctctccctaagcttcaaactagactacttctccataatattcatccctgtagcattgttcgttacatggtccatcatagaattctcactgtgatatataaactcagacccaaacattaatcagttcttcaaatatctactcatcttcctaattaccatactaatcttagttaccgctaacaacctattccaactgttcatcggctgagagggcgtaggaattatatccttcttgctcatcagttgatgatacgcccgagcagatgccaacacagcagccattcaagcaatcctatacaaccgtatcggcgatatcggtttcatcctcgccttagcatgatttatcctacactccaactcatgagacccacaacaaatagcccttctaaacgctaatccaagcctcaccccactactaggcctcctcctagcagcagcaggcaaatcagcccaattaggtctccacccctgactcccctcagccatagaaggccccaccccagtctcagccctactccactcaagcactatagttgtagcaggaatcttcttactcatccgcttccaccccctagcagaaaatagcccactaatccaaactctaacactatgcttaggcgctatcaccactctgttcgcagcagtctgcgcccttacacaaaatgacatcaaaaaaatcgtagccttctccacttcaagtcaactaggactcataatagttacaatcggcatcaaccaaccacacctagcattcctgcacatctgtacccacgccttcttcaaagccatactatttatgtgctccgggtccatcatccacaaccttaacaatgaacaagatattcgaaaaataggaggactactcaaaaccatacctctcacttcaacctccctcaccattggcagcctagcattagcaggaatacctttcctcacaggtttctactccaaagaccacatcatcgaaaccgcaaacatatcatacacaaacgcctgagccctatctattactctcatcgctacctccctgacaagcgcctatagcactcgaataattcttctcaccctaacaggtcaacctcgcttccccacccttactaacattaacgaaaataaccccaccctactaaaccccattaaacgcctggcagccggaagcctattcgcaggatttctcattactaacaacatttcccccgcatcccccttccaaacaacaatccccctctacctaaaactcacagccctcgctgtcactttcctaggacttctaacagccctagacctcaactacctaaccaacaaacttaaaataaaatccccactatgcacattttatttctccaacatactcggattctaccctagcatcacacaccgcacaatcccctatctaggccttcttacgagccaaaacctgcccctactcctcctagacctaacctgactagaaaagctattacctaaaacaatttcacagcaccaaatctccacctccatcatcacctcaacccaaaaaggcataattaaactttacttcctctctttcttcttcccactcatcctaaccctactcctaatcacataacctattcccccgagcaatctcaattacaatatatacaccaacaaacaatgttcaaccagtaactactactaatcaacgcccataatcatacaaagcccccgcaccaataggatcctcccgaatcaaccctgacccctctccttcataaattattcagcttcctacactattaaagtttaccacaaccaccaccccatcatactctttcacccacagcaccaatcctacctccatcgctaaccccactaaaacactcaccaagacctcaacccctgacccccatgcctcaggatactcctcaatagccatcgctgtagtatatccaaagacaaccatcattccccctaaataaattaaaaaaactattaaacccatataacctcccccaaaattcagaataataacacacccgaccacaccgctaacaatcaatactaaacccccataaataggagaaggcttagaagaaaaccccacaaaccccattactaaacccacactcaacagaaacaaagcatacatcattattctcgcacggactacaaccacgaccaatgatatgaaaaaccatcgttgtatttcaactacaagaacaccaatgaccccaatacgcaaaactaaccccctaataaaattaattaaccactcattcatcgacctccccaccccatccaacatctccgcatgatgaaacttcggctcactccttggcgcctgcctgatcctccaaatcaccacaggactattcctagccatgcactactcaccagacgcctcaaccgccttttcatcaatcgcccacatcactcgagacgtaaattatggctgaatcatccgctaccttcacgccaatggcgcctcaatattctttatctgcctcttcctacacatcgggcgaggcctatattacggatcatttctctactcagaaacctgaaacatcggcattatcctcctgcttgcaactatagcaacagccttcataggctatgtcctcccgtgaggccaaatatcattctgaggggccacagtaattacaaacttactatccgccatcccatacattgggacagacctagttcaatgaatctgaggaggctactcagtagacagtcccaccctcacacgattctttacctttcacttcatcttgcccttcattattgcagccctagcagcactccacctcctattcttgcacgaaacgggatcaaacaaccccctaggaatcacctcccattccgataaaatcaccttccacccttactacacaatcaaagacgccctcggcttacttctcttccttctctccttaatgacattaacactattctcaccagacctcctaggcgacccagacaattataccctagccaaccccttaaacacccctccccacatcaagcccgaatgatatttcctattcgcctacacaattctccgatccgtccctaacaaactaggaggcgtccttgccctattactatccatcctcatcctagcaataatccccatcctccatatatccaaacaacaaagcataatatttcgcccactaagccaatcactttattgactcctagccgcagacctcctcattctaacctgaatcggaggacaaccagtaagctacccttttaccatcattggacaagtagcatccgtactatacttcacaacaatcctaatcctaataccaactatctccctaattgaaaacaaaatactcaaatgggcctgtccttgtagtataaactaatacaccagtcttgtaaaccggagatgaaaacctttttccaaggacaaatcagagaaaaagtctttaactccaccattagcacccaaagctaagattctaatttaaactattctctgttctttcatggggaagcagatttgggtaccacccaagtattgactcacccatcaacaaccgctatgtatttcgtacattactgccagccaccatgaatattgtacggtactataaatacttgaccacctgtagtacataaaaacccaatccacatcaaaaccccctccccatgcttacaagcaagtacagcaatcaaccctcaactatcacacatcaactgcaactccaaagccacccctcacccactaggataccaacaaacctacccacccttaacagtacatagtacataaagccatttaccgtacatagcacattacagtcaaatcccttctcgcccccatggatgacccccctcagataggggtcccttgaccaccatcctccgtgaaatcaatatcccgcacaagagtgctactctcctcgctccgggcccataacacttgggggtagctaaggtgaactgtatccgacatctggttcctacttcagggtcataaagcctaaatagcccacacgttccccttaaataagacatcacgatg

SEQ ID NO: 408 - DNA, 16570 bp, Homo sapiens mitochondrial
  3108: "n" refers to a nucleotide at position 3107 of the Cambridge Reference Sequence (CRS, Anderson et al. 1981 Nature 290:457-465), later determined to be absent from the human mtDNA sequence according to the revised CRS (rCRS, Andrews et al. 1999 Nature Genetics 23:147); "n" therefore represents a single nucleotide deletion at a position corresponding to nucleotide 3107 of SEQ ID NO:1 as provided herein.
gatcacaggtctatcaccctattaaccactcacgggagctctccatgcatttggtattttcgtctggggggtgtgcacgcgatagcattgcgagacgctggagccggagcaccctatgtcgcagtatctgtctttgattcctgccccatcctattatttatcgcacctacgttcaatattacagacggacatacttactaaagtgtgttaattaattaatgcttgtaggacataataataacaattgaatgtctgcacagccgctttccacacagacatcataacaaaaaattttcaccaaaccccccctcccccgccttctggccacagcacttaaacacatctctgccaaaccccaaaaacaaagaaccctaacaccagcctaaccagatttcaaattttatcttttggcggtatgcacttttaacagtcaccccccaactaacacattattttcccctctcactcccatactactaatctcatcaacacaacccccgcccatcctacccagcacacacacaccgctgctaaccccataccccgaaccaaccaaaccccaaagacaccccccacagtttatgtagcttacctcctcaaagcaatacactgaaaatgtttagacgggctcacatcaccccataaacaaataggtttggtcctagcctttctattagctcttagtaagattacacatgcaagcatccccgttccagtgagttcaccctctaaatcaccacgatcaaaagggacaagcatcaagcacgcagcaatgcagctcaaaacgcttagcctagccacacccccacgggaaacagcagtgattaacctttagcaataaacgaaagtttaactaagctatactaaccccagggttggtcaatttcgtgccagccaccgcggtcacacgattaacccaagtcaatagaagccggcgtaaagagtgttttagatcaccccctccccaataaagctaaaactcacctgagttgtaaaaaactccagttgacacaaaatagactacgaaagtggctttaacatatctgaacacacaatagctaagacccaaactgggattagataccccactatgcttagccctaaacctcaacagttaaatcaacaaaactgctcgccagaacactacgagccacagcttaaaactcaaaggacctggcggtgcttcatatccctctagaggagcctgttctgtaatcgataaaccccgatcaacctcaccacctcttgctcagcctatataccgccatcttcagcaaaccctgatgaaggctacaaagtaagcgcaagtacccacgtaaagacgttaggtcaaggtgtagcccatgaggtggcaagaaatgggctacattttctaccccagaaaactacgatagcccttatgaaacttaagggtcgaaggtggatttagcagtaaactgagagtagagtgcttagttgaacagggccctgaagcgcgtacacaccgcccgtcaccctcctcaagtatacttcaaaggacatttaactaaaacccctacgcatttatatagaggagacaagtcgtaacatggtaagtgtactggaaagtgcacttggacgaaccagagtgtagcttaacacaaagcacccaacttacacttaggagatttcaacttaacttgaccgctctgagctaaacctagccccaaacccactccaccttactaccagacaaccttagccaaaccatttacccaaataaagtataggcgatagaaattgaaacctggcgcaatagatatagtaccgcaagggaaagatgaaaaattataaccaagcataatatagcaaggactaacccctataccttctgcataatgaattaactagaaataactttgcaaggagagccaaagctaagacccccgaaaccagacgagctacctaagaacagctaaaagagcacacccgtctatgtagcaaaatagtgggaagatttataggtagaggcgacaaacctaccgagcctggtgatagctggttgtccaagatagaatcttagttcaactttaaatttgcccacagaaccctctaaatccccttgtaaatttaactgttagtccaaagaggaacagctctttggacactaggaaaaaaccttgtagagagagtaaaaaatttaacacccatagtaggcctaaaagcagccaccaattaagaaagcgttcaagctcaacacccactacctaaaaaatcccaaacatataactgaactcctcacacccaattggaccaatctatcaccctatagaagaactaatgttagtataagtaacatgaaaacattctcctccgcataagcctgcgtcagattaaaacactgaactgacaattaacagcccaatatctacaatcaaccaacaagtcattattaccctcactgtcaacccaacacaggcatgctcataaggaaaggttaaaaaaagtaaaaggaactcggcaaatcttaccccgcctgtttaccaaaaacatcacctctagcatcaccagtattagaggcaccgcctgcccagtgacacatgtttaacggccgcggtaccctaaccgtgcaaaggtagcataatcacttgttccttaaatagggacctgtatgaatggctccacgagggttcagctgtctcttacttttaaccagtgaaattgacctgcccgtgaagaggcgggcatgacacagcaagacgagaagaccctatggagctttaatttattaatgcaaacagtacctaacaaacccacaggtcctaaactaccaaacctgcattaaaaatttcggttggggcgacctcggagcagaacccaacctccgagcagtacatgctaagacttcaccagtcaaagcgaactactatactcaattgatccaataacttgaccaacggaacaagttaccctagggataacagcgcaatcctattctagagtccatatcaacaatagggtttacgacctcgatgttggatcaggacatcccaatggtgcagccgctattaaaggttcgtttgttcaacgattaaagtcctacgtgatctgagttcagaccggagtaatccaggtcggtttctatctacnttcaaattcctccctgtacgaaaggacaagagaaataaggcctacttcacaaagcgccttcccccgtaaatgatatcatctcaacttagtattatacccacacccacccaagaacagggtttgttaagatggcagagcccggtaatcgcataaaacttaaaactttacagtcagaggttcaattcctcttcttaacaacatacccatggccaacctcctactcctcattgtacccattctaatcgcaatggcattcctaatgcttaccgaacgaaaaattctaggctatatacaactacgcaaaggccccaacgttgtaggcccctacgggctactacaacccttcgctgacgccataaaactcttcaccaaagagcccctaaaacccgccacatctaccatcaccctctacatcaccgccccgaccttagctctcaccatcgctcttctactatgaacccccctccccatacccaaccccctggtcaacctcaacctaggcctcctatttattctagccacctctagcctagccgtttactcaatcctctgatcagggtgagcatcaaactcaaactacgccctgatcggcgcactgcgagcagtagcccaaacaatctcatatgaagtcaccctagccatcattctactatcaacattactaataagtggctcctttaacctctccacccttatcacaacacaagaacacctctgattactcctgccatcatgacccttggccataatatgatttatctccacactagcagagaccaaccgaacccccttcgaccttgccgaaggggagtccgaactagtctcaggcttcaacatcgaatacgccgcaggccccttcgccctattcttcatagccgaatacacaaacattattataataaacaccctcaccactacaatcttcctaggaacaacatatgacgcactctcccctgaactctacacaacatattttgtcaccaagaccctacttctaacctccctgttcttatgaattcgaacagcatacccccgattccgctacgaccaactcatacacctcctatgaaaaaacttcctaccactcaccctagcattacttatatgacatgtctccatacccattacaatctccagcattccccctcaaacctaagaaatatgtctgataaaagagttactttgatagagtaaataataggagcttaaacccccttatttctaggactatgagaatcgaacccatccctgagaatccaaaattctccgtgccacctatcacaccccatcctaaagtaaggtcagctaaataagctatcgggcccataccccgaaaatgttggttatacccttcccgtactaattaatcccctggcccaacccgtcatctactctaccatctttgcaggcacactcatcacagcgctaagctcgcactgattttttacctgagtaggcctagaaataaacatgctagcttttattccagttctaaccaaaaaaataaaccctcgttccacagaagctgccatcaagtatttcctcacgcaagcaaccgcatccataatccttctaatagctatcctcttcaacaatatactctccggacaatgaaccataaccaatactaccaatcaatactcatcattaataatcataatggctatagcaataaaactaggaatagccccctttcacttctgagtcccagaggttacccaaggcacccctctgacatccggcctgcttcttctcacatgacaaaaactagcccccatctcaatcatataccaaatctctccctcactaaacgtaagccttctcctcactctctcaatcttatccatcatagcaggcagttgaggtggattaaaccaaacccagctacgcaaaatcttagcatactcctcaattacccacataggatgaataatagcagttctaccgtacaaccctaacataaccattcttaatttaactatttatattatcctaactactaccgcattcctactactcaacttaaactccagcaccacgaccctactactatctcgcacctgaaacaagctaacatgactaacacccttaattccatccaccctcctctccctaggaggcctgcccccgctaaccggctttttgcccaaatgggccattatcgaagaattcacaaaaaacaatagcctcatcatccccaccatcatagccaccatcaccctccttaacctctacttctacctacgcctaatctactccacctcaatcacactactccccatatctaacaacgtaaaaataaaatgacagtttgaacatacaaaacccaccccattcctccccacactcatcgcccttaccacgctactcctacctatctccccttttatactaataatcttatagaaatttaggttaaatacagaccaagagccttcaaagccctcagtaagttgcaatacttaatttctgtaacagctaaggactgcaaaaccccactctgcatcaactgaacgcaaatcagccactttaattaagctaagcccttactagaccaatgggacttaaacccacaaacacttagttaacagctaagcaccctaatcaactggcttcaatctacttctcccgccgccgggaaaaaaggcgggagaagccccggcaggtttgaagctgcttcttcgaatttgcaattcaatatgaaaatcacctcggagctggtaaaaagaggcctaacccctgtctttagatttacagtccaatgcttcactcagccattttacctcacccccactgatgttcgccgaccgttgactattctctacaaaccacaaagacattggaacactatacctattattcggcgcatgagctggagtcctaggcacagctctaagcctccttattcgagccgagctgggccagccaggcaaccttctaggtaacgaccacatctacaacgttatcgtcacagcccatgcatttgtaataatcttcttcatagtaatacccatcataatcggaggctttggcaactgactagttcccctaataatcggtgcccccgatatggcgtttccccgcataaacaacataagcttctgactcttacctccctctctcctactcctgctcgcatctgctatagtggaggccggagcaggaacaggttgaacagtctaccctcccttagcagggaactactcccaccctggagcctccgtagacctaaccatcttctccttacacctagcaggtgtctcctctatcttaggggccatcaatttcatcacaacaattatcaatataaaaccccctgccataacccaataccaaacgcccctcttcgtctgatccgtcctaatcacagcagtcctacttctcctatctctcccagtcctagctgctggcatcactatactactaacagaccgcaacctcaacaccaccttcttcgaccccgccggaggaggagaccccattctataccaacacctattctgatttttcggtcaccctgaagtttatattcttatcctaccaggcttcggaataatctcccatattgtaacttactactccggaaaaaaagaaccatttggatacataggtatggtctgagctatgatatcaattggcttcctagggtttatcgtgtgagcacaccatatatttacagtaggaatagacgtagacacacgagcatatttcacctccgctaccataatcatcgctatccccaccggcgtcaaagtatttagctgactcgccacactccacggaagcaatatgaaatgatctgctgcagtgctctgagccctaggattcatctttcttttcaccgtaggtggcctgactggcattgtattagcaaactcatcactagacatcgtactacacgacacgtactacgttgtagctcacttccactatgtcctatcaataggagctgtatttgccatcataggaggcttcattcactgatttcccctattctcaggctacaccctagaccaaacctacgccaaaatccatttcactatcatattcatcggcgtaaatctaactttcttcccacaacactttctcggcctatccggaatgccccgacgttactcggactaccccgatgcatacaccacatgaaacatcctatcatctgtaggctcattcatttctctaacagcagtaatattaataattttcatgatttgagaagccttcgcttcgaagcgaaaagtcctaatagtagaagaaccctccataaacctggagtgactatatggatgccccccaccctaccacacattcgaagaacccgtatacataaaatctagacaaaaaaggaaggaatcgaaccccccaaagctggtttcaagccaaccccatggcctccatgactttttcaaaaaggtattagaaaaaccatttcataactttgtcaaagttaaattataggctaaatcctatatatcttaatggcacatgcagcgcaagtaggtctacaagacgctacttcccctatcatagaagagcttatcacctttcatgatcacgccctcataatcattttccttatctgcttcctagtcctgtatgcccttttcctaacactcacaacaaaactaactaatactaacatctcagacgctcaggaaatagaaaccgtctgaactatcctgcccgccatcatcctagtcctcatcgccctcccatccctacgcatcctttacataacagacgaggtcaacgatccctcccttaccatcaaatcaattggccaccaatggtactgaacctacgagtacaccgactacggcggactaatcttcaactcctacatacttcccccattattcctagaaccaggcgacctgcgactccttgacgttgacaatcgagtagtactcccgattgaagcccccattcgtataataattacatcacaagacgtcttgcactcatgagctgtccccacattaggcttaaaaacagatgcaattcccggacgtctaaaccaaaccactttcaccgctacacgaccgggggtatactacggtcaatgctctgaaatctgtggagcaaaccacagtttcatgcccatcgtcctagaattaattcccctaaaaatctttgaaatagggcccgtatttaccctatagcaccccctctaccccctctagagcccactgtaaagctaacttagcattaaccttttaagttaaagattaagagaaccaacacctctttacagtgaaatgccccaactaaatactaccgtatggcccaccataattacccccatactccttacactattcctcatcacccaactaaaaatattaaacacaaactaccacctacctccctcaccaaagcccataaaaataaaaaattataacaaaccctgagaaccaaaatgaacgaaaatctgttcgcttcattcattgcccccacaatcctaggcctacccgccgcagtactgatcattctatttccccctctattgatccccacctccaaatatctcatcaacaaccgactaatcaccacccaacaatgactaatcaaactaacctcaaaacaaatgataaccatacacaacactaaaggacgaacctgatctcttatactagtatccttaatcatttttattgccacaactaacctcctcggactcctgcctcactcatttacaccaaccacccaactatctataaacctagccatggccatccccttatgagcgggcgcagtgattataggctttcgctctaagattaaaaatgccctagcccacttcttaccacaaggcacacctacaccccttatccccatactagttattatcgaaaccatcagcctactcattcaaccaatagccctggccgtacgcctaaccgctaacattactgcaggccacctactcatgcacctaattggaagcgccaccctagcaatatcaaccattaaccttccctctacacttatcatcttcacaattctaattctactgactatcctagaaatcgctgtcgccttaatccaagcctacgttttcacacttctagtaagcctctacctgcacgacaacacataatgacccaccaatcacatgcctatcatatagtaaaacccagcccatgacccctaacaggggccctctcagccctcctaatgacctccggcctagccatgtgatttcacttccactccataacgctcctcatactaggcctactaaccaacacactaaccatataccaatgatggcgcgatgtaacacgagaaagcacataccaaggccaccacacaccacctgtccaaaaaggccttcgatacgggataatcctatttattacctcagaagtttttttcttcgcaggatttttctgagccttttaccactccagcctagcccctaccccccaattaggagggcactggcccccaacaggcatcaccccgctaaatcccctagaagtcccactcctaaacacatccgtattactcgcatcaggagtatcaatcacctgagctcaccatagtctaatagaaaacaaccgaaaccaaataattcaagcactgcttattacaattttactgggtctctattttaccctcctacaagcctcagagtacttcgagtctcccttcaccatttccgacggcatctacggctcaacattttttgtagccacaggcttccacggacttcacgtcattattggctcaactttcctcactatctgcttcatccgccaactaatatttcactttacatccaaacatcactttggcttcgaagccgccgcctgatactggcattttgtagatgtggtttgactatttctgtatgtctccatctattgatgagggtcttactcttttagtataaatagtaccgttaacttccaattaactagttttgacaacattcaaaaaagagtaataaacttcgccttaattttaataatcaacaccctcctagccttactactaataattattacattttgactaccacaactcaacggctacatagaaaaatccaccccttacgagtgcggcttcgaccctatatcccccgcccgcgtccctttctccataaaattcttcttagtagctattaccttcttattatttgatctagaaattgccctccttttacccctaccatgagccctacaaacaactaacctgccactaatagttatgtcatccctcttattaatcatcatcctagccctaagtctggcctatgagtgactacaaaaaggattagactgagccgaattggtatatagtttaaacaaaacgaatgatttcgactcattaaattatgataatcatatttaccaaatgcccctcatttacataaatattatactagcatttaccatctcacttctaggaatactagtatatcgctcacacctcatatcctccctactatgcctagaaggaataatactatcgctgttcattatagctactctcataaccctcaacacccactccctcttagccaatattgtgcctattgccatactagtctttgccgcctgcgaagcagcagtgggcctagccctactagtctcaatctccaacacatatggcctagactacgtacataacctaaacctactccaatgctaaaactaatcgtcccaacaattatattactaccactgacatgactttccaaaaaacacataatttgaatcaacacaaccacccacagcctaattattagcatcatccctctactattttttaaccaaatcaacaacaacctatttagctgttccccaaccttttcctccgaccccctaacaacccccctcctaatactaactacctgactcctacccctcacaatcatggcaagccaacgccacttatccagtgaaccactatcacgaaaaaaactctacctctctatactaatctccctacaaatctccttaattataacattcacagccacagaactaatcatattttatatcttcttcgaaaccacacttatccccaccttggctatcatcacccgatgaggcaaccagccagaacgcctgaacgcaggcacatacttcctattctacaccctagtaggctcccttcccctactcatcgcactgatttacactcacaacaccctaggctcactaaacattctactactcactctcactgcccaagaactatcaaactcctgagccaacaacttaatatgactagcttacacaatagcttttatagtaaagatacctctttacggactccacttatgactccctaaagcccatgtcgaagcccccatcgctgggtcaatagtacttgccgcagtactcttaaaactaggcggctatggtataatacgcctcacactcattctcaaccccctgacaaaacacatagcctaccccttccttgtactatccctatgaggcataattataacaagctccatctgcctacgacaaacagacctaaaatcgctcattgcatactcttcaatcagccacatagccctcgtagtaacagccattctcatccaaaccccctgaagcttcaccggcgcagtcattctcataatcgcccacggacttacatcctcattactattctgcctagcaaactcaaactacgaacgcactcacagtcgcatcataatcctctctcaaggacttcaaactctactcccactaatagctttttgatgacttctagcaagcctcgctaacctcgccttaccccccactattaacctactgggagaactctctgtgctagtaaccacgttctcctgatcaaatatcactctcctacttacaggactcaacatactagtcacagccctatactccctctacatatttaccacaacacaatggggctcactcacccaccacattaacaacataaaaccctcattcacacgagaaaacaccctcatgttcatacacctatcccccattctcctcctatccctcaaccccgacatcattaccgggttttcctcttgtaaatatagtttaaccaaaacatcagattgtgaatctgacaacagaggcttacgaccccttatttaccgagaaagctcacaagaactgctaactcatgcccccatgtctaacaacatggctttctcaacttttaaaggataacagctatccattggtcttaggccccaaaaattttggtgcaactccaaataaaagtaataaccatgcacactactataaccaccctaaccctgacttccctaattccccccatccttgccaccctcgttaaccctaacaaaaaaaactcatacccccattatgtaaaatccattgtcgcatccacctttattatcagtctcttccccacaacaatattcatgtgcctagaccaagaagttattatctcgaactgacactgagccacaacccaaacaacccagctctccctaagcttcaaactagactacttctccataatattcatccctgtggcattgttcgttacatggtccatcatagaattctcactgtgatatataaactcagacccaaacattaatcagttcttcaaatatctactcatcttcctaattaccatactaatcttagttaccgctaacaacctattccaactgttcatcggctgagagggcgtaggaattatatccttcttgctcatcagttgatgatacgcccgagcagatgccaacacagcagccattcaagcaatcctatacaaccgtatcggcgatatcggtttcatcctcgccttagcatgatttatcctacactccaactcatgagacccacaacaaatagcccttctaaacgctaatccaagcctcaccccactactaggcctcctcctagcagcagcaggcaaatcagcccaattaggtctccacccctgactcccctcagccatagaaggccccaccccagtctcagccctactccactcaagcactatagttgtagcaggaatcttcttactcatccgcttccaccccctagcagaaaatagcccactaatccaaactctaacactatgcttaggcgctatcaccactctgttcgcagcagtctgcgcccttacacaaaatgacatcaaaaaaatcgtagccttctccacttcaagtcaactaggactcataatagtcacaatcggcatcaaccaaccacacctagcattcctgcacatctgtacccacgccttcttcaaagccatactatttatgtgctccgggtccatcatccacaaccttaacaatgaacaagatattcgaaaaataggaggactactcaaaaccatacctctcacttcaacctccctcaccattggcagcctagcattagcaggaatacctttcctcacaggtttctactccaaagaccacatcatcgaaaccgcaaacatatcatacacaaacgcctgagccctatctattactctcatcgctacctccctgacaagcgcctatagcactcgaataattcttctcaccctaacaggtcaacctcgcttccccacccttactaacattaacgaaaataaccccaccctactaaaccccattaaacgcctgacagccggaagcctattcgcaggatttctcattactaacaacatttcccccgcatcccccttccaaacaacaatccccctctacctaaaactcacagccctcgctgtcactttcctaggacttctaacagccctagacctcaactacctaaccaacaaacttaaaataaaatccccactatgcacattttatttctccaacatactcggattctaccctagcatcgcacaccgcacaatcccctatctaggccttcttacgagccaaaacctgcccctactcctcctagacctaacctgactagaaaagctattacctaaaacaatttcacagcaccaaatctccacctccatcatcacctcaacccaaaaaggcataattaaactttacttcctctctttcttcttcccactcatcctaaccctactcctaatcacataacctattcccccgagcaatctcaattacaatatatacaccaacaaacaatgttcaaccagtaactactactaatcaacgcccataatcatacaaagcccccgcaccaataggatcctcccgaatcaaccctgacccctctccttcataaattattcagcttcctacactattaaagtttaccacaaccaccaccccatcatactctttcacccacagcaccaatcctacctccatcgctaaccccactaaaacactcaccaagacctcaacccctgacccccatgcctcaggatactcctcaatagccatcgctgtagtatatccaaagacaaccatcattccccctaaataaattaaaaaaactattaaacccatataacctcccccaaaattcagaataataacacacccgaccacaccgctaacaatcaatactaaacccccataaataggagaaggcttagaagaaaaccccacaaaccccattactaaacccacactcaacagaaacaaagcatacatcattattctcgcacggactacaaccacgaccaatgatatgaaaaaccatcgttgtatttcaactacaagaacaccaatgaccccaatacgcaaaattaaccccctaataaaattaattaaccactcactcatcgacctccccaccccatccaacatctccgcatgatgaaacttcggctcactccttggcgcctgcctgatcctccaaatcaccacaggactattcctagccatgcactactcaccagacgcctcaaccgccttttcatcaatcgcccacatcactcgagacgtaaattatggctgaatcatccgctaccttcacgccaatggcgcctcaatattctttatctgcctcttcctacacatcgggcgaggcctatattacggatcatttctctactcagaaacctgaaacatcggcattatcctcctgcttgcaactatagcaacagccttcataggctatgtcctcccgtgaggccaaatatcattctgaggggccacagtaattacaaacttactatccgccatcccatacattgggacagacctagttcaatgaatctgaggaggctactcagtagacagtcccaccctcacacgattctttacctttcacttcatcttgcccttcattattgcagccctagcagcactccacctcctattcttgcacgaaacgggatcaaacaaccccctaggaatcacctcccattccgataaaatcaccttccacccttactacacaatcaaagacgccctcggcttacttctcttcattctctccttaatgacattaacactattctcaccagacctcctaggcgacccagacaattataccctagccaaccccttaaacacccctccccacatcaagcccgaatgatatttcctattcgcctacacaattctccgatccgtccctaacaaactaggaggcgtccttgccctattactatccatcctcatcctagcaataatccccatcctccatatatccaaacaacaaagcataatatttcgcccactaagccaatcactttattgactcctagccgcagacctcctcattctaacctgaatcggaggacaaccagtaagctacccttttaccatcattggacaagtagcatccgtactatacttcacaacaatcctaatcctaataccaactatctccctaattgaaaacaaaatactcaaatgggcctgtccttgtagtataaactaatacaccagtcttgtaaaccggagatgaaaacctttttccaaggacaaatcagagaaaaagtctttaactccaccattagcacccaaagctaagattctaatttaaactattctctgttctttcatggggaagcagatttgggtaccacccaagtattgacttacccatcaacaaccgctatgtatttcgtacattactgccagccaccatgaatattgcacggtaccataaatacttgaccacctgtagtacataaaaacccaatccacatcaaaaccccctccccatgcttacaagcaagtacagcaatcaaccctcaactatcacacatcaactgcaactccaaagccacccctcacccactaggataccaacaaacctacccacccttaacagtacatagtacataaagccatttaccgtacatagcacattacagtcaaatcccttctcgtccccatggatgacccccctcagataggggtcccttgaccaccatcctccgtgaaatcaatatcccgcacaagagtgctactctcctcgctccgggcccataacacttgggggtagctaaagtgaactgtatccgacatctggttcctacttcagggccataaagcctaaatagcccacacgttccccttaaataagacatcacgatg

SEQ ID NO: 409 - DNA, 16571 bp, Homo sapiens mitochondrial
  3109: "n" refers to a nucleotide at position 3107 of the Cambridge Reference Sequence (CRS, Anderson et al. 1981 Nature 290:457-465), later determined to be absent from the human mtDNA sequence according to the revised CRS (rCRS, Andrews et al. 1999 Nature Genetics 23:147); "n" therefore represents a single nucleotide deletion at a position corresponding to nucleotide 3107 of SEQ ID NO:1 as provided herein.
gatcacaggtctatcaccctattaaccactcacgggagctctccatgcatttggtattttcgtctggggggtgtgcacgcgatagcattgcgagacgctggagccggagcaccctatgtcgcagtatctgtctttgattcctgcctcatcctattatttatcgcacctacgttcaatattacaggcgaacatacttactaaagtgtgttaattaattaatgcttgtaggacataataataacaattgaatgtctgcacagccgctttccacacagacatcataacaaaaaatttccaccaaaccccccctcccccccgcttctggccacagcacttaaacacatctctgccaaaccccaaaaacaaagaaccctaacaccagcctaaccagatttcaaattttatcttttggcggtatgcacttttaacagtcaccccccaactaacacattattttcccctcccactcccatactactaatctcatcaatacaaccctcgcccatcctacccagcacacacacaccgctgctaaccccataccccgaaccaaccaaaccccaaagacaccccccacagtttatgtagcttacctcctcaaagcaatacactgaaaatgtttagacgggctcacatcaccccataaacaaataggtttggtcctagcctttctattagctcttagtaagattacacatgcaagcatccccgttccagtgagttcaccctctaaatcaccacgatcaaaagggacaagcatcaagcacgcagcaatgcagctcaaaacgcttagcctagccacacccccacgggaaacagcagtgattaacctttagcaataaacgaaagtttaactaagctatactaaccccagggttggtcaatttcgtgccagccaccgcggtcacacgattaacccaagtcaatagaagccggcgtaaagagtgttttagatcaccccctccccaataaagctaaaactcacctgagttgtaaaaaactccagttgacacaaaatagactacgaaagtggctttaacatatctgaacacacaatagctaagacccaaactgggattagataccccactatgcttagccctaaacctcaacagttaaatcaacaaaactgctcgccagaacactacgagccacagcttaaaactcaaaggacctggcggtgcttcatacccctctagaggagcctgttctgtaatcgataaaccccgatcaacctcaccacctcttgctcagcctatataccgccatcttcagcaaaccctgatgaaggctacaaagtaagcgcaagtacccacgtaaagacgttaggtcaaggtgtagcccatgaggtggcaagaaatgggctacattttctaccccagaaaactacgatagcccttatgaaacttaagggtcgaaggtggatttagcagtaaactgagagtagagtgcttagttgaacagggccctgaagcgcgtacacaccgcccgtcaccctcctcaagtatacttcaaaggacatttaactaaaacccctacgcatttatatagaggagacaagtcgtaacatggtaagtgtactggaaagtgcacttggacgaaccagagtgtagcttaacacaaagcacccaacttacacttaggagatttcaacttaacttgaccgctctgagctaaacctagccccaaacccactccaccttactaccagacaaccttagccaaaccatttacccaaataaagtataggcgatagaaattgaaacctggcgcaatagatatagtaccgcaagggaaagatgaaaaattatagccaagcataatatagcaaggactaacccctataccttctgcataatgaattaactagaaataactttgcaaggagagccaaagctaagacccccgaaaccagacgagctacctaagaacagctaaaagagcacacccgtctatgtagcaaaatagtgggaagatttataggtagaggcgacaaacctaccgagcctggtgatagctggttgtccaagatagaatcttagttcaactttaaatttgcccacagaaccctctaaatccccttgtaaatttaactgttagtccaaagaggaacagctctttggacactaggaaaaaaccttgtagagagagtaaaaaatttaacacccatagtaggcctaaaagcagccaccaattaagaaagcgttcaagctcaacacccactacctaaaaaatcccaaacatataactgaactcctcacacccaattggaccaatctatcaccctatagaagaactaatgttagtataagtaacatgaaaacattctcctccgcataagcctgcgtcagattaaaacactgaactgacaattaacagcccaatatctacaatcaaccaacaagtcattattaccctcactgtcaacccaacacaggcatgctcataaggaaaggttaaaaaaagtaaaaggaactcggcaaatcttaccccgcctgtttaccaaaaacatcacctctagcatcaccagtattagaggcaccgcctgcccagtgacacatgtttaacggccgcggtaccctaaccgtgcaaaggtagcataatcacttgttccttaaatagggacctgtatgaatggctccacgagggttcagctgtctcttacttttaaccagtgaaattgacctgcccgtgaagaggcgggcatgacacagcaagacgagaagaccctatggagctttaatttattaatgcaaacagtacctaacaaacccacaggtcctaaactaccaaacctgcattaaaaatttcggttggggcgacctcggagcagaacccaacctccgagcagtacatgctaagacttcaccagtcaaagcgaactactatactcaattgatccaataacttgaccaacggaacaagttaccctagggataacagcgcaatcctattctagagtccatatcaacaatagggtttacgacctcgatgttggatcaggacatcccgatggtgcagccgctattaaaggttcgtttgttcaacgattaaagtcctacgtgatctgagttcagaccggagtaatccaggtcggtttctatctacnttcaaattcctccctgtacgaaaggacaagagaaataaggcctacttcacaaagcgccttcccccgtaaatgatatcatctcaacttagtattatacccacacccacccaagaacagggtttgttaagatggcagagcccggtaatcgcataaaacttaaaactttacagtcagaggttcaattcctcttcttaacaacatacccatggccaacctcctactcctcattgtacccattctaatcgcaatggcattcctaatgcttaccgaacgaaaaattctaggctatatacaactacgcaaaggccccaacgttgtaggcccctacgggctactacaacccttcgctgacgccataaaactcttcaccaaggagcccctaaaacccgccacatctaccatcaccctctacatcaccgccccgaccttagctctcaccatcgctcttctactatgaacccccctccccatacccaaccccctggtcaacctcaacctaggcctcctatttattctagccacctctagcctagccgtttactcaatcctctgatcagggtgagcatcaaactcaaactacgccctgatcggcgcactgcgagcagtagcccaaacaatctcatatgaagtcaccctagccatcattctactatcaacattactaataagtggctcctttaacctctccacccttatcacaacacaagaacacctctgattactcctgccatcatgacccttggccataatatgatttatctccacactagcagagaccaaccgaacccccttcgaccttgccgaaggggagtccgaactagtctcaggcttcaacatcgaatacgccgcaggccccttcgccctattcttcatagccgaatacacaaacattattataataaacaccctcaccactacaatcttcctaggaacaacatatgacgcactctcccctgaactctacacaacatattttgtcaccaagaccctacttctaacctccctgttcttatgaattcgaacagcatacccccgattccgctacgaccaactcatacacctcctatgaaaaaacttcctaccactcaccctagcattacttatatgatatgtctccatacccattacaatctccagcattccccctcaaacctaagaaatatgtctgataaaagagttactttgatagagtaaataataggagcttaaacccccttatttctaggactatgagaatcgaacccatccctgagaatccaaaattctccgtgccacctatcacaccccatcctaaagtaaggtcagctaaataagctatcgggcccataccccgaaaatgttggttatacccttcccgtactaattaatcccctggcccaacccgtcatctactctaccatctttgcaggcacactcatcacagcgctaagctcgcactgattttttacctgagtaggcctagaaataaacatgctagcttttattccagttctaaccaaaaaaataaaccctcgttccacagaagctgccatcaagtatttcctcacgcaagcaaccgcatccataatccttctaatagctatcctcttcaacaatatactctccggacaatgaaccataaccaatactaccaatcaatactcatcattaataatcataatggctatagcaataaaactaggaatagccccctttcacttctgagtcccagaggttacccaaggcacccctctgacatccggcctgcttcttctcacatgacaaaaactagcccccatctcaatcatataccaaatctctccctcactaaacgtaagccttctcctcactctctcaatcttatccatcatagcaggcagttgaggtggattaaaccaaacccagctacgcaaaatcttagcatactcctcaattacccacataggatgaataatagcagttctaccgtacaaccctaacataaccattcttaatttaactatttatattatcctaactactaccgcattcctactactcaacttaaactccagcaccacgaccctactactatctcgcacctgaaacaagctaacatgactaacacccttaattccatccaccctcctctccctaggaggcctgcccccgctaaccggctttttgcccaaatgggccattatcgaagaattcacaaaaaacaatagcctcatcatccccaccatcatagccaccatcaccctccttaacctctacttctacctacgcctaatctactccacctcaatcacactactccccatatctaacaacgtaaaaataaaatgacagtttgaacatacaaaacccaccccattcctccccacactcatcgcccttaccacgctactcctacctatctccccttttatactaataatcttatagaaatttaggttaaatacagaccaagagccttcaaagccctcagtaagttgcaatacttaatttctgtaacagctaaggactgcaaaaccccactctgcatcaactgaacgcaaatcagccactttaattaagctaagcccttactagaccaatgggacttaaacccacaaacacttagttaacagctaagcaccctaatcaactggcttcaatctacttctcccgccgccgggaaaaaaggcgggagaagccccggcaggtttgaagctgcttcttcgaatttgcaattcaatatgaaaatcacctcggagctggtaaaaagaggcctaacccctgtctttagatttacagtccaatgcttcactcagccattttacctcacccccactgatgttcgccgaccgttgactattctctacaaaccacaaagacattggaacactatacctattattcggcgcatgagctggagtcctaggcacagctctaagcctccttattcgagccgagctgggccagccaggcaaccttctaggtaacgaccacatctacaacgttatcgtcacagcccatgcatttgtaataatcttcttcatagtaatacccatcataatcggaggctttggcaactgactagttcccctaataatcggtgcccccgatatggcgtttccccgcataaacaacataagcttctgactcttacctccctctctcctactcctgctcgcatctgctatagtggaagccggagcaggaacaggttgaacagtctaccctcccttagcagggaactactcccaccctggagcctccgtagacctaaccatcttctccttacacctagcaggtgtctcctctatcttaggggccatcaatttcatcacaacaattatcaatataaaaccccctgccataacccaataccaaacgcccctcttcgtctgatccgtcctaatcacagcagtcctacttctcctatctctcccagtcctagctgctggcatcactatactactaacagaccgcaacctcaacaccaccttcttcgaccccgccggaggaggagaccccattctataccaacacctattctgatttttcggtcaccctgaagtttatattcttatcctaccaggcttcggaataatctcccatattgtaacttactactccggaaaaaaagaaccatttggatacataggtatggtctgagctatgatatcaattggcttcctagggtttatcgtgtgagcacaccatatatttacagtaggaatagacgtagacacacgagcatatttcacctccgctaccataatcatcgctatccccaccggcgtcaaagtatttagctgactcgccacactccacggaagcaatatgaaatgatctgctgcagtgctctgagccctaggattcatctttcttttcaccataggtggcctgactggcattgtattagcaaactcatcactagacatcgtactacacgacacgtactacgttgtagctcacttccactatgtcctatcaataggagctgtatttgccatcataggaggcttcattcactgatttcccctattctcaggctacaccctagaccaaacctacgccaaaatccatttcactatcatattcatcggcgtaaatctaactttcttcccacaacactttctcggcctatccggaatgccccgacgttactcggactaccccgatgcatacaccacatgaaacatcctatcatctgtaggctcattcatttctctaacagcagtaatattaataattttcatgatttgagaagccttcgcttcgaagcgaaaagtcctaatagtagaagaaccctccataaacctggagtgactatatggatgccccccaccctaccacacattcgaagaacccgtatacataaaatctagacaaaaaaggaaggaatcgaaccccccaaagctggtttcaagccaaccccatggcctccatgactttttcaaaaaggtattagaaaaaccatttcataactttgtcaaagttaaattataggctaaatcctatatatcttaatggcacatgcagcgcaagtaggtctacaagacgctacttcccctatcatagaagagcttatcacctttcatgatcacgccctcataatcattttccttatctgcttcctagtcctgtatgcccttttcctaacactcacaacaaaactaactaatactaacatctcagacgctcaggaaatagaaaccgtctgaactatcctgcccgccatcatcctagtcctcatcgccctcccatccctacgcatcctttacataacagacgaggtcaacgatccctcccttaccatcaaatcaattggccaccaatggtactgaacctacgagtacaccgactacggcggactaatcttcaactcctacatacttcccccattattcctagaaccaggcgacctgcgactccttgacgttgacaatcgagtagtactcccgattgaagcccccattcgtataataattacatcacaagacgtcttgcactcatgagctgtccccacattaggcttaaagacagatgcaattcccggacgtctaaaccaaaccactttcaccgctacacgaccgggggtatactacggtcaatgctctgaaatctgtggagcaaaccacagtttcatgcccatcgtcctagaattaattcccctaaaaatctttgaaatagggcccgtatttaccctatagcaccccctctaccccctctagagcccactgtaaagctaacttagcattaaccttttaagttaaagattaagagaaccaacacctctttacagtgaaatgccccaactaaatactaccgtatggcccaccataattacccccatactccttacactattcctcatcacccaactaaaaatattaaacacaaactaccacctacctccctcaccaaagcccataaaaataaaaaattataacaaaccctgagaaccaaaatgaacgaaaatctgttcgcttcattcattgcccccacaatcctaggcctacccgccgcagtactgatcattctatttccccctctattgatccccacctccaaatatctcatcaacaaccgactaatcaccacccaacaatgactaatcaaactaacctcaaaacaaatgataaccatacacaacactaaaggacgaacctgatctcttatactagtatccttaatcatttttattgccacaactaacctcctcggactcctgcctcactcatttacaccaaccacccaactatctataaacctagccatggccatccccttatgagccggcgcagtgattataggctttcgctctaagattaaaaatgccctagcccacttcttaccacaaggcacacctacaccccttatccccatactagttattatcgaaaccatcagcctactcattcaaccaatagccctggccgtacgcctaaccgctaacattactgcaggccacctactcatgcacctaattggaagcaccaccctagcaatatcaaccattaaccttccctctacacttatcatcttcacaattctaattctactgactatcctagaaatcgctgtcgccttaatccaagcctacgttttcacacttctagtaagcctctacctgcacgacaacacataatgacccaccaatcacatgcctatcatatagtaaaacccagcccatgacccctaacaggggccctctcagccctcctaatgacctccggcctagccatgtgatttcacttccactccataacgctcctcatactaggcctactaaccaacacactaaccatataccaatgatggcgcgatgtaacacgagaaagcacataccaaggccaccacacaccacctgtccaaaaaggccttcgatacgggataatcctatttattacctcagaagtttttttcttcgcaggatttttctgagccttttaccactccagcctagcccctaccccccaattaggagggcactggcccccaacaggcatcaccccgctaaatcccctagaagtcccactcctaaacacatccgtattactcgcatcaggagtatcaatcacctgagctcaccatagtctaatagaaaacaaccgaaaccaaataattcaagcactgctcattacaattttactgggtctctattttaccctcctacaagcctcagagtacttcgagtctcccttcaccatttccgacggcatctacggctcaacattttttgtagccacaggcttccacggacttcacgtcattattggctcaactttcctcactatctgcttcatccgccaactaatatttcactttacatccaaacatcactttggcttcgaagccgccgcctgatactggcattttgtagatgtggtttgactatttctgtatgtctccatctattgatgagggtcttactcttttagtataaatagtaccgttaacttccaattaactagttttgacaacattcaaaaaagagtaataaacttcgccttaattttaataatcaacaccctcctagccttactactaataattattacattttgactaccacaactcaacggctacatagaaaaatccaccccttacgagtgcggcttcgaccctatatcccccgcccgcgtccctttctccataaaattcttcttagtagctattaccttcttattatttgatctagaaattgccctccttttacccctaccatgagccctacaaacaactaacctgccactaatagttatgtcatccctcttattaatcatcatcctagccctaagtctggcctatgagtgactacaaaaaggattagactgagccgaattggtatatagtttaaacaaaacgaatgatttcgactcattaaattatgataatcatatttaccaaatgcccctcatttacataaatattatactagcatttaccatctcacttctaggaatactagtatatcgctcacacctcatgtcctccctactatgcctagaaggaataatactatcgctgttcattatagctactctcataaccctcaacacccactccctcttagccaatattgtgcctattgccatactagtctttgccgcctgcgaagcagcggtgggcctagccctactagtctcaatctccaacacatatggcctagactacgtacataacctaaacctactccaatgctaaaactaatcgtcccaacaattatattactaccactgacatgactttccaaaaaacacataatttgaatcaacacaaccacccacagcctaattattagcatcatccctctactattttttaaccaaatcaacaacaacctatttagctgttccccaaccttttcctccgaccccctaacaacccccctcctaatactaactacctgactcctacccctcacaatcatggcaagccaacgccacttatccagtgaaccactatcacgaaaaaaactctacctctctatactaatctccctacaaatctccttaattataacattcacagccacagaactaatcatattttatatcttcttcgaaaccacacttatccccaccttggctatcatcacccgatgaggcaaccagccagaacgcctgaacgcaggcacatacttcctattctacaccctagtaggctcccttcccctactcatcgcactaatttacactcacaacaccctaggctcactaaacattctactactcaccctcactgcccaagaactatcaaactcctgagccaacaacttaatatgactagcttacacaatagcttttatagtaaagatacctctttacggactccacttatgactccctaaagcccatgtcgaagcccccatcgctgggtcaatagtacttgccgcagtactcttgaaactaggcggctatggcataatacgcctcacactcattctcaaccccctgacaaaacacatagcctaccccttccttgtactatccctatgaggcataattataacaagctccatctgcctacgacaaacagacctaaaatcgctcattgcatactcttcaatcagccacatagccctcgtagtaacagccattctcatccaaaccccctgaagcttcaccggcgcagtcattctcataatcgcccacggacttacatcctcattactattctgcctagcaaactcaaactacgaacgcactcacagtcgcatcataatcctctctcaaggacttcaaactctactcccactaatagctttttgatgacttttagcaagcctcgctaacctcgccttaccccccactattaacctactgggagaactctctgtgctagtaaccacgttctcctgatcaaatatcactctcctacttacaggactcaacatactagtcacagccctatactccctctacatatttaccacaacacaatggggctcactcacccaccacattaacaacataaaaccctcattcacacgagaaaacaccctcatgttcatacacctatcccccattctcctcctatccctcaaccccgacatcattaccgggttttcctcttgtaaatatagtttaaccaaaacatcagattgtgaatctgacaacagaggcttacgaccccttatttaccgagaaagctcacaagaactgctaactcatgcccccatgtctaacaacatggctttctcaacttttaaaggataacagctatccattggtcttaggccccaagaattttggtgcaactccaaataaaagtaataaccatgcacactactataaccaccctaaccctaacttccctaattccccccatccttaccaccctcgttaaccctaacaaaaaaaactcatacccccattatgtaaaatccattgtcgcatccacctttattatcagtctcttccccacaacaatattcatgtgcctagaccaagaagttattatctcgaactgacactgagccacaacccaaacaacccagctctccctaagcttcaaactagactacttctccataatattcatccctgtagcattgttcgttacatggtccatcatagaattctcactgtgatatataaactcagacccaaacattaatcagttcttcaaatatctactcatcttcctaattaccatactaatcttagttaccgctaacaacctattccaactgttcatcggctgagagggcgtaggaattatatccttcttgctcatcagttgatgatacgcccgagcagatgccaacacagcagccattcaagcaatcctatacaaccgtatcggcgatatcggtttcatcctcgccttagcatgatttatcctacactccaactcatgagacccacaacaaatagcccttctaaacgctaatccaagcctcaccccactactaggcctcctcctagcagcagcaggcaaatcagcccaattaggtctccacccctgactcccctcagccatagaaggccccaccccagtctcagccctactccactcaagcactatagttgtagcaggaatcttcttactcatccgcttccaccccctagcagaaaatagcccactaatccaaactctaacactatgcttaggcgctatcaccactctgttcgcagcagtctgcgcccttacacaaaatgacatcaaaaaaatcgtagccttctccacttcaagtcaactaggactcataatagttacaatcggcatcaaccaaccacacctagcattcctgcacatctgtacccacgccttcttcaaagccatactatttatgtgctccgggtccatcatccacaaccttaacaatgaacaagatattcgaaaaataggaggactactcaaaaccatacctctcacttcaacctccctcaccattggcagcctagcattagcaggaatacctttcctcacaggtttctactccaaagaccacatcatcgaaaccgcaaacatatcatacacaaacgcctgagccctatctattactctcatcgctacctccctgacaagcgcctatagcactcgaataattcttctcaccctaacaggtcaacctcgcttccccacccttactaacattaacgaaaataaccccaccctactaaaccccattaaacgcctggcagccggaagcctattcgcaggatttctcatcactaacaacatttcccccgcatcccccttccaaacaacaatccccctctacctaaaactcacagccctcgctgtcactttcctaggacttctaacagccctagacctcaactacctaaccaacaaacttaaaataaaatccccactatgcacattttatttctccaacatactcggattctaccctagcatcacacaccgcacaatcccctatctaggccttcttacgagccaaaacctgcccctactcctcctagacctaacctgactagaaaagctattacctaaaacaatttcacagcaccaaatctccacctccatcatcacctcaacccaaaaaggcataattaaactttacttcctctctttcttcttcccactcatcctaaccctactcctaatcacataacctattcccccgagcaatttcaattacaatatatacaccaacaaacaatgttcaaccagtaactactactaatcaacgcccataatcatacaaagcccccgcaccaataggatcctcccgaatcaaccctgacccctctccttcataaattattcagcttcctacactattaaagtttaccacaaccaccaccccatcatactctttcacccacagcaccaatcctacctccatcgctaaccccactaaaacactcaccaagacctcaacccctgacccccatgcctcaggatactcctcaatagccatcgctgtagtatatccaaagacaaccatcattccccctaaataaattaaaaaaactattaaacccatataacctcccccaaaattcagaataataacacacccgaccacaccgctaacaatcaatactaaacccccataaataggagaaggcttagaagaaaaccccacaaaccccattactaaacccacactcaacagaaacaaagcatacatcattattctcgcacggactacaaccacgaccaatgatatgaaaaaccatcgttgtatttcaactacaagaacaccaatgaccccaatacgcaaaattaaccccctaataaaattaattaaccactcactcatcgacctccccaccccatccaacatctccgcatgatgaaacttcggctcactccttggcgcctgcctgatcctccaaatcaccacaggactattcctagccatgcactactcaccagacgcctcaaccgccttttcatcaatcgcccacatcactcgagacgtaaattatggctgaatcatccgctaccttcacgccaatggcgcctcaatattctttatctgcctcttcctacacatcgggcgaggcctatattacggatcatttctctactcagaaacctgaaacatcggcattatcctcctgcttgcaactatagcaacagccttcataggctatgtcctcccgtgaggccaaatatcattctgaggggccacagtaattacaaacttactatccgccatcccatacattgggacagacctagttcaatgaatctgaggaggctactcagtagacagtcccaccctcacacgattctttacctttcacttcatcttgcccttcattattgcagccctagcagcactccacctcctattcttgcacgaaacgggatcaaacaaccccctaggaatcacctcccattccgataaaatcaccttccacccttactacacaatcaaagacgccctcggcttacttctcttccttctctccttaatgacattaacactattctcaccagacctcctaggcgacccagataattataccctagccaaccccttaaacacccctccccacatcaagcccgaatgatatttcctattcgcctacacaattctccgatccgtccctaacaaactaggaggcgtccttgccctattactatccatcctcatcctagcaataatccccatcctccatatatccaaacaacaaagcataatatttcgcccactaagccaatcactttattgactcctagccgcagacctcctcattctaacctgaatcggaggacaaccagtaagctacccttttaccatcattggacaagtagcatccgtactatacttcacaacaatcctaatcctaataccaactatctccctaattgaaaacaaaatactcaaatgggcctgtccttgtagtataaactaatacaccagtcttgtaaaccggagatgaaaacctttttccaaggacaaatcagagaaaaagtctttaactccaccattagcacccaaagctaagattctaatttaaactattctctgttctttcatggggaagcagatttgggtaccacccaagtattgactcacccatcaacaaccgctatgtatttcgtacattactgccagccaccatgaatattgtacggtaccataaatacttgaccacctgtagtacataaaaacccaatccacatcaaaaccccctccccatgcttacaagcaagtacagcaatcaacccccaactatcacacatcaactgcaactccaaagccacccctcacccactaggataccaacaaacctacccacccttaacagtacatagcacataaagccatttaccgtacatagcacattacagtcaaatcccttctcgtccccatggatgacccccctcagataggggtcccttgaccaccatcctccgtgaaatcaatatcccgcacaagagtgctactctcctcgctccgggcccataacacttgggggtagctaaagtgaactgtatccgacatctggttcctacttcagggccataaagcctaaatagcccacacgttccccttaaataagacatcacgatg

SEQ ID NO: 410 - DNA, 16571 bp, Homo sapiens mitochondrial
  3109: "n" refers to a nucleotide at position 3107 of the Cambridge Reference Sequence (CRS, Anderson et al. 1981 Nature 290:457-465), later determined to be absent from the human mtDNA sequence according to the revised CRS (rCRS, Andrews et al. 1999 Nature Genetics 23:147); "n" therefore represents a single nucleotide deletion at a position corresponding to nucleotide 3107 of SEQ ID NO:1 as provided herein.
gatcacaggtctatcaccctattaaccactcacgggagctctccatgcatttggtattttcgtctggggggtatgcacgcgatagcattgcgagacgctggagccggagcaccctatgtcgcagtatctgtctttgattcctgcctcatcctattatttatcgcacctacgttcaatattacaggcgaacatacttactaaagtgtgttaattaattaatgcttgtaggacataataataacaattgaatgtctgcacagccgctttccacacagacatcataacaaaaaatttccaccaaaccccccctcccccccgcttctggccacagcacttaaacacatctctgccaaaccccaaaaacaaagaaccctaacaccagcctaaccagatttcaaattttatcttttggcggtatgcacttttaacagtcaccccccaactaacacattattttcccctcccactcccatactaccaatctcatcaatacaacccccgcccatcctacccagcacacacacaccgctgctaaccccataccccgaaccaaccaaaccccaaagacaccccccacagtttatgtagcttacctcctcaaagcaatacactgaaaatgtttagacgggctcacatcaccccataaacaaataggtttggtcctagcctttctattagctcttagtaagattacacatgcaagcatccccgttccagtgagttcaccctctaaatcaccacgatcaaaagggacaagcatcaagcacgcagcaatgcagctcaaaacgcttagcctagccacacccccacgggaaacagcagtgattaacctttagcaataaacgaaagtttaactaagctatactaaccccagggttggtcaatttcgtgccagccaccgcggtcacacgattaacccaagtcaatagaagccggcgtaaagagtgttttagatcaccccctccccaataaagctaaaactcacctgagttgtaaaaaactccagttgacacaaaatagactacgaaagtggctttaacatatctgaacacacaatagctaagacccaaactgggattagataccccactatgcttagccctaaacctcaacagttaaatcaacaaaactgctcgccagaacactacgagccacagcttaaaactcaaaggacctggcggtgcttcatatccctctagaggagcctgttctgtaatcgataaaccccgatcaacctcaccacctcttgctcagcctatataccgccatcttcagcaaaccctgatgaaggctacaaagtaagcgcaagtacccacgtaaagacgttaggtcaaggtgtagcccatgaggtggcaagaaatgggctacattttctaccccagaaaactacgatagcccttatgaaacttaagggtcgaaggtggatttagcagtaaactgagagtagagtgcttagttgaacagggccctgaagcgcgtacacaccgcccgtcaccctcctcaagtatacttcaaaggacatttaactaaaacccctacgcatttatatagaggagacaagtcgtaacatggtaagtgtactggaaagtgcacttggacgaaccagagtgtagcttaacacaaagcacccaacttacacttaggagatttcaacttaacttgaccgctctgagctaaacctagccccaaacccactccaccttactaccagacaaccttagccaaaccatttacccaaataaagtataggcgatagaaattgaaacctggcgcaatagatatagtaccgcaagggaaagatgaaaaattataaccaagcataatatagcaaggactaacccctataccttctgcataatgaattaactagaaataactttgcaaggagagccaaagctaagacccccgaaaccagacgagctacctaagaacagctaaaagagcacacccgtctatgtagcaaaatagtgggaagatttataggtagaggcgacaaacctaccgagcctggtgatagctggttgtccaagatagaatcttagttcaactttaaatttgcccacagaaccctctaaatccccttgtaaatttaactgttagtccaaagaggaacagctctttggacactaggaaaaaaccttgtagagagagtaaaaaatttaacacccatagtaggcctaaaagcagccaccaattaagaaagcgttcaagctcaacacccactacctaaaaaatcccaaacatataactgaactcctcacacccaattggaccaatctatcaccctatagaagaactaatgttagtataagtaacatgaaaacattctcctccgcataagcctgcgtcagattaaaacactgaactgacaattaacagcccaatatctacaatcaaccaacaagtcattattaccctcactgtcaacccaacacaggcatgctcataaggaaaggttaaaaaaagtaaaaggaactcggcaaatcttaccccgcctgtttaccaaaaacatcacctctagcatcaccagtattagaggcaccgcctgcccagtgacacatgtttaacggccgcggtaccctaaccgtgcaaaggtagcataatcacttgttccttaaatagggacctgtatgaatggctccacgagggttcagctgtctcttacttttaaccagtgaaattgacctgcccgtgaagaggcgggcataacacagcaagacgagaagaccctatggagctttaatttattaatgcaaacagtacctaacaaacccacaggtcctaaactaccaaacctgcattaaaaatttcggttggggcgacctcggagcagaacccaacctccgagcagtacatgctaagacttcaccagtcaaagcgaactactatactcaattgatccaataacttgaccaacggaacaagttaccctagggataacagcgcaatcctattctagagtccatatcaacaatagggtttacgacctcgatgttggatcaggacatcccaatggtgcagccgctattaaaggttcgtttgttcaacgattaaagtcctacgtgatctgagttcagaccggagtaatccaggtcggtttctatctacnttcaaattcctccctgtacgaaaggacaagagaaataaggcctacttcacaaagcgccttcccccgtaaatgatatcatctcaacttagtattatacccacacccacccaagaacagggtttgttaagatggcagagcccggtaatcgcataaaacttaaaactttacagtcagaggttcaattcctcttcttaacaacatacccatggccaacctcctactcctcattgtacccattctaatcgcaatggcattcctaatgcttaccgaacgaaaaattctaggctatatacaactacgcaaaggccccaacgttgtaggcccctacgggctactacaacccttcgctgacgccataaaactcttcaccaaagagcccctaaaacccgccacatctaccatcaccctctacatcaccgccccgaccttagctctcaccatcgctcttctactatgaacccccctccccatacccaaccccctggtcaacctcaacctaggcctcctatttattctagccacctctagcctagccgtttactcaatcctctgatcagggtgagcatcaaactcaaactacgccctgatcggcgcactgcgagcagtagcccaaacaatctcatatgaagtcaccctagccatcattctactatcaacattactaataagtggctcctttaacctctccacccttatcacaacacaagaacacctctgattactcctgccatcatgacccttggccataatatgatttatctccacactagcagagaccaaccgaacccccttcgaccttgccgaaggggagtccgaactagtctcaggcttcaacatcgaatacgccgcaggccccttcgccctattcttcatagccgaatacacaaacattattataataaacaccctcaccactacaatcttcctaggaacaacatatgacgcactctcccctgaactctacacaacatattttgtcaccaagaccctacttctaacctccctgttcttatgaattcgaacagcatacccccgattccgctacgaccaactcatacacctcctatgaaaaaacttcctaccactcaccctagcattacttatatgatatgtctccatacccattacaatctccagcattccccctcaaacctaagaaatatgtctgataaaagagttactttgatagagtaaataataggagcttaaacccccttatttctaggactatgagaatcgaacccatccctgagaatccaaaattctccgtgccacctatcacaccccatcctaaagtaaggtcagctaaataagctatcgggcccataccccgaaaatgttggttatacccttcccgtactaattaatcccctggcccaacccgtcatctactctaccatctttgcaggcacactcatcacagcgctaagctcgcactgattttttacctgagtaggcctagaaataaacatgctagcttttattccagttctaaccaaaaaaataaaccctcgttccacagaagctgccatcaagtatttcctcacgcaagcaaccgcatccataatccttctaatagctatcctcttcaacaatatactctccggacaatgaaccataaccaatactaccaatcaatactcatcattaataatcatagtggctatagcaataaaactaggaatagccccctttcacttctgagtcccagaggttacccaaggcacccctctgacatccggcctgcttcttctcacatgacaaaaactagcccccatctcaatcatataccaaatctctccctcactaaacgtaagccttctcctcactctctcaatcttatccatcatagcaggcagttgaggtggattaaaccaaacccagctacgcaaaatcttagcatactcctcaattacccacataggatgaataatagcagttctaccgtacaaccctaacataaccattcttaatttaactatttatattatcctaactactaccgcattcctactactcaacttaaactccagcaccacgaccctactactatctcgcacctgaaacaagctaacatgactaacacccttaattccatccaccctcctctccctaggaggcctgcccccgctaaccggctttttgcccaaatgggccattatcgaagaattcacaaaaaacaatagcctcatcatccccaccatcatagccaccatcaccctccttaacctctacttctacctacgcctaatctactccacctcaatcacactactccccatatctaacaacgtaaaaataaaatgacagtttgaacatacaaaacccaccccattcctccccacactcatcgcccttaccacgctactcctacctatctccccttttatactaataatcttatagaaatttaggttaaatacagaccaagagccttcaaagccctcagtaagttgcaatacttaatttctgtaacagctaaggactgcaaaaccccactctgcatcaactgaacgcaaatcagccactttaattaagctaagcccttactagaccaatgggacttaaacccacaaacacttagttaacagctaagcaccctaatcaactggcttcaatctacttctcccgccgccgggaaaaaaggcgggagaagccccggcaggtttgaagctgcttcttcgaatttgcaattcaatatgaaaatcacctcggagctggtaaaaagaggcctaacccctgtctttagatttacagtccaatgcttcactcagccattttacctcacccccactgatgttcgccgaccgttgactattctctacaaaccacaaagacattggaacactatacctattattcggcgcatgagctggagtcctaggcacagctctaagcctccttattcgagccgagctgggccagccaggcaaccttctaggtaacgaccacatctacaacgttatcgtcacagcccatgcatttgtaataatcttcttcatagtaatacccatcataatcggaggctttggcaactgactagttcccctaataatcggtgcccccgatatggcgtttccccgcataaacaacataagcttctgactcttacctccctctctcctactcctgctcgcatctgctatagtggaggccggagcaggaacaggttgaacagtctaccctcccttagcagggaactactcccaccctggagcctccgtagacctaaccatcttctccttacacctagcaggtgtctcctctatcttaggggccatcaatttcatcacaacaattatcaatataaaaccccctgccataacccaataccaaacgcccctcttcgtctgatccgtcctaatcacagcagtcctacttctcctatctctcccagtcctagctgctggcatcactatactactaacagaccgcaacctcaacaccaccttcttcgaccccgccggaggaggagaccccattctataccaacacctattctgatttttcggtcaccctgaagtttatattcttatcctaccaggcttcggaataatctcccatattgtaacttactactccggaaaaaaagaaccatttggatacataggtatggtctgagctatgatatcaattggcttcctagggtttatcgtgtgagcacaccatatatttacagtaggaatagacgtagacacacgagcatatttcacctccgctaccataatcatcgctatccccaccggcgtcaaagtatttagctgactcgccacactccacggaagcaatatgaaatgatctgctgcagtgctctgagccctaggattcatctttcttttcaccgtaggtggcctgactggcattgtattagcaaactcatcactagacatcgtactacacgacacgtactacgttgtagcccacttccactatgtcctatcaataggagctgtatttgccatcataggaggcttcattcactgatttcccctattctcaggctacaccctagaccaaacctacgccaaaatccatttcactatcatattcatcggcgtaaatctaactttcttcccacaacactttctcggcctatccggaatgccccgacgttactcggactaccccgatgcatacaccacatgaaacatcctatcatctgtaggctcattcatttctctaacagcagtaatattaataattttcatgatttgagaagccttcgcttcgaagcgaaaagtcctaatagtagaagaaccctccataaacctggagtgactatatggatgccccccaccctaccacacattcgaagaacccgtatacataaaatctagacaaaaaaggaaggaatcgaaccccccaaagctggtttcaagccaaccccatggcctccatgactttttcaaaaaggtattagaaaaaccatttcataactttgtcaaagttaaattataggctaaatcctatatatcttaatggcacatgcagcgcaagtaggtctacaagacgctacttcccctatcatagaagagcttatcacctttcatgatcacgccctcataatcattttccttatctgcttcctagtcctgtatgcccttttcctaacactcacaacaaaactaactaatactaacatctcagacgctcaggaaatagaaaccgtctgaactatcctgcccgccatcatcctagtcctcatcgccctcccatccctacgcatcctttacataacagacgaggtcaacgatccctcccttaccatcaaatcaattggccaccaatggtactgaacctacgagtacaccgactacggcggactaatcttcaactcctacatacttcccccattattcctagaaccaggcgacctgcgactccttgacgttgacaatcgagtagtactcccgattgaagcccccattcgtataataattacatcacaagacgtcttgcactcatgagctgtccccacattaggcttaaaaacagatgcaattcccggacgtctaaaccaaaccactttcaccgctacacgaccgggggtatactacggtcaatgctctgaaatctgtggagcaaaccacagtttcatgcccatcgtcctagaattaattcccctaaaaatctttgaaatagggcccgtatttaccctatagcaccccctctaccccctctagagcccactgtaaagctaacttagcattaaccttttaagttaaagattaagagaaccaacacctctttacagtgaaatgccccaactaaatactaccgtatggcccaccataattacccccatactccttacactattcctcatcacccaactaaaaatattaaacacaaactaccacctacctccctcaccaaagcccataaaaataaaaaattataacaaaccctgagaaccaaaatgaacgaaaatctgttcgcttcattcattgcccccacaatcctaggcctacccgccgcagtactgatcattctatttccccctctattgatccccacctccaaatatctcatcaacaaccgactaatcaccacccaacaatgactaatcaaactaacctcaaaacaaatgataaccatacacaacactaaaggacgaacctgatctcttatactagtatcctcaatcatttttattgccacaactaacctcctcggactcctgcctcactcatttacaccaaccacccaactatctataaacctagccatggccatccccttatgagcgggcgcagtgattataggctttcgctctaagattaaaaatgccctagcccacttcttaccacaaggcacacctacaccccttatccccatactagttattatcgaaaccatcagcctactcattcaaccaatagccctggccgtacgcctaaccgctaacattactgcaggccacctactcatgcacctaattggaagcgccaccctagcaatatcaaccattaaccttccctctacacttatcatcttcacaattctaattctactgactatcctagaaatcgctgtcgccttaatccaagcctacgttttcacacttctagtaagcctctacctgcacgacaacacataatgacccaccaatcacatgcctatcatatagtaaaacccagcccatgacccctaacaggggccctctcagccctcctaatgacctccggcctagccatgtgatttcacttccactccataacgctcctcatactaggcctactaaccaacacactaaccatataccaatgatggcgcgatgtaacacgagaaagcacataccaaggccaccacacaccacctgtccaaaaaggccttcgatacgggataatcctatttattacctcagaagtttttttcttcgcaggatttttctgagccttttaccactccagcctagcccctaccccccaattaggagggcactggcccccaacaggcatcaccccgctaaatcccctagaagtcccactcctaaacacatccgtattactcgcatcaggagtatcaatcacctgagctcaccatagtctaatagaaaacaaccgaaaccaaataattcaagcactgcttattacaattttactgggtctctattttaccctcctacaagcctcagagtacttcgagtctcccttcaccatttccgacggcatctacggctcaacattttttgtagccacaggcttccacggacttcacgtcattattggctcaactttcctcactatctgcttcatccgccaactaatatttcactttacatccaaacatcactttggcttcgaagccgccgcctgatactggcattttgtagatgtggtttgactatttctgtatgtctccatctattgatgagggtcttactcttttagtataaatagtaccgttaacttccaattaactagttttgacaacattcaaaaaagagtaataaacttcgccttaattttaataatcaacaccctcctagccttactactaataattattacattttgactaccacaactcaacggctacatagaaaaatccaccccttacgagtgcggcttcgaccctatatcccccgcccgcgtccctttctccataaaattcttcttagtagctattaccttcttattatttgatctagaaattgccctccttttacccctaccatgagccctacaaacaactaacctgccactaatagttatgtcatccctcttattaatcatcatcctagccctaagtctggcctatgagtgactacaaaaaggattagactgaaccgaattggtatatagtttaaacaaaacgaatgatttcgactcattaaattatgataatcatatttaccaaatgcccctcatttacataaatattatactagcatttaccatctcacttctaggaatactagtatatcgctcacacctcatatcctccctactatgcctagaaggaataatactatcgctgttcattatagctactctcataaccctcaacacccactccctcttagccaatattgtgcctattgccatactagtctttgccgcctgcgaagcagcggtgggcctagccctactagtctcaatctccaacacatatggcctagactacgtacataacctaaacctactccaatgctaaaactaatcgtcccaacaattatattactaccactgacatgactttccaaaaaacacataatttgaatcaacacaaccacccacagcctaattattagcatcatccctctactattttttaaccaaatcaacaacaacctatttagctgttccccaaccttttcctccgaccccctaacaacccccctcctaatactaactacctgactcctacccctcacaatcatggcaagccaacgccacttatccagtgaaccactatcacgaaaaaaactctacctctctatactaatctccctacaaatctccttaattataacattcacagccacagaactaatcatattttatatcttcttcgaaaccacacttatccccaccttggctatcatcacccgatgaggcaaccagccagaacgcctgaacgcaggcacatacttcctattctacaccctagtaggctcccttcccctactcatcgcactaatttacactcacaacaccctaggctcactaaacattctactactcactctcactgcccaagaactatcaaactcctgagccaacaacttaatatgactagcttacacaatagcttttatagtaaagatacctctttacggactccacttatgactccctaaagcccatgtcgaagcccccatcgctgggtcaatagtacttgccgcagtactcttaaaactaggcggctatggtataatacgcctcacactcattctcaaccccctgacaaaacacatagcctaccccttccttgtactatccctatgaggcataattataacaagctccatctgcctacgacaaacagacctaaaatcgctcattgcatactcttcaatcagccacatagccctcgtagtaacagccattctcatccaaaccccctgaagcttcaccggcgcagtcattctcataatcgcccacgggcttacatcctcattactattctgcctagcaaactcaaactacgaacgcactcacagtcgcatcataatcctctctcaaggacttcaaactctactcccactaatagctttttgatgacttctagcaagcctcgctaacctcgccttaccccccactattaacctactgggagaactctctgtgctagtaaccacgttctcctgatcaaatatcactctcctacttacaggactcaacatactagtcacagccctatactccctctacatatttaccacaacacaatggggctcactcacccaccacattaacaacataaaaccctcattcacacgagaaaacaccctcatgttcatacacctatcccccattctcctcctatccctcaaccccgacatcattaccgggttttcctcttgtaaatatagtttaaccaaaacatcagattgtgaatctgacaacagaggcttacgaccccttatttaccgagaaagctcacaagaactgctaactcatgcccccatgtctaacaacatggctttctcaacttttaaaggataacagctatccattggtcttaggccccaaaaattttggtgcaactccaaataaaagtaataaccatgcacactactataaccaccctaaccctgacttccctaattccccccatccttaccaccctcgttaaccctaacaaaaaaaactcatacccccattatgtaaaatccattgtcgcatccacctttattatcagtctcttccccacaacaatattcatgtgcctagaccaagaagttattatctcgaactgacactgagccacaacccaaacaacccagctctccctaagcttcaaactagactacttctccataatattcatccctgtagcattgttcgttacatggtccatcatagaattctcactgtgatatataaactcagacccaaacattaatcagttcttcaaatatctactcatcttcctaattaccatactaatcttagttaccgctaacaacctattccaactgttcatcggctgagagggcgtaggaattatatccttcttgctcatcagttgatgatacgcccgagcagatgccaacacagcagccattcaagcaatcctatacaaccgtatcggcgatatcggtttcatcctcgccttagcatgatttatcctacactccaactcatgagacccacaacaaatagcccttctaaacgctaatccaagcctcaccccactactaggcctcctcctagcagcagcaggcaaatcagcccaattaggtctccacccctgactcccctcagccatagaaggccccaccccagtctcagccctactccactcaagcactatagttgtagcaggaatcttcttactcatccgcttccaccccctagcagaaaatagcccactaatccaaactctaacactatgcttaggcgctatcaccactctgttcgcagcagtctgcgcccttacacaaaatgacatcaaaaaaatcgtagccttctccacttcaagtcaactaggactcataatagttacaatcggcatcaaccaaccacacctagcattcctgcacatctgtacccacgccttcttcaaagccatactatttatgtgctccgggtccatcatccacaaccttaacaatgaacaagatattcgaaaaataggaggactactcaaaaccatacctctcacttcaacctccctcaccattggcagcctagcattagcaggaatacctttcctcacaggtttctactccaaagaccacatcatcgaaaccgcaaacatatcatacacaaacgcctgagccctatctattactctcatcgctacctccctgacaagcgcctatagcactcgaataattcttctcaccctaacaggtcaacctcgcttccccacccttactaacattaacgaaaataaccccaccctactaaaccccattaaacgcctggcagccggaagcctattcgcaggatttctcattactaacaacatttcccccgcatcccccttccaaacaacaatccccctctacctaaaactcacagccctcgctgtcactttcctaggacttctaacagccctagacctcaactacctaaccaacaaacttaaaataaaatccccactatgcacattttatttctccaacatactcggattctaccctagcatcacacaccgcacaatcccctatctaggccttcttacgagccaaaacctgcccctactcctcctagacctaacctgactagaaaagctattacctaaaacaatttcacagcaccaaatctccacctccatcatcacctcaacccaaaaaggcataattaaactttacttcctctctttcttcttcccactcatcctaaccctactcctaatcacataacctattcccccgagcaatctcaattacaatatatacaccaacaaacaatgttcaaccagtaactactactaatcaacgcccataatcatacaaagcccccgcaccaataggatcctcccgaatcaaccctgacccctctccttcataaattattcagcttcctacactattaaagtttaccacaaccaccaccccatcatactctttcacccacagcaccaatcctacctccatcgctaaccccactaaaacactcaccaagacctcaacccctgacccccatgcctcaggatactcctcaatagccatcgctgtagtatatccaaagacaaccatcattccccctaaataaattaaaaaaactattaaacccatataacctcccccaaaattcagaataataacacacccgaccacaccgctaacaatcaatactaaacccccataaataggagaaggcttagaagaaaaccccacaaaccccattactaaacccacactcaacagaaacaaagcatacatcattattctcgcacggactacaaccacgaccaatgatatgaaaaaccatcgttgtatttcaactacaagaacaccaatgaccccaatacgcaaaactaaccccctaataaaattaattaaccactcattcatcgacctccccaccccatccaacatctccgcatgatgaaacttcggctcactccttggcgcctgcctgatcctccaaatcaccacaggactattcctagccatgcactactcaccagacgcctcaaccgccttttcatcaatcgcccacatcactcgagacgtaaattatggctgaatcatccgctaccttcacgccaatggcgcctcaatattctttatctgcctcttcctacacatcgggcgaggcctatattacggatcatttctctactcagaaacctgaaacatcggcattatcctcctgcttgcaactatagcaacagccttcataggctatgtcctcccgtgaggccaaatatcattctgaggggccacagtaattacaaacttactatccgccatcccatacattgggacagacctagttcaatgaatctgaggaggctactcagtagacagtcccaccctcacacgattctttacctttcacttcatcttgcccttcattattgcagccctagcagcactccacctcctattcttgcacgaaacgggatcaaacaaccccctaggaatcacctcccattccgataaaatcaccttccacccttactacacaatcaaagacgccctcggcttacttctcttccttctctccttaatgacattaacactattctcaccagacctcctaggcgacccagacaattataccctagccaaccccttaaacacccctccccacatcaagcccgaatgatatttcctattcgcctacacaattctccgatccgtccctaacaaactaggaggcgtccttgccctattactatccatcctcatcctagcaataatccccatcctccatatatccaaacaacaaagcataatatttcgcccactaagccaatcactttattgactcctagccgcagacctcctcattctaacctgaatcggaggacaaccagtaagctacccttttaccatcattggacaagtagcatccgtactatacttcacaacaatcctaatcctaataccaactatctccctaattgaaaacaaaatactcaaatgggcctgtccttgtagtataaactaatacaccagtcttgtaaaccggagatgaaaacctttttccaaggacaaatcagagaaaaagtctttaactccaccattagcacccaaagctaagattctaatttaaactattctctgttctttcatggggaagcagatttgggtaccacccaagtattgactcacccatcaacaaccgctatgtatttcgtacattactgccagccaccatgaatattgtacggtaccataaatacttgaccacctgtagtacataaaaacccaatccacatcaaaaccccccccccatgcttacaagcaagtacagcaatcaaccctcaactatcacacatcaactgcaactccaaagccacccctcacccactaggataccaacaaacctacccacccttaacagtacatagtacataaagccatttaccgtacatagcacattacagtcaaatcccttctcgtccccatggatgacccccctcagataggggtcccttgaccaccatcctccgtgaaatcaatatcccgcacaagagtgctactctcctcgctccgggcccataacacttgggggtagctaaagtgaactgtatccgacatctggttcctacttcagggccataaagcctaaatagcccacacgttccccttaaataagacatcacgatg

SEQ ID NO: 411 - DNA, 16571 bp, Homo sapiens mitochondrial; identical to SEQ ID NO: 352
  3109: "n" refers to a nucleotide at position 3107 of the Cambridge Reference Sequence (CRS, Anderson et al. 1981 Nature 290:457-465), later determined to be absent from the human mtDNA sequence according to the revised CRS (rCRS, Andrews et al. 1999 Nature Genetics 23:147); "n" therefore represents a single nucleotide deletion at a position corresponding to nucleotide 3107 of SEQ ID NO:1 as provided herein.

SEQ ID NO: 412 - DNA, 16568 bp, Homo sapiens mitochondrial
  3106: "n" refers to a nucleotide at position 3107 of the Cambridge Reference Sequence (CRS, Anderson et al. 1981 Nature 290:457-465), later determined to be absent from the human mtDNA sequence according to the revised CRS (rCRS, Andrews et al. 1999 Nature Genetics 23:147); "n" therefore represents a single nucleotide deletion at a position corresponding to nucleotide 3107 of SEQ ID NO:1 as provided herein.
gatcacaggtctatcaccctattaaccactcacgggagctctccatgcatttggtattttcgtttggggggtgtgcacgcgatagcattgcgagacgctggagccggagcaccctatgtcgcagtatctgtctttgattcctgccccatcctgttatttatcgcacctacgttcaatattacaggcgaacatacttactaaagtgtgttaattaattaatgcttgtaggacatagtaataacaattgaatgtctgcacagccgctttccacacagacatcataacaaaaaatttccaccaaaccccccctcccccgccttctggccacagcacttaaacacatctctgccaaaccccaaaaacaaagaaccctaacaccagcctaaccagatttcaaattttatcttttggcggtatgcacttttaacagtcaccccccaactaacacattattttcccctcccactcccatactactaatctcatcaatacaacccccgcccatcctacccagcacacacaccgctgctaaccccataccccgaaccaaccaaaccccaaagacaccccccacagtttatgtagcttacctcctcaaagcaatacactgaaaatgtttagacgggctcacatcaccccataaacaaataggtttggtcctggcctttctattagctcttagtaagattacacatgcaagcatccccgttccagtgagttcaccctctaaatcaccacgatcaaaagggacaagcatcaagcacgcagcaatgcagctcaaaacgcttagcctagccacacccccacgggaaacagcagtgattaacctttagcaataaacgaaagtttaactaagctatactaaccccagggttggtcaatttcgtgccagccaccgcggtcacacgattaacccaagtcaatagaagccggcgtaaagagtgttttagatcaccccctccccaataaagctaaaactcacctgagttgtaaaaaactccagttgacacaaaatagactacgaaagtggctttaacatatctgaacacacaatagctaagacccaaactgggattagataccccactatgcttagccctaaacctcaacagttaaatcaacaaaactgctcgccagaacactacgagccacagcttaaaactcaaaggacctggcggtgcttcatatccctctagaggagcctgttctgtaatcgataaaccccgatcaacctcaccacctcttgctcagcctatataccgccatcttcagcaaaccctgatgaaggctacaaagtaagcgcaagtacccacgtaaagacgttaggtcaaggtgtagcccatgaggtggcaagaaatgggctacattttctaccccagaaaactacgatagcccttatgaaacttaagggtcgaaggtggatttagcagtaaactgagagtagagtgcttagttgaacagggccctgaagcgcgtacacaccgcccgtcaccctcctcaagtatacttcaaaggacatttaactaaaacccctacgcatttatatagaggagacaagtcgtaacatggtaagtgtactggaaagtgcacttggacgaaccagagtgtagcttaacacaaagcacccaacttacacttaggagatttcaacttaacttgaccgctctgagctaaacctagccccaaacccactccaccttactaccagacaaccttagccaaaccatttacccagataaagtataggcgatagaaattgaaacctggcgcaatagatatagtaccgcaagggaaagatgaaaaattataaccaagcataatatagcaaggactaacccctataccttctgcataatgaattaactagaaataactttgcaaggagagccaaagctaagacccccgaaaccagacgagctacctaagaacagctaaaagagcacacccgtctatgtagcaaaatagtgggaagatttataggtagaggcgacaaacctaccgagcctggtgatagctggttgtccaagatagaatcttagttcaactttaaatttgcccacagaaccctctaaatccccttgtaaatttaactgttagtccaaagaggaacagctctttggacactaggaaaaaaccttgtagagagagtaaaaaatttaacacccatagtaggcctaaaagcagccaccaattaagaaagcgttcaagctcaacacccactacctaaaaaatcccaaacatataactgaactcctcacacccaattggaccaatctatcaccctatagaagaactaatgttagtataagtaacatgaaaacattctcctccgcataagcctgcgtcagattaaaacactgaactgacaattaacagcccaatatctacaatcaaccaacaagtcattattaccctcactgtcaacccaacacaggcatgctcataaggaaaggttaaaaaaagtaaaaggaactcggcaaatcttaccccgcctgtttaccaaaaacatcacctctagcatcaccagtattagaggcaccgcctgcccagtgacacatgtttaacggccgcggtaccctaaccgtgcaaaggtagcataatcacttgttccttaaatagggacctgtatgaatggctccacgagggttcagctgtctcttacttttaaccagtgaaattgacctgcccgtgaagaggcgggcatgacacagcaagacgagaagaccctatggagctttaatttattaatgcaaacagtacctaacaaacccacaggtcctaaactaccaaacctgcattaaaaatttcggttggggcgacctcggagcagaacccaacctccgagcagtacatgctaagacttcaccagtcaaagcgaactactatactcaattgatccaataacttgaccaacggaacaagttaccctagggataacagcgcaatcctattctagagtccatatcaacaatagggtttacgacctcgatgttggatcaggacatcccgatggtgcagccgctattaaaggttcgtttgttcaacgattaaagtcctacgtgatctgagttcagaccggagtaatccaggtcggtttctatctacnttcaaattcctccctgtacgaaaggacaagagaaataaggcctacttcacaaagcgccttcccccgtaaatgatatcatctcaacttagtattatacccacacccacccaagaacagggtttgttaagatggcagagcccggtaatcgcataaaacttaaaactttacagtcagaggttcaattcctcttcttaacaacatactcatggccaacctcctactcctcattgtacccattctaatcgcaatggcattcctaatgcttaccgaacgaaaaattctaggctatatacaactacgcaaaggccccaacgttgtaggcccctacgggctactacaacccttcgctgacgccataaaactcttcaccaaagagcccctaaaacccgccacatctaccatcaccctctacatcaccgccccgaccttagctctcaccatcgctcttctactatgaacccccctccccatacccaaccccctggtcaacctcaacctaggcctcctatttattctagccacctctagcctagccgtttactcaatcctctgatcagggtgagcatcaaactcaaactacgccctgatcggcgcactgcgagcagtagcccaaacaatctcatatgaagtcaccctagccatcattctactatcaacattactaataagtggctcctttaacctctccacccttatcacaacacaagaacacctctgattactcctgccatcatgacccttggccataatatgatttatctccacactagcagagaccaaccgaacccccttcgaccttgccgaaggggagtccgaactagtctcaggcttcaacatcgaatacgccgcaggccccttcgccctattcttcatagccgaatacacaaacattattataataaacaccctcaccactacaatcttcctaggaacaacatatgacgcactctcccctgaactctacacaacatattttgtcaccaagaccctacttctaacctccctgttcttatgaattcgaacagcatacccccgattccgctacgaccaactcatacacctcctatgaaaaaacttcctaccactcaccctagcattacttatatgatatgtctccatacccattacaatctccagcatcccccctcaaacctaagaaatatgtctgataaaagagttactttgatagagtaaataataggagcttaaacccccttatttctaggactatgagaatcgaacccatccctgagaatccaaaattctccgtgccacctatcacaccccatcctaaagtaaggtcagctaaataagctatcgggcccataccccgaaaatgttggttatacccttcccgtactaattaatcccctggcccaacccgtcatctactctaccatctttgcaggcacactcatcacagcgctaagctcgcactgattttttacctgagtaggcctagaaataaacatgctagcttttattccagttctaaccaaaaaaataaaccctcgttccacagaagctgccatcaagtatttcctcacgcaagcaaccgcatccataatccttctaatagctatcctcttcaacaatatactctccggacaatgaaccataaccaatactaccaatcaatactcatcattaataatcataatggctatagcaataaaactaggaatagccccctttcacttctgagtcccagaggttgcccaaggcacccctctgacatccggcctgcttcttctcacatgacaaaaactagcccccatctcaatcatataccaaatctctccctcactaaacgtaagccttctcctcactctctcaatcttatccatcatagcaggcagttgaggtggattaaaccaaacccagctacgcaaaatcttagcatactcctcaattacccacataggatgaataatagcagttctaccgtacaaccctaacataaccattcttaatttaactatttatattatcctaactactaccgcattcctactactcaacttaaactccagcaccacgaccctactactatctcgcacctgaaacaagctaacatgactaacacccttaattccatccaccctcctctccctaggaggcctgcccccgctaaccggctttttgcccaaatgggccattatcgaagaattcacaaaaaacaatagcctcatcatccccaccatcatagccaccatcaccctccttaacctctacttctacctacgcctaatctactccacctcaatcacactactccccatatctaacaacgtaaaaataaaatgacagtttgaacatacaaaacccaccccattcctccccacactcatcgcccttaccacgctactcctacctatctccccttttatactaataatcttatagaaatttaggttaaatacagaccaagagccttcaaagccctcagtaagttgcaatacttaatttctgtaacagctaaggactgcaaaaccccactctgcatcaactgaacgcaaatcagccactttaattaagctaagcccttactagaccaatgggacttaaacccacaaacacttagttaacagctaagcaccctaatcaactggcttcaatctacttctcccgccgccgggaaaaaaggcgggagaagccccggcaggtttgaagctgcttcttcgaatttgcaattcaatatgaaaatcacctcggagctggtaaaaagaggcctaacccctgtctttagatttacagtccaatgcttcactcagccattttacctcacccccactgatgttcgccgaccgttgactattctctacaaaccacaaagacattggaacactatacctattattcggcgcatgagctggagtcctaggcacagctctaagcctccttattcgagccgagctgggccagccaggcaaccttctaggtaacgaccacatctacaacgttatcgtcacagcccatgcatttgtaataatcttcttcatagtaatacccatcataatcggaggctttggcaactgactagttcccctaataatcggtgcccccgatatggcgtttccccgcataaacaacataagcttctgactcttacctccctctctcctactcctgctcgcatctgctatagtggaggccggagcaggaacaggttgaacagtctaccctcccttagcagggaactactcccaccctggagcctccgtagacctaaccatcttctccttacacctagcaggtgtctcctctatcttaggggccatcaatttcatcacaacaattatcaatataaaaccccctgccataacccaataccaaacgcccctcttcgtctgatccgtcctaatcacagcagtcctacttctcctatctctcccagtcctagctgctggcatcactatactactaacagaccgcaacctcaacaccaccttcttcgaccccgccggaggaggagaccccattctataccaacacctattctgatttttcggtcaccctgaagtttatattcttatcctaccaggcttcggaataatctcccatattgtaacttactactccggaaaaaaagaaccatttggatacataggtatggtctgagctatgatatcaattggcttcctagggtttatcgtgtgagcacaccatatatttacagtaggaatagacgtagacacacgagcatatttcacctccgctaccataatcatcgctatccccaccggcgtcaaagtatttagctgactcgccacactccacggaagcaatatgaaatgatctgctgcagtgctctgagccctaggattcatctttcttttcaccgtaggtggcctgactggcattgtattagcaaactcatcactagacatcgtactacacgacacgtactacgttgtagctcacttccactatgtcctatcaataggagctgtatttgccatcataggaggcttcattcactgatttcccctattctcaggctacaccctagaccaaacctacgccaaaatccatttcactatcatattcatcggcgtaaatctaactttcttcccacaacactttctcggcctatccggaatgccccgacgttactcggactaccccgatgcatacaccacatgaaacatcctatcatctgtaggctcattcatttctctaacagcagtaatattaataattttcatgatttgagaagccttcgcttcgaagcgaaaagtcctaatagtagaagaaccctccataaacctggagtgactatatggatgccccccaccctaccacacattcgaagaacccgtatacataaaatctagacaaaaaaggaaggaatcgaaccccccaaagctggtttcaagccaaccccatggcctccatgactttttcaaaaaggtattagaaaaaccatttcataactttgtcaaagttaaattataggctaaatcctatatatcttaatggcacatgcagcgcaagtaggtctacaagacgctacttcccctatcatagaagagcttatcacctttcatgatcacgccctcataatcattttccttatctgcttcctagtcctgtatgcccttttcctaacactcacaacaaaactaactaatactaacatctcagacgctcaggaaatagaaaccgtctgaactatcctgcccgccatcatcctagtcctcatcgccctcccatccctacgcatcctttacataacagacgaggtcaacgatccctcccttaccatcaaatcaattggccaccaatggtactgaacctacgagtacaccgactacggcggactaatcttcaactcctacatacttcccccattattcctagaaccaggcgacctgcgactccttgacgttgacaatcgagtagtactcccgattgaaacccccattcgtataataattacatcacaagacgtcttgcactcatgagctgtccccacattaggcttaaaaacagatgcaattcccggacgtctaaaccaaaccactttcaccgctacacgaccgggggtatactacggtcaatgctctgaaatctgtggagcaaaccacagtttcatgcccatcgtcctagaattaattcccctaaaaatctttgaaatagggcccgtatttaccctatagcaccccctctaccccctctagagcccactgtaaagctaacttagcattaaccttttaagttaaagattaagagaaccaacacctctttacagtgaaatgccccaactaaatactaccgtatggcccaccataattacccccatactccttacactattcctcatcacccaactaaaaatattaaacacaaactaccacctacctccctcaccaaagcccataaaaataaaaaattataacaaaccctgagaaccaaaatgaacgaaaatctgttcgcttcattcattgcccccacaatcctaggcctacccgccgcagtactgatcattctatttccccctctattgatccccacctccaaatatctcatcaacaaccgactaatcaccacccaacaatgactaatcaaactaacctcaaaacaaatgataaccatacacaacactaaaggacgaacctgatctcttatactagtatccttaatcatttttattgccacaactaacctcctcggactcctgccttactcatttacaccaaccacccaactatctataaacctagccatggccatccccttatgagcgggcgcagtgattataggctttcgctctaagattaaaaatgccctagcccacttcttaccacaaggcacacctacaccccttatccccatactagttattatcgaaaccatcagcctactcattcaaccaatagccctggccgtacgcctaaccgctaacactactgcaggccacctactcatgcacctaattggaagcgccaccctagcaatatcaaccattaaccttccctctacacttatcatcttcacaattctaattctactgactatcctagaaatcgctgtcgccttaatccaagcctacgttttcacacttctagtaagcctctacctgcacgacaacacataatgacccaccaatcacatgcctatcatatagtaaaacccagcccatgacccctaacaggggccctctcagccctcctaatgacctccggcctagccatgtgatttcacttccactccataacgctcctcatactaggcctactaaccaacacactaaccatataccaatgatggcgcgatgtaacacgagaaagcacataccaaggccaccacacaccacctgtccaaaaaggccttcgatacgggataatcctatttattacctcagaagtttttttcttcgcaggatttttctgagccttttaccactccagcctagcccctaccccccaattaggagggcactggcccccaacaggcatcaccccgctaaatcccctagaagtcccactcctaaacacatccgtattactcgcatcaggagtatcaatcacctgagctcaccatagtctaatagaaaacaaccgaaaccaaataattcaagcactgcttattacaattttactgggtctctattttaccctcctacaagcctcagagtacttcgagtctcccttcaccatttccgacggcatctacggctcaacattttttgtagccacaggcttccacggacttcacgtcattattggctcaactttcctcactatctgcttcatccgccaactaatatttcactttacatccaaacatcactttggcttcgaagccgccgcctgatactggcattttgtagatgtggtttgactatttctgtatgtctccatctattgatgagggtcttactcttttagtataaatagtaccgttaacttccaattaactagttttgacaacattcaaaaaagagtaataaacttcgccttaattttaataatcaacaccctcctagccttactactaataattattacattttgactaccacaactcaacggctacatagaaaaatccaccccttacgagtgcggcttcgaccctatatcccccgcccgcgtccctttctccataaaattcttcttagtagctattaccttcttattatttgatctagaaattgccctccttttacccctaccatgagccctacaaacaactaacctgccactaatagttatgtcatccctcttattaatcatcatcctagccctaagtctggcctatgagtgactacaaaaaggattagactgaaccgaattggtatatagtttaaacaaaacgaatgatttcgactcattaaattatgataatcatatttaccaaatgcccctcatttacataaatattatactagcatttaccatctcacttctaggaatactagtatatcgctcacacctcatatcctccctactatgcctagaaggaataatactatcgctgttcattatagctactctcataaccctcaacacccactccctcttagccaatattgtgcctattgccatactagtctttgccgcctgcgaagcagcggtgggcctagccctactagtctcaatctccaacacatatggcctagactacgtacataacctaaacctactccaatgctaaaactaatcgtcccaacaattatattactaccactgacatgactttccaaaaaacacataatttgaatcaacacaaccacccacagcctaattattagcatcatccctctactattttttaaccaaatcaacaacaacctatttagctgttccccaaccttttcctccgaccccctaacaacccccctcctaatactaactacctgactcctacccctcacaatcatggcaagccaacgccacttatccagtgaaccactatcacgaaaaaaactctacctctctatactaatctccctacaaatctccttaattataacattcacagccacagaactaatcatattttatatcttcttcgaaaccacacttatccccaccttggctatcatcacccgatgaggcaaccagccagaacgcctgaacgcaggcacatacttcctattctacaccctagtaggctcccttcccctactcatcgcactaatttacactcacaacaccctaggctcactaaacattctactactcactctcactgcccaagaactatcaaactcctgagccaacaacttaatatgactagcttacacaatagcttttatagtaaagatacctctttacggactccacttatgactccctaaagcccatgtcgaagcccccatcgctgggtcaatagtacttgccgcagtactcttaaaactaggcggctatggtataatacgcctcacactcattctcaaccccctgacaaaacacatagcctaccccttccttgtactatccctatgaggcataattataacaagctccatctgcctacgacaaacagacctaaaatcgctcattgcatactcttcaatcagccacatagccctcgtagtaacagccattctcatccaaaccccctgaagcttcaccggcgcagtcattctcataatcgcccacggacttacatcctcattactattctgcctagcaaactcaaactacgaacgcactcacagtcgcatcataatcctctctcaaggacttcaaactctactcccactaatagctttttgatgacttctagcaagcctcgctaacctcgccttaccccccactattaacctactgggagaactctctgtgctagtaaccacgttctcctgatcaaatatcactctcctacttacaggactcaacatactagtcacagccctatactccctctacatatttaccacaacacaatgaggctcactcacccaccacattaacaacataaaaccctcattcacacgagaaaacaccctcatgttcatacacctatcccccattctcctcctatccctcaaccccgacatcattaccgggttttcctcttgtaaatatagtttaaccaaaacatcagattgtgaatctgacaacagaggcttacgaccccttatttaccgagaaagctcacaagaactgctaactcatgcccccatgtctaacaacatggctttctcaacttttaaaggataacagctatccattggtcttaggccccaaaaattttggtgcaactccaaataaaagtaataaccatgcacactactataaccaccctaaccctgacttccctaattccccccatccttaccaccctcgttaaccctaacaaaaaaaactcatacccccattatgtaaaatccattgtcgcatccaccttcattatcagtctcttccccacaacaatattcatgtgcctagaccaagaagttattatctcgaactgacactgagccacaacccaaacaacccagctctccctaagcttcaaactagactacttctccataatattcatccctgtagcattgttcgttacatggtccatcatagaattctcactgtgatatataaactcagacccaaacattaatcagttcttcaaatatctactcattttcctaattaccatactaatcttagttaccgctaacaacctattccaactgttcatcggctgagagggcgtaggaattatatccttcttgctcatcagttgatgatacgcccgagcagatgccaacacagcagccattcaagcaatcctatacaaccgtatcggcgatatcggtttcatcctcgccttagcatgatttatcctacactccaactcatgagacccacaacaaatagcccttctaaacgctaatccaagcctcaccccactactaggcctcctcctagcagcagcaggcaaatcagcccaattaggtctccacccctgactcccctcagccatagaaggccccaccccagtctcagccctactccactcaagcactatagttgtagcaggaatcttcttactcatccgcttccaccccctagcagaaaatagcccactaatccaaactctaacactatgcttaggcgctatcaccactctgttcgcagcagtctgcgcccttacacaaaatgacatcaaaaaaatcgtagccttctccacttcaagtcaactaggactcataatagttacaatcggcatcaaccaaccacacctagcattcctgcacatctgtacccacgccttcttcaaagccatactatttatgtgctccgggtccatcatccacaaccttaacaatgaacaagatattcgaaaaataggaggactactcaaaaccatacctctcacttcaacctccctcaccattggcagcctagcattagcaggaatacctttcctcacaggtttctactccaaagaccacatcatcgaaaccgcaaacatatcatacacaaacgcctgagccctatctattactctcatcgctacctccctgacaagcgcctatagcactcgaataattcttctcaccctaacaggtcaacctcgcttccccacccttactaacattaacgaaaataaccccaccctactaaaccccattaaacgcctggcagccggaagcctattcgcaggatttctcattactaacaacatttcccccgcatcccccttccaaacaacaatccccctctacctaaaactcacagccctcgctgtcactttcctaggacttctaacagccctagacctcaactacctaaccaacaaacttaaaataaaatccccactatgcacattttatttctccaacatactcggattctaccctagcatcacacaccgcacaatcccctatctaggccttcttacgagccaaaacctgcccctactcctcctagacctaacctgactagaaaagctattacctaaaacaatttcacagcaccaaatctccacctccatcatcacctcaacccaaaaaggcataattaaactttacttcctctctttcttcttcccactcatcctaaccctactcctaatcacataacctattcccccgagcaatctcaattacaatatatacaccaacaaacaatgttcaaccagtaactactactaatcaacgcccataatcatacaaagcccccgcaccaataggatcctcccgaatcaaccctgacccctctccttcataaattattcagcttcctacactattaaagtttaccacaaccaccaccccatcatactctttcacccacaacaccaatcctacctccatcgctaaccccactaaaacactcaccaagacctcaacccctgacccccatgcctcaggatactcctcaatagccatcgctgtagtatatccaaagacaaccatcattccccctaaataaattaaaaaaactattaaacccatataacctcccccaaaattcagaataataacacacccgaccacaccgctaacaatcaatactaaacccccataaataggagaaggcttagaagaaaaccccacaaaccccattactaaacccacactcaacagaaacaaagcatacatcattattctcgcacggactacaaccacgaccaatgatatgaaaaaccatcgttgtatttcaactacaagaacaccaatgaccccaatacgcaaaattaaccccctaataaaattaattaaccactcattcatcgacctccccaccccatccaacatctccgcatgatgaaacttcggctcactccttggcgcctgcctgatcctccaaatcaccacaggactattcctagccatgcactactcaccagacgcctcaaccgccttttcatcaatcgcccacatcactcgagacgtaaattatggctgaatcatccgctaccttcacgccaatggcgcctcaatattctttatctgcctcttcctacacatcgggcgaggcctatattacggatcatttctctactcagaaacctgaaacatcggcattatcctcctgtttgcaactatagcaacagccttcataggctatgtcctcccgtgaggccaaatatcattctgaggggccacagtaattacaaacttactatccgccatcccatacattgggacagacctagttcaatgaatctgaggaggctactcagtagacagtcccaccctcacacgattctttacctttcacttcatcttgcccttcattattgcagccctagcagcactccacctcctattcttgcacgaaacgggatcaaacaaccccctaggaatcacctcccattccgataaaatcaccttccacccttactacacaatcaaagacgccctcggcttacttctcttccttctctccttaatgacattaacactattctcaccagacctcctaggcgacccagacaattataccctagccaaccccttaaacacccctccccacatcaagcccgaatgatatttcctattcgcctacacaattctccgatccgtccctaacaaactaggaggcgtccttgccctattactatccatcctcatcctagcaataatccccatcctccatatatccaaacaacaaagcataatatttcgcccactaagccaatcactttattgactcctagccgcagacctcctcattctaacctgaatcggaggacaaccagtaagctacccttttaccatcattggacaagtagcatccgtactatacttcacaacaatcctaatcctaataccaactatctccctaattgaaaacaaaatactcaaatgggcctgtccttgtagtataaactaatacaccagtcttgtaaaccggagatgaaaacctttttccaaggacaaatcagagaaaaagtctttaactccaccattagcacccaaagctaagattctaatttaaactattctctgttctttcatggggaagcagatttgggtaccacccaagtattgactcacccatcaacaaccgctatgtacttcgtacattactgccagtcaccatgaatattgtacagtaccataaatacttgaccacctgtagtacataaaaacccaatccacatcaaaaccccctccccatgcttacaagcaagtacagcaatcaaccttcaactatcacacatcaactgcaactccaaagccacccctcacccattaggataccaacaaacctatccacccttaacagtacatagtacataaaaccatttaccgtacatagcacattacagtcaaatcccttctcgcccccatggatgacccccctcagataggggtcccttgaccaccatcctccgtgaaatcaatatcccgcacaagagtgctactctcctcgctccgggcccataacacttgggggtagctaaagtgaactgtatccgacatctggttcctacttcagggtcataaagcctaaatagcccacacgttccccttaaataagacatcacgatg

SEQ ID NO: 413 - DNA, 16570 bp, Homo sapiens mitochondrial
  3108: "n" refers to a nucleotide at position 3107 of the Cambridge Reference Sequence (CRS, Anderson et al. 1981 Nature 290:457-465), later determined to be absent from the human mtDNA sequence according to the revised CRS (rCRS, Andrews et al. 1999 Nature Genetics 23:147); "n" therefore represents a single nucleotide deletion at a position corresponding to nucleotide 3107 of SEQ ID NO:1 as provided herein.
gatcacaggtctatcaccctattaaccactcacgggagctctccatgcatttggtattttcgtctggggggtatgcacgcgatagcattgcgggacgctggagccggagcaccctatgtcgcagtatctgtctttgattcctgcctcatcctattatttatcgcacctacgttcaatattacaggcgaacatacttactaaagtgtgttaattaattaatgcttgtaggacataataataacaattgaatgtctgcacagccactttccacacagacatcataacaaaaaatttccaccaaaccccccctcccccgccttctggccacagcacttaaacacatctctgccaaaccccaaaaacaaagaaccctaacaccagcctaaccagatttcaaattttatcttttggcggtatgcacttttaacagtcaccccccaactaacacattattttcccctcccactcccatactactaatctcatcaatacaacccccgcccatcctacccagcacacacacaccgctgctaaccccataccccgaaccaaccaaaccccaaagacaccccccacagtttatgtagcttacctcctcaaagcaatacactgaaaatgtttagacgggctcacatcaccccataaacaaataggtttggtcctagcctttctattagctcttagtaagattacacatgcaagcatccccgttccagtgagttcaccctctaaatcaccacgatcaaaaggaacaagcatcaagcacgcagcaatgcagctcaaaacgcttagcctagccacacccccacgggaaacagcagtgattaacctttagcaataaacgaaagtttaactaagctatactaaccccagggttggtcaatttcgtgccagccaccgcggtcacacgattaacccaagtcaatagaagccggcgtaaagagtgttttagatcaccccctccccaataaagctaaaactcacctgagttgtaaaaaactccagttgacacaaaatagactacgaaagtggctttaacatatctgaacacacaatagctaagacccaaactgggattagataccccactatgcttagccctaaacctcaacagttaaatcaacaaaactgctcgccagaacactacgagccacagcttaaaactcaaaggacctggcggtgcttcatatccctctagaggagcctgttctgtaatcgataaaccccgatcaacctcaccacctcttgctcagcctatataccgccatcttcagcaaaccctgatgaaggctacaaagtaagcgcaagtacccacgtaaagacgttaggtcaaggtgtagcccatgaggtggcaagaaatgggctacattttctaccccagaaaactacgatagcccttatgaaacttaagggtcgaaggtggatttagcagtaaactaagagtagagtgcttagttgaacagggccctgaagcgcgtacacaccgcccgtcaccctcctcaagtatacttcaaaggacatttaactaaaacccctacgcatttatatagaggagacaagtcgtaacatggtaagtgtactggaaagtgcacttggacgaaccagagtgtagcttaacacaaagcacccaacttacacttaggagatttcaacttaacttgaccgctctgagctaaacctagccccaaacccactccaccttactaccagacaaccttagccaaaccatttacccaaataaagtataggcgatagaaattgaaacctggcgcaatagatatagtaccgcaagggaaagatgaaaaattataaccaagcataatatagcaaggactaacccctataccttctgcataatgaattaactagaaataactttgcaaggagagccaaagctaagacccccgaaaccagacgagctacctaagaacagctaaaagagcacacccgtctatgtagcaaaatagtgggaagatttataggtagaggcgacaaacctaccgagcctggtgatagctggttgtccaagatagaatcttagttcaactttaaatttgcccacagaaccctctaaatccccttgtaaatttaactgttagtccaaagaggaacagctctttggacactaggaaaaaaccttgtagagagagtaaaaaatttaacacccatagtaggcctaaaagcagccaccaattaagaaagcgttcaagctcaacacccactacctaaaaaatcccaaacatataactgaactcctcacacccaattggaccaatctatcaccctatagaagaactaatgttagtataagtaacatgaaaacattctcctccgcataagcctgcgtcagattaaaacactgaactgacaattaacagcccaatatctacaatcaaccaacaagtcattattaccctcactgtcaacccaacacaggcatgctcataaggaaaggttaaaaaaagtaaaaggaactcggcaaatcttaccccgcctgtttaccaaaaacatcacctctagcatcaccagtattagaggcaccgcctgcccagtgacacatgtttaacggccgcggtaccctaaccgtgcaaaggtagcataatcacttgttccttaaatagggacctgtatgaatggctccacgagggttcagctgtctcttacttttaaccagtgaaattgacctgcccgtgaagaggcgggcataacacagcaagacgagaagaccctatggagctttaatttattaatgcaaacagtacctaacaaacccacaggtcctaaactaccaaacctgcattaaaaatttcggttggggcgacctcggagcagaacccaacctccgagcagtacatgctaagacttcaccagtcaaagcgaactactatactcaattgatccaataacttgaccaacggaacaagttaccctagggataacagcgcaatcctattctagagtccatatcaacaatagggtttacgacctcgatgttggatcaggacatcccgatggtgcagccgctattaaaggttcgtttgttcaacgattaaagtcctacgtgatctgagttcagaccggagtaatccaggtcggtttctatctacnttcaaattcctccctgtacgaaaggacaagagaaataaggcctacttcacaaagcgccttcccccgtaaatgatatcatctcaacttagtattatacccacacccacccaagaacagggtttgttaagatggcagagcccggtaatcgcataaaacttaaaactttacagtcagaggttcaattcctcttcttaacaacatacccatggccaacctcctactcctcattgtacccattctaatcgcaatggcattcctaatgcttaccgaacgaaaaattctaggctatatacaactacgcaaaggccccaacgttgtaggcccctacgggctactacaacccttcgctgacgccataaaactcttcaccaaagagcccctaaaacccgccacatctaccatcaccctctacatcaccgccccgaccttagctctcaccatcgctcttctactatgaacccccctccccatacccaaccccctggtcaacctcaacctaggcctcctatttattctagccacctctagcctagccgtttactcaatcctctgatcagggtgagcatcaaactcaaactacgccctgatcggcgcactgcgagcagtagcccaaacaatctcatatgaagtcaccctagccatcattctactatcaacattactaataagtggctcctttaacctctccacccttatcacaacacaagaacacctctgattactcctgccatcatgacccttggccataatatgatttatctccacactagcagagaccaaccgaacccccttcgaccttgccgaaggggagtccgaactagtctcaggcttcaacatcgaatacgccgcaggccccttcgccctattcttcatagccgaatacacaaacattattataataaacaccctcaccactacaatcttcctaggaacaacatatgacgcactctcccctgaactctacacaacatattttgtcaccaagaccctacttctaacctccctgttcttatgaattcgaacagcatacccccgattccgctacgaccaactcatacacctcctatgaaaaaacttcctaccactcaccctagcattacttatatgatatgtctccatacccattacaatctccagcattccccctcaaacctaagaaatatgtctgataaaagagttactttgatagagtaaataataggagcttaaacccccttatttctaggactatgagaatcgaacccatccctgagaatccaaaattctccgtgccacctatcacaccccatcctaaagtaaggtcagctaaataagctatcgggcccataccccgaaaatgttggttatacccttcccgtactaattaatcccctggcccaacccgtcatctactctaccatctttgcaggcacactcatcacagcgctaagctcgcactgattttttacctgagtaggcctagaaataaacatgctagcttttattccagttctaaccaaaaaaataaaccctcgttccacagaagctgccatcaagtatttcctcacgcaagcaaccgcatccataatccttctaatagctatcctcttcaacaatatactctccggacaatgaaccataaccaatactaccaatcaatactcatcattaataatcataatagctatagcaataaaactaggaatagccccctttcacttctgagtcccagaggttacccaaggcacccctctgacatccggcctgcttcttctcacatgacaaaaactagcccccatctcaatcatataccaaatctctccctcactaaacgtaagccttctcctcactctctcaatcttatccatcatagcaggcagttgaggtggattaaaccaaacccagctacgcaaaatcttagcatactcctcaattacccacataggatgaataatagcagttctaccgtacaaccctaacataaccattcttaatttaactatttatattatcctaactactaccgcattcctactactcaacttaaactccagcaccacgaccctactactatctcgcacctgaaacaagctaacatgactaacacccttaattccatccaccctcctctccctaggaggcctgcccccgctaaccggctttttgcccaaatgggccattatcgaagaattcacaaaaaacaatagcctcatcatccccaccatcatagccaccatcaccctccttaacctctacttctacctacgcctaatctactccacctcaatcacactactccccatatctaacaacgtaaaaataaaatgacagtttgaacatacaaaacccaccccattcctccccacactcatcgcccttaccacgctactcctacctatctccccttttatactaataatcttatagaaatttaggttaaatacagaccaagagccttcaaagccctcagtaagttgcaatacttaatttctgtaacagctaaggactgcaaaaccccactctgcatcaactgaacgcaaatcagccactttaattaagctaagcccttactagaccaatgggacttaaacccacaaacacttagttaacagctaagcaccctaatcaactggcttcaatctacttctcccgccgccgggaaaaaaggcgggagaagccccggcaggtttgaagctgcttcttcgaatttgcaattcaatatgaaaatcacctcggagctggtaaaaagaggcctaacccctgtctttagatttacagtccaatgcttcactcagccattttacctcacccccactgatgttcgccgaccgttgactattctctacaaaccacaaagacattggaacactatacctattattcggcgcatgagctggagtcctaggcacagctctaagcctccttattcgagccgagctgggccagccaggcaaccttctaggtaacgaccacatctacaacgttatcgtcacagcccatgcatttgtaataatcttcttcatagtaatacccatcataatcggaggctttggcaactgactagttcccctaataatcggtgcccccgatatggcgtttccccgcataaacaacataagcttctgactcttacctccctctctcctactcctgctcgcatctgctatagtggaggccggagcaggaacaggttgaacagtctaccctcccttagcagggaactactcccaccctggagcctccgtagacctaaccatcttctccttacacctagcaggtgtctcctctatcttaggggccatcaatttcatcacaacaattatcaatataaaaccccctgccataacccaataccaaacgcccctcttcgtctgatccgtcctaatcacagcagtcctacttctcctatctctcccagtcctagctgctggcatcactatactactaacagaccgcaacctcaacaccaccttcttcgaccccgccggaggaggagaccccattctataccaacacctattctgatttttcggtcaccctgaagtttatattcttatcctaccaggcttcggaataatctcccatattgtaacttactactccggaaaaaaagaaccatttggatacataggtatggtctgagctatgatatcaattggcttcctagggtttatcgtgtgagcacaccatatatttacagtaggaatagacgtagacacacgagcatatttcacctccgctaccataatcatcgctatccccaccggcgtcaaagtatttagctgactcgccacactccacggaagcaatatgaaatgatctgctgcagtgctctgagccctaggattcatctttcttttcaccgtaggtggcctgactggcattgtattagcaaactcatcactagacatcgtactacacgacacgtactacgttgtagcccacttccactatgtcctatcaataggagctgtatttgccatcataggaggcttcattcactgatttcccctattctcaggctacaccctagaccaaacctacgccaaaatccatttcactatcatattcatcggcgtaaatctaactttcttcccacaacactttctcggcctatccggaatgccccgacgttactcggactaccccgatgcatacaccacatgaaacatcctatcatctgtaggctcattcatttctctaacagcagtaatattaataattttcatgatttgagaagccttcgcttcgaagcgaaaagtcctaatagtagaagaaccctccataaacctggagtgactatatggatgccccccaccctaccacacattcgaagaacccgtatacataaaatctagacaaaaaaggaaggaatcgaaccccccaaagctggtttcaagccaaccccatggcctccatgactttttcaaaaaggtattagaaaaaccatttcataactttgtcaaagttaaattataggctaaatcctatatatcttaatggcacatgcagcgcaagtaggtctacaagacgctacttcccctatcatagaagagcttatcacctttcatgatcacgccctcataatcattttccttatctgcttcctagtcctgtatgcccttttcctaacactcacaacaaaactaactaatactaacatctcagacgctcaggaaatagaaaccgtctgaactatcctgcccgccatcatcctagtcctcatcgccctcccatccctacgcatcctttacataacagacgaggtcaacgatccctcccttaccatcaaatcaattggccaccaatggtactgaacctacgagtacaccgactacggcggactaatcttcaactcctacatacttcccccattattcctagaaccaggcgacctgcgactccttgacgttgacaatcgagtagtactcccgattgaagcccccattcgtataataattacatcacaagacgtcttgcactcatgagctgtccccacattaggcttaaaaacagatgcaattcccggacgtctaaaccaaaccactttcaccgctacacgaccgggggtatactacggtcaatgctctgaaatctgtggagcaaaccacagtttcatgcccatcgtcctagaattaattcccctaaaaatctttgaaatagggcccgtatttaccctatagcaccccctctaccccctctagagcccactgtaaagctaacttagcattaaccttttaagttaaagattaagagaaccaacacctctttacagtgaaatgccccaactaaatactaccgtatggcccaccataattacccccatactccttacactattcctcatcacccaactaaaaatattaaacacaaactaccacctacctccctcaccaaagcccataaaaataaaaaattataacaaaccctgagaaccaaaatgaacgaaaatctgttcgcttcattcattgcccccacaatcctaggcctacccgccgcagtactgatcattctatttccccctctattgatccccacctccaaatatctcatcaacaaccgactaatcaccacccaacaatgactaatcaaactaacctcaaaacaaatgataaccatacacaacactaaaggacgaacctgatctcttatactagtatccttaatcatttttattgccacaactaacctcctcggactcctgcctcactcatttacaccaaccacccaactatctataaacctagccatggccatccccttatgagcgggcacagtgattataggctttcgctctaagattaaaaatgccctagcccacttcttaccacaaggcacacctacaccccttatccccatactagttattatcgaaaccatcagcctactcattcaaccaatagccctggccgtacgcctaaccgctaacattactgcaggccacctactcatgcacctaattggaagcgccaccctagcaatatcaaccattaaccttccctctacacttatcatcttcacaattctaattctactgactatcctagaaatcgctgtcgccttaatccaagcctacgttttcacacttctagtaagcctctacctgcacgacaacacataatgacccaccaatcacatgcctatcatatagtaaaacccagcccatgacccctaacaggggccctctcagccctcctaatgacctccggcctagccatgtgatttcacttccactccataacgctcctcatactaggcctactaaccaacacactaaccatataccaatgatggcgcgatgtaacacgagaaagcacataccaaggccaccacacaccacctgtccaaaaaggccttcgatacgggataatcctatttattacctcagaagtttttttcttcgcaggatttttctgagccttttaccactccagcctagcccctaccccccaattaggagggcactggcccccaacaggcatcaccccgctaaatcccctagaagtcccactcctaaacacatccgtattactcgcatcaggagtatcaatcacctgagctcaccatagtctaatagaaaacaaccgaaaccaaataattcaagcactgcttattacaattttactgggtctctattttaccctcctacaagcctcagagtacttcgagtctcccttcaccatttccgacggcatctacggctcaacattttttgtagccacaggcttccacggacttcacgtcattattggctcaactttcctcactatctgcttcatccgccaactaatatttcactttacatccaaacatcactttggcttcgaagccgccgcctgatactggcattttgtagatgtggtttgactatttctgtatgtctccatctattgatgagggtcttactcttttagtataaatagtaccgttaacttccaattaactagttttgacaacattcaaaaaagagtaataaacttcgccttaattttaataatcaacaccctcctagccttactactaataattattacattttgactaccacaactcaacggctacatagaaaaatccaccccttacgagtgcggcttcgaccctatatcccccgcccgcgtccctttctccataaaattcttcttagtagctattaccttcttattatttgatctagaaattgccctccttttacccctaccatgagccctacaaacaactaacctgccactaatagttatgtcatccctcttattaatcatcatcctagccctaagtctggcctatgagtgactacaaaaaggattagactgaaccgaattggtatatagtttaaacaaaacgaatgatttcgactcattaaattatgataatcatatttaccaaatgcccctcatttacataaatattatactagcatttaccatctcacttctaggaatactagtatatcgctcacacctcatatcctccctactatgcctagaaggaataatactatcgctgttcattatagctactctcataaccctcaacacccactccctcttagccaatattgtgcctattgccatactagtctttgccgcctgcgaagcagcggtgggcctagccctgctagtctcaatctccaacacatatggcctagactacgtacataacctaaacctactccaatgctaaaactaatcgtcccaacaattatattactaccactgacatgactttccaaaaaacacataatttgaatcaacacaaccacccacagcctaattattagcatcatccctctactattttttaaccaaatcaacaacaacctatttagctgttccccaaccttttcctccgaccccctaacaacccccctcctaatactaactacctgactcctacccctcacaatcatggcaagccaacgccacttatccagtgaaccactatcacgaaaaaaactctacctctctatactaatctccctacaaatctccttaattataacattcacagccacagaactaatcatattttatatcttcttcgaaaccacacttatccccaccttggctatcatcacccgatgaggcaaccagccagaacgcctgaacgcaggcacatacttcctattctacaccctagtaggctcccttcccctactcatcgcactaatttacactcacaacaccctaggctcactaaacattctactactcactctcactgcccaagaactatcaaactcctgagccaacaacttaatatgactagcttacacaatagcttttatagtaaagatacctctttacggactccacttatgactccctaaagcccatgtcgaagcccccatcgctgggtcaatagtacttgccgcagtactcttaaaactaggcggctatggtataatacgcctcacactcattctcaaccccctgacaaaacacatagcctaccccttccttgtactatccctatgaggcataattataacaagctccatctgcctacgacaaacagacctaaaatcgctcattgcatactcttcaatcagccacatagccctcgtagtaacagccattctcatccaaaccccctgaagcttcaccggcgcagtcattctcataatcgcccacgggcttacatcctcattactattctgcctagcaaactcaaactacgaacgcactcacagtcgcatcataatcctctctcaaggacttcaaactctactcccactaatagctttttgatgacttctagcaagcctcgctaacctcgccttaccccccactattaacctactgggagaactctctgtgctagtaaccacgttctcctgatcaaatatcactctcctacttacaggactcaacatactagtcacagccctatactccctctacatatttaccacaacacaatggggctcactcacccaccacattaacaacataaaaccctcattcacacgagaaaacaccctcatgttcatacacctatcccccattctcctcctatccctcaaccccgacatcattaccgggttttcctcttgtaaatatagtttaaccaaaacatcagattgtgaatctgacaacagaggcttacgaccccttatttaccgagaaagctcacaagaactgctaactcatgcccccatgtctaacaacatggctttctcaacttttaaaggataacagctatccattggtcttaggccccaaaaattttggtgcaactccaaataaaagtaataaccatgcacactactataaccaccctaaccctgacttccctaattccccccatccttaccaccctcgttaaccctaacaaaaaaaactcatacccccattatgtaaaatccattgtcgcatccacctttattatcagtctcttccccacaacaatattcatgtgcctagaccaagaagttattatctcgaactgacactgagccacaacccaaacaacccagctctccctaagcttcaaactagactacttctccataatattcatccctgtagcattgttcgttacatggtccatcatagaattctcactgtgatatataaactcagacccaaacattaatcagttcttcaaatatctactcatcttcctaattaccatactaatcttagttaccgctaacaacctattccaactgttcatcggctgagagggcgtaggaattatatccttcttgctcatcagttgatgatacgcccgagcagatgccaacacagcagccattcaagcaatcctatacaaccgtatcggcgatatcggtttcatcctcgccttagcatgatttatcctacactccaactcatgagacccacaacaaatagcccttctaaacgctaatccaagcctcaccccactactaggcctcctcctagcagcagcaggcaaatcagcccaattaggtctccacccctgactcccctcagccatagaaggccccaccccagtctcagccctactccactcaagcactatagttgtagcaggaatcttcttactcatccgcttccaccccctagcagaaaatagcccactaatccaaactctaacactatgcttaggcgctatcaccactctgttcgcagcagtctgcgcccttacacaaaatgacatcaaaaaaatcgtagccttctccacttcaagtcaactaggactcataatagttacaatcggcatcaaccaaccacacctagcattcctgcacatctgtacccacgccttcttcaaagccatactatttatgtgctccgggtccatcatccacaaccttaacaatgaacaagatattcgaaaaataggaggactactcaaaaccatacctctcacttcaacctccctcaccattggcagcctagcattagcaggaatacctttcctcacaggtttctactccaaagaccacatcatcgaaaccgcaaacatatcatacacaaacgcctgagccctatctattactctcatcgctacctccctgacaagcgcctatagcactcgaataattcttctcaccctaacaggtcaacctcgcttccccacccttactaacattaacgaaaataaccccaccctactaaaccccattaaacgcctggcagccggaagcctattcgcaggatttctcattactaacaacatttcccccgcatcccccttccaaacaacaatccccctctacctaaaactcacagccctcgctgtcactttcctaggacttctaacagccctagacctcaactacctaaccaacaaacttaaaataaaatccccactatgcacattttatttctccaacatactcggattctaccctagcatcacacaccgcacaatcccctatctaggccttcttacgagccaaaacctgcccctactcctcctagacctaacctgactagaaaagctattacctaaaacaatttcacagcaccaaatctccacctccatcatcacctcaacccaaaaaggcataattaaactttacttcctctctttcttcttcccactcatcctaaccctactcctaatcacataacctattcccccgagcaatctcaattacaatatatacaccaacaaacaatgttcaaccagtaactactactaatcaacgcccataatcatacaaagcccccgcaccaataggatcctcccgaatcaaccctgacccctctccttcataaattattcagcttcctacactattaaagtttaccacaaccaccaccccatcatactctttcacccacagcaccaatcctacctccatcgctaaccccactaaaacactcaccaagacctcaacccctgacccccatgcctcaggatactcctcaatagccatcgctgtagtatatccaaagacaaccatcattccccctaaataaattaaaaaaactattaaacccatataacctcccccaaaattcagaataataacacacccgaccacaccgctaacaatcaatactaaacccccataaataggagaaggcttagaagaaaaccccacaaaccccattactaaacccacactcaacagaaacaaagcatacatcattattctcgcacggactacaaccacgaccaatgatatgaaaaaccatcgttgtatttcaactacaagaacaccaatgaccccaatacgcaaaactaaccccctaataaaattaattaaccactcattcatcgacctccccaccccatccaacatctccgcatgatgaaacttcggctcactccttggcgcctgcctgatcctccaaatcaccacaggactattcctagccatgcactactcaccagacgcctcaaccgccttttcatcaatcgcccacatcactcgagacgtaaattatggctgaatcatccgctaccttcacgccaatggcgcctcaatattctttatctgcctcttcctacacatcgggcgaggcctatattacggatcatttctctactcagaaacctgaaacatcggcattatcctcctgcttgcaactatagcaacagccttcataggctatgtcctcccgtgaggccaaatatcattctgaggggccacagtaattacaaacttactatccgccatcccatacattgggacagacctagttcaatgaatctgaggaggctactcagtagacagtcccaccctcacacgattctttacctttcacttcatcttgcccttcattattgcagccctagcaacactccacctcctattcttgcacgaaacgggatcaaacaaccccctaggaatcacctcccattccgataaaatcaccttccacccttactacacaatcaaagacgccctcggcttacttctcttccttctctccttaatgacattaacactattctcaccagacctcctaggcgacccagacaattataccctagccaaccccttaaacacccctccccacatcaagcccgaatgatatttcctattcgcctacacaattctccgatccgtccctaacaaactaggaggcgtccttgccctattactatccatcctcatcctagcaataatccccatcctccatatatccaaacaacaaagcataatatttcgcccactaagccaatcactttattgactcctagccgcagacctcctcattctaacctgaatcggaggacaaccagtaagctacccttttaccatcattggacaagtagcatccgtactatacttcacaacaatcctaatcctaataccaactatctccctaattgaaaacaaaatactcaaatgggcctgtccttgtagtataaactaatacaccagtcttgtaaaccggagatgaaaacctttttccaaggacaaatcagagaaaaagtctttaactccaccattagcacccaaagctaagattctaatttaaactattctctgttctttcatggggaagcagatttgggtaccacccaagtattgactcacccatcaacaaccgctatgtatttcgtacattactgccagccaccatgaatattgtacggtaccataaatacttgaccacctgtagtacataaaaacccaatccacatcaaaaccccctccccatgcttacaagcaagtacagcaatcaaccctcaactatcacacatcaactgcaactccaaagccacccctcacccactaggataccaacaaacctacccacccttaacagtacatagtacataaagccatttaccgtacatagcacattacagtcaaatcccttctcgtccccatggatgacccccctcagataggggtcccttgaccaccatcctccgtgaaatcaatatcccgcacaagagtgctactctcctcgctccgggcccataacacttgggggtagctaaagtgaactgtatccgacatctggttcctacttcagggtcataaagcctaaatagcccacacgttccccttaaataagacatcacgatg

SEQ ID NO: 414 - DNA, 16568 bp, Homo sapiens mitochondrial
  3106: "n" refers to a nucleotide at position 3107 of the Cambridge Reference Sequence (CRS, Anderson et al. 1981 Nature 290:457-465), later determined to be absent from the human mtDNA sequence according to the revised CRS (rCRS, Andrews et al. 1999 Nature Genetics 23:147); "n" therefore represents a single nucleotide deletion at a position corresponding to nucleotide 3107 of SEQ ID NO:1 as provided herein.
gatcacaggtctatcaccctattaaccactcacgggagctctccatgcatttggtattttcgtctggggggtgtgcacgcgatagcattgcgagacgctggagccggagcaccctatgtcgcagtatctgtctttgattcctgcctcatcccattatttatcgcacctacgttcaatattacagacgagcatacctactgaagtgtgttaattaattaatgcttgtaggacataataataacaattgaatgtctgcacagccgctttccacacagacatcataacaaaaaatttccaccaaaccccccctcccccgccttctggccacagcacttaaacacatctctgccaaaccccaaaaacaaagaaccctaacaccagcctaaccagatttcaaattttatcttttggcggtatgcacttttaacagtcaccccccaactaacacattattttcccctcccactcccatactactaatctcatcaatacaacccccgcccatcctacccagcacacacaccgctgctaaccccataccccgaaccaaccaaaccccaaagacaccccccacagtttatgtagcttacctcctcaaagcaatacactgaaaatgtttagacgggctcacatcaccccataaacaaataggtttggtcctagcctttctattagctcttagtaagattacacatgcaagcatccccgttccagtgagttcaccctctaaatcaccacgatcaaaagggacaagcatcaagcacgcagcaatgcagctcaaaacgcttagcctagccacacccccacgggaaacagcagtgattaacctttagcaataaacgaaagtttaactaagctatactaaccccagggttggtcaatttcgtgccagccaccgcggtcacacgattaacccaagccaatagaagccggcgtaaagagtgttttagatcaccccctccccaataaagctaaaactcacctgagttgtaaaaaactccagttgacacaaaatagactacgaaagtggctttaacatatctgaacacacaatagctaagacccaaactgggattagataccccactatgcttagccctaaacctcaacagttaaatcaacaaaactgctcgccagaacactacgagccacagcttaaaactcaaaggacctggcggtgcttcatatccctctagaggagcctgttctgtaatcgataaaccccgatcaacctcaccacctcttgctcagcctatataccgccatcttcagcaaaccctgatgaaggctacaaagtaagcgcaagtacccacgtaaagacgttaggtcaaggtgtagcccatgaggtggcaagaaatgggctacattttctaccccagaaaactacgatagcccttatgaaacttaagggtcgaaggtggatttagcagtaaactgagagtagagtgcttagttgaacagggccctgaagcgcgtacacaccgcccgtcaccctcctcaagtatacttcaaaggacatttaactaaaacccctacgcatttatatagaggagacaagtcgtaacatggtaagtgtactggaaagtgcacttggacgaaccagagtgtagcttaacacaaagcacccaacttacacttaggagatttcaacttaacttgaccgctctgagctaaacctagccccaaacccactccaccttactaccagacaaccttagccaaaccatttacccaaataaagtataggcgatagaaattgaaacctggcgcaatagatatagtaccgcaagggaaagatgaaaaattataaccaagcataatatagcaaggactaacccctataccttctgcataatgaattaactagaaataactttgcaaggagagccaaagctaagacccccgaaaccagacgagctacctaagaacagctaaaagagcacacccgtctatgtagcaaaatagtgggaagatttataggtagaggcgacaaacctaccgagcctggtgatagctggttgtccaagatagaatcttagttcaactttaaatttgcccacagaaccctctaaatccccttgtaaatttaactgttagtccaaagaggaacagctctttggacactaggaaaaaaccttgtagagagagtaaaaaatttaacacccatagtaggcctaaaagcagccaccaattaagaaagcgttcaagctcaacacccactacctaaaaaatcccaaacatataactgaactcctcacacccaattggaccaatctatcaccctatagaagaactaatgttagtataagtaacatgaaaacattctcctccgcataagcctgcgtcagattaaaacactgaactgacaattaacagcccaatatctacaatcaaccaacaagtcattattaccctcactgtcaacccaacacaggcatgctcataaggaaaggttaaaaaaagtaaaaggaactcggcaaatcttaccccgcctgtttaccaaaaacatcacctctagcatcaccagtattagaggcaccgcctgcccagtgacacatgtttaacggccgcggtaccctaaccgtgcaaaggtagcataatcacttgttccttaaatagggacctgtatgaatggctccacgagggttcagctgtctcttacttttaaccagtgaaattgacctgcccgtgaagaggcgggcatgacacagcaagacgagaagaccctatggagctttaatttattaatgcaaacagtacctaacaaacccacaggtcctaaactaccaaacctgcattaaaaatttcggttggggcgacctcggagcagaacccaacctccgagcagtacatgctaagacttcaccagtcaaagcgaactactatactcaattgatccaataacttgaccaacggaacaagttaccctagggataacagcgcaatcctattctagagtccatatcaacaatagggtttacgacctcgatgttggatcaggacatcccaatggtgcagccgctattaaaggttcgtttgttcaacgattaaagtcctacgtgatctgagttcagaccggagtaatccaggtcggtttctatctacnttcaaattcctccctgtacgaaaggacaagagaaataaggcctacttcacaaagcgccttcccccgtaaatgatatcatctcaacttagtattatacccacacccacccaagaacagggtttgttaagatggcagagcccggtaatcgcataaaacttaaaactttacagtcagaggttcaattcctcttcttaacaacatacccatggccaacctcctactcctcattgtacccattctaatcgcaatggcattcctaatgcttaccgaacgaaaaattctaggctatatacaactacgcaaaggccccaacgttgtaggcccctacgggctactacaacccttcgctgacgccataaaactcttcaccaaagagcccctaaaacccgccacatctaccatcaccctctacatcaccgccccgaccttagctctcaccatcgctcttctactatgaacccccctccccatacccaaccccctggtcaacctcaacctaggcctcctatttattctagccacctctagcctagccgtttactcaatcctctgatcagggtgagcatcaaactcaaactacgccctgatcggcgcactgcgagcagtagcccaaacaatctcatatgaagtcaccctagccatcattctactatcaacattactaataagtggctcctttaacctctccacccttatcacaacacaagaacacctctgattactcctgccatcatgacccttggccataatatgatttatctccacactagcagagaccaaccgaacccccttcgaccttgccgaaggggagtccgaactagtctcaggcttcaacatcgaatacgccgcaggccccttcgccctattcttcatagccgaatacacaaacattattataataaacaccctcaccactacaatcttcctaggaacaacatatgacgcactctcccctgaactctacacaacatattttgtcaccaagaccctacttctaacctccctgttcttatgaattcgaacagcatacccccgattccgctacgaccaactcatacacctcctatgaaaaaacttcctaccactcaccctagcattacttatatgatatgtctccatacccattacaatctccagcattccccctcaaacctaagaaatatgtctgataaaagagttactttgatagagtaaataataggagcttaaacccccttatttctaggactatgagaatcgaacccatccctgagaatccaaaattctccgtgccacctatcacaccccatcctaaagtaaggtcagctaaataagctatcgggcccataccccgaaaatgttggttatacccttcccgtactaattaatcccctggcccaacccgtcatctactctaccatctttgcaggcacactcatcacagcgctaagctcgcactgattttttacctgagtaggcctagaaataaacatgctagcttttattccagttctaaccaaaaaaataaaccctcgttccacagaagctgccatcaagtatttcctcacgcaagcaaccgcatccataatcctcctaatagctatcctcttcaacaatatactctccggacaatgaaccataaccaatactaccaatcaatactcatcattaataatcataatggctatagcaataaaactaggaatagccccctttcacttctgagtcccagaggttacccaaggcacccctctgacatccggcctgcttcttctcacatgacaaaaactagcccccatctcaatcatataccaaatctctccctcactaaacgtaagccttctcctcactctctcaatcttatccatcatagcaggcagttgaggtggattaaaccaaacccagctacgcaaaatcttagcatactcctcaattacccacataggatgaataatagcagttctaccgtacaaccctaacataaccattcttaatttaactatttatattatcctaactactaccgcattcctactactcaacttaaactccagcaccacaaccctactactatctcgcacctgaaacaagctaacatgactaacacccttaattccatccaccctcctctccctaggaggcctgcccccgctaaccggctttttgcccaaatgggccattatcgaagaattcacaaaaaacaatagcctcatcatccccaccatcatagccaccatcaccctccttaacctctacttctacctacgcctaatctactccacctcaatcacactactccccatatctaacaacgtaaaaataaaatgacagtttgaacatacaaaacccaccccattcctccccacactcatcgcccttaccacgctactcctacctatctccccttttatactaataatcttatagaaatttaggttaaatacagaccaagagccttcaaagccctcagtaagttgcaatacttaatttctgtaacagctaaggactgcaaaaccccactctgcatcaactgaacgcaaatcagccactttaattaagctaagcccttactagaccaatgggacttaaacccacaaacacttagttaacagctaagcaccctaatcaactggcttcaatctacttctcccgccgccgggaaaaaaggcgggagaagccccggcaggtttgaagctgcttcttcgaatttgcaattcaatatgaaaatcacctcggagctggtaaaaagaggcctaacccctgtctttagatttacagtccaatgcttcactcagccattttacctcacccccactgatgttcgccgaccgttgactattctctacaaaccacaaagacattggaacactatacctattattcggcgcatgagctggagtcctaggcacagctctaagcctccttattcgagccgagctgggccagccaggcaaccttctaggtaacgaccacatctacaacgttatcgtcacagcccatgcatttgtaataatcttcttcatagtaatacccatcataatcggaggctttggcaactgactaattcccctaataatcggtgcccccgatatggcgtttccccgcataaacaacataagcttctgactcttacctccctctctcctactcctgctcgcatctgctatagtggaggccggagcaggaacaggttgaacagtctaccctcccttagcagggaactactcccaccctggagcctccgtagacctaaccatcttctccttacacctagcaggtgtctcctctatcttaggggccatcaatttcatcacaacaattatcaatataaaaccccctgccataacccaataccaaacgcccctcttcgtctgatccgtcctaatcacagcagtcctacttctcctatctctcccagtcctagctgctggcatcactatactactaacagaccgcaacctcaacaccaccttcttcgaccccgccggaggaggagaccccattctataccaacacctattctgatttttcggtcaccctgaagtttatattcttatcctaccaggcttcggaataatctcccatattgtaacttactactccggaaaaaaagaaccatttggatacataggtatggtctgagctatgatatcaattggcttcctagggtttatcgtgtgagcacaccatatatttacagtaggaatagacgtagacacacgagcatatttcacctccgctaccataatcatcgctatccccaccggcgtcaaagtatttagctgactcgccacactccacggaagcaatatgaaatgatctgctgcagtgctctgagccctaggattcatctttcttttcaccgtaggtggcctgactggcattgtattagcaaactcatcactagacatcgtactacacgacacgtactacgttgtagctcacttccactatgtcctatcaataggagctgtatttgccatcataggaggcttcattcactgatttcccctattctcaggctacaccctagaccaaacctacgccaaaatccatttcactatcatattcatcggcgtaaatctaactttcttcccacaacactttctcggcctatccggaatgccccgacgttactcggactaccccgatgcatacaccacatgaaacatcctatcatctgtaggctcattcatttctctaacagcagtaatattaataattttcatgatttgagaagccttcgcttcgaagcgaaaagtcctaatagtagaagaaccctccataaacctggagtgactatatggatgccccccaccctaccacacattcgaagagcccgtatacataaaatctagacaaaaaaggaaggaatcgaaccccccaaagctggtttcaagccaaccccatggcctccatgactttttcaaaaaggtattagaaaaaccatttcataactttgtcaaagttaaattataggctaaatcctatatatcttaatggcacatgcagcgcaagtaggtctacaagacgctacttcccctatcatagaagagcttatcacctttcatgatcacgccctcataatcattttccttatctgcttcctagtcctgtatgcccttttcctaacactcacaacaaaactaactaatactaacatctcagacgctcaggaaatagaaaccgtctgaactatcctgcccgccatcatcctagtcctcatcgccctcccatccctacgcatcctttacataacagacgaggtcaacgatccctcccttaccatcaaatcaattggccaccaatggtactgaacctacgagtacaccgactacggcggactaatcttcaactcctacatacttcccccattattcctagaaccaggcgacctgcgactccttgacgttgacaatcgagtagtactcccgattgaagcccccattcgtataataattacatcacaagacgtcttgcactcatgagctgtccccacattaggcttaaaaacagatgcaattcccggacgtctaaaccaaaccactttcaccgctacacgaccgggggtatactacggtcaatgctctgaaatctgtggagcaaaccacagtttcatgcccatcgtcctagaattaattcccctaaaaatctttgaaatagggcccgtatttaccctatagcaccccctctaccccctctagagcccactgtaaagctaacttagcattaaccttttaagttaaagattaagagaaccaacacctctttacagtgaaatgccccaactaaatactaccgtatggcccaccataattacccccatactccttacactattcctcatcacccaactaaaaatattaaacacaaactaccacctacctccctcaccaaagcccataaaaataaaaaattataacaaaccctgagaaccaaaatgaacgaaaatctgttcgcttcattcattgcccccacaatcctaggcctacccgccgcagtactgatcattctatttccccctctattgacccccacctccaaatatctcatcaacaaccgactaatcaccacccaacaatgactaatcaaactaacctcaaaacaaatgatagccatacacaacactaaaggacgaacctgatctcttatactagtatccttaatcatttttattgccacaactaacctcctcggactcctgcctcactcatttacaccaaccacccaactatctataaacctagccatggccatccccttatgagcgggcgcagtgattataggctttcgctctaagattaaaaatgccctagcccacttcttaccacaaggcacacctacaccccttatccccatactagttattatcgaaaccatcagcctactcattcaaccaatagccctggccgtacgcctaaccgctaacattactgcaggccacctactcatgcacctaattggaagcgccaccctagcaatatcaaccattaaccttccctctacacttatcatcttcacaattctaattctactgactatcctagaaatcgctgtcgccttaatccaagcctacgttttcacacttctagtaagcctctacctgcacgacaacacataatgacccaccaatcacatgcctatcatatagtaaaacccagcccatgacccctaacaggggccctctcagccctcctaatgacctccggcctagccatgtgatttcacttccactccataacgctcctcatactaggcctactaaccaacacactaaccatataccaatgatggcgcgatgtaacacgagaaagcacataccaaggccaccacacaccacctgtccaaaaaggccttcgatacgggataatcctatttattacctcagaagtttttttcttcgcaggatttttctgagccttttaccactccagcctagcccctaccccccaactaggagggcactggcccccaacaggcatcaccccgctaaatcccctagaagtcccactcctaaacacatccgtattactcgcatcaggagtatcaatcacctgagctcaccatagtctaatagaaaacaaccgaaaccaaataattcaagcactgcttattacaattttactgggtctctattttaccctcctacaagcctcagagtacttcgagtctcccttcaccatttccgacggcatctacggctcaacattttttgtagccacaggcttccacggacttcacgtcattattggctcaactttcctcactatctgcttcatccgccaactaatatttcactttacatccaaacatcactttggcttcgaagccgccgcctgatactggcattttgtagatgtggtttgactatttctgtatgtctccatctattgatgagggtcttactcttttagtataaatagtaccgttaacttccaattaactagttttgacaacattcaaaaaagagtaataaacttcgccttaattttaataatcaacaccctcctagccttactactaataattattacattttgactaccacaactcaacggctacatagaaaaatccaccccttacgagtgcggcttcgaccctatatcccccgcccgcgtccctttctccataaaattcttcttagtagctattaccttcttattatttgatctagaaattgccctccttttacccctaccatgagccctacaaacaactaacctgccactaatagttatgtcatccctcttattaatcatcatcctagccctaagtctggcctatgagtgactacaaaaaggattagactgagccgaattggtatatagtttaaacaaaacgaatgatttcgactcattaaattatgataatcatatttaccaaatgcccctcatttacataaatattatactagcatttaccatctcacttctaggaatactagtatatcgctcacacctcatatcctccctactatgcctagaaggaataatactatcgctgttcattatagctactctcataaccctcaacacccactccctcttagccaatattgtgcctattgccatactagtctttgccgcctgcgaagcagcggtgggcctagccctactagtctcaatctccaacacatatggcctagactacgtacataacctaaacctactccaatgctaaaactaatcgtcccaacaattatattactaccactgacatgactttccaaaaaacacataatttgaatcaacacaaccacccacagcctaattattagcatcatccccctactattttttaaccaaatcaacaacaacctatttagctgttccccaaccttttcctccgaccccctaacaacccccctcctaatactaactacctgactcctacccctcacaatcatggcaagccaacgccacttatccagtgaaccactatcacgaaaaaaactctacctctctatactaatctccctacaaatctccttaattataacattcacagccacagaactaatcatattttatatcttcttcgaaaccacacttatccccaccttggctatcatcacccgatgaggcaaccagccagaacgcctgaacgcaggcacatacttcctattctacaccctagtaggctcccttcccctactcatcgcactaatttacactcacaacaccctaggctcactaaacattctactactcactctcactgcccaagaactatcaaactcctgagccaacaacttaatatgactagcttacacaatagcttttatagtaaagatacctctttacggactccacttatgactccctaaagcccatgtcgaagcccccatcgctgggtcaatagtacttgccgcagtactcttaaaactaggcggctatggtataatacgcctcacactcattctcaaccccctgacaaaacacatagcctaccccttccttgtactatccctatgaggcataattataacaagctccatctgcctacgacaaacagacctaaaatcgctcattgcatactcttcaatcagccacatagccctcgtagtaacagccattctcatccaaaccccctgaagcttcaccggcgcagtcattctcataatcgcccacggacttacatcctcattactattctgcctagcaaactcaaactacgaacgcactcacagtcgcatcataatcctctctcaaggacttcaaactctactcccactaatagctttttgatgacttctagcaagcctcgctaacctcgccttaccccccactattaacctactgggagaactctctgtgctagtaaccacgttctcctgatcaaatatcactctcctacttacaggactcaacatactagtcacagccctatactccctctacatatttaccacaacacaatggggctcactcacccaccacattaacaacataaaaccctcattcacacgagaaaacaccctcatgttcatacacctatcccccattctcctcctatccctcaaccccgacatcattaccgggttttcctcttgtaaatatagtttaaccaaaacatcagattgtgaatctgacaacagaggcttacgaccccttatttaccgagaaagctcacaagaactgctaactcatgcccccatgtctaacaacatggctttctcaacttttaaaggataacagctatccattggtcttaggccccaaaaattttggtgcaactccaaataaaagtaataaccatgcacactactataaccaccctaaccctgacttccctaattccccccatccttaccaccctcgttaaccctaacaaaaaaaactcatacccccattatgtaaaatccattgtcgcatccacctttattatcagtctcttccccacaacaatattcatgtgcctagaccaagaagttattatctcgaactgacactgagccacaacccaaacaacccagctctccctaagcttcaaactagactacttctccataatattcatccctgtagcattgttcgttacatggtccatcatagaattctcactgtgatatataaactcagacccaaacattaatcagttcttcaaatatctactcattttcctaattaccatactaatcttagttaccgctaacaacctattccaactgttcatcggctgagagggcgtaggaattatatccttcttgctcatcagttgatgatacgcccgagcagatgccaacacagcagccattcaagcaatcctatacaaccgtatcggcgatatcggtttcatcctcgccttagcatgatttatcctacactccaactcatgagacccacaacaaatagcccttctaaacgctaatccaagcctcaccccactactaggcctcctcctagcagcagcaggcaaatcagcccaattaggtctccacccctgactcccctcagccatagaaggccccaccccagtctcagccctactccactcaagcactatagttgtagcaggagtcttcttactcatccgcttccaccccctagcagaaaatagcccactaatccaaactctaacactatgcttaggcgctatcaccactctgttcgcagcagtctgcgcccttacacaaaatgacatcaaaaaaatcgtagccttctccacttcaagtcaactaggactcataatagttacaatcggcatcaaccaaccacacctagcattcctgcacatctgcacccacgccttcttcaaagccatactatttatgtgctccgggtccatcatccacaaccttaacaatgaacaagatattcgaaaaataggaggactactcaaaaccatacctctcacttcaacctccctcaccattggcagcctagcattagcaggaatacctttcctcacaggtttctactccaaagaccacatcatcgaaaccgcaaacatatcatacacaaacgcctgagccctatctattactctcatcgctacctccctgacaagcgcctatagcactcgaataattcttctcaccctaacaggtcaacctcgcttccccacccttactaacattaacgaaaataaccccaccctactaaaccccattaaacgcctggcagccggaagcctattcgcaggatttctcattactaacaacatttcccccgcatcccccttccaaacaacaatccccctctacctaaaactcacagccctcgctgtcactttcctaggacttctaacagccctagacctcaactacctaaccaacaaacttaaaataaaatccccaccatgcacattttatttctccaacatactcggattctaccctagcatcacacaccgcacaatcccctatctaggccttcttacgagccaaaacctgcccctactcctcctagacctaacctgactagaaaagctattacctaaaacaatttcacagcaccaaatctccacctccatcatcacctcaacccaaaaaggcataattaaactttacttcctctctttcttcttcccactcatcctaaccctactcctaatcacataacctattcccccgagcaatctcaattacaatatatacaccaacaaacaatgttcaaccagtaactactactaatcaacgcccataatcatacaaagcccccgcaccaataggatcctcccgaatcaaccctgacccttctccttcataaattattcagcttcctacactattaaagtttaccacaaccaccaccccatcatactctttcacccacagcaccaatcctacctccatcgctaaccccactaaaacactcaccaagacctcaacccctgacccccatgcctcaggatactcctcaatagccatcgctgtagtatatccaaagacaaccatcattccccctaaataaattaaaaaaactattaaacccatataacctcccccaaaattcagaataataacacacccgaccacaccgctaacaatcaatactaaacccccataaataggagaaggcttagaagaaaaccccacaaaccccattactaaacccacactcaacagaaacaaagcatacatcattattctcgcacggactacaaccacgaccaatgatatgaaaaaccatcgttgtatttcaactacaagaacaccaatgaccccaatacgcaaaattaaccccctaataaaattaattaaccactcattcatcgacctccccaccccatccaacatctccgcatgatgaaacttcggctcactccttggcgcctgcctgatcctccaaatcaccacaggactattcctagccatgcactactcaccagacgcctcaaccgccttttcatcaatcgcccacatcactcgagacgtaaattatggctgaatcatccgctaccttcacgccaatggcgcctcaatattctttatctgcctcttcctacacatcgggcgaggcctatattacggatcatttctctactcagaaacctgaaacatcggcattatcctcctgcttacaactatagcaacagccttcataggctatgtcctcccgtgaggccaaatatcattctgaggggccacagtaattacaaacttactatccgccatcccatacattgggacagacctagttcaatgaatctgaggaggctactcagtagacagtcccaccctcacacgattctttacctttcacttcatcttacccttcattattgcagccctagcagcactccacctcctattcttgcacgaaacgggatcaaacaaccccctaggaatcacctcccattccgataaaatcaccttccacccttactacacaatcaaagacgccctcggcttacttctcttccttctctccttaatgacattaacactattctcaccagacctcctaggcgacccagacaattataccctagccaaccccttaaacacccctccccacatcaagcccgaatgatatttcctattcgcctacacaattctccgatccgtccctaacaaactaggaggcgtccttgccctattactatccatcctcatcctagcaataatccccatcctccatatatccaaacaacaaagcataatatttcgcccactaagccaatcactttattgactcctagccgcagacctcctcattctaacctgaatcggaggacaaccagtaagctacccttttaccatcattggacaagtagcatccgtactatacttcacaacaatcctaatcctaataccaactatctccctaattgaaaacaaaatactcaaatgggcctgtccttgtagtataaactaatacaccagtcttgtaaaccggagatgaaaacctttttccaaggacaaatcagagaaaaagtctttaactccaccattagcacccaaagctaagattctaatttaaactattctctgttctttcatggggaagcagatttgggtaccacccaagtattgactcacccatcaacaaccgctatgtatttcgtacattactgccagccaccatgaatatcgtacggtaccataaatacttgaccacctgtagtacataaaaacccaatccacatcaaaaccccctccccatgcttacaagcaagtacagcaatcaaccttcaactatcacacatcaactgcaactccaaagccacccctcacccactaggataccaacaaacctacccacccttaacagtacatagtacataaagccatttaccgtacatagcacattacagtcaaatcccttctcgtccccatggatgacccccctcagataggggtcccttgaccaccatcctccgtgaaatcaatatcccgcacaagagtgctactctcctcgctccgggcccataacacttgggggtagctaaagtgaactgtatccgacatctggttcctacttcagggtcataaagcctaaatagcccacacgttccccttaaataagacatcacgatg

SEQ ID NO: 415 - DNA, 16571 bp, Homo sapiens mitochondrial
  3109: "n" refers to a nucleotide at position 3107 of the Cambridge Reference Sequence (CRS, Anderson et al. 1981 Nature 290:457-465), later determined to be absent from the human mtDNA sequence according to the revised CRS (rCRS, Andrews et al. 1999 Nature Genetics 23:147); "n" therefore represents a single nucleotide deletion at a position corresponding to nucleotide 3107 of SEQ ID NO:1 as provided herein.
gatcacaggtctatcaccctattaaccactcacgggagctctccatgcatttggtattttcgtctggggggtatgcacgcgatagcattgcgagacgctggagccggagcaccctatgtcgcagtatctgtctttgattcctgcctcatcctattatttatcgcacctacgttcaatattacaggcgaacatacttactaaagtgtgttaattaattaatgcttgtaggacataataataacaattgaatgtctgcacagccgctttccacacagacatcataacaaaaaattttcaccaaaccccccctcccccccgcttctggccacagcacttaaacacatctctgccaaaccccaaaaacaaagaaccctaacaccagcctaaccagatttcaaattttatcttttggcggtatgcacttttaacagtcaccccccaactaacacattattttcccctcccactcccatactactaatctcatcaatacaacccccgcccatcctacccagcacacacacaccgctgctaaccccataccccgaaccaaccaaaccccaaagacaccccccacagtttatgtagcttacctcctcaaagcaatacactgaaaatgtttagacgggctcacatcaccccataaacaaataggtttggtcctagcctttctattagctcttagtaagattacacatgcaagcatccccgttccagtgagttcaccctctaaatcaccacgatcaaaagggacaagcatcaagcacgcagcaatgcagctcaaaacgcttagcctagccacacccccacgggaaacagcagtgattaacctttagcaataaacgaaagtttaactaagctatactaaccccagggttggtcaatttcgtgccagccaccgcggtcacacgattaacccaagtcaatagaagccggcgtaaagagtgttttagatcaccccctccccaataaagctaaaactcacctgagttgtaaaaaactccagttgacacaaaatagactacgaaagtggctttaacatatctgaacacacaatagctaagacccaaactgggattagataccccactatgcttagccctaaacctcaacagttaaatcaacaaaactgctcgccagaacactacgagccacagcttaaaactcaaaggacctggcggtgcttcatatccctctagaggagcctgttctgtaatcgataaaccccgatcaacctcaccacctcttgctcagcctatataccgccatcttcagcaaaccctgatgaaggctacaaagtaagcgcaagtacccacgtaaagacgttaggtcaaggtgtagcccatgaggtggcaagaaatgggctacattttctaccccagaaaactacgatagcccttatgaaacttaagggtcgaaggtggatttagcagtaaactgagagtagagtgcttagttgaacagggccctgaagcgcgtacacaccgcccgtcaccctcctcaagtatacttcaaaggacatttaactaaaacccctacgcatttatatagaggagacaagtcgtaacatggtaagtgtactggaaagtgcacttggacgaaccagagtgtagcttaacacaaagcacccaacttacacttaggagatttcaacttaacttgaccgctctgagctaaacctagccccaaacccactccaccttactaccagacaaccttagccaaaccatttacccaaataaagtataggcgatagaaattgaaacctggcgcaatagatatagtaccgcaagggaaagatgaaaaattataaccaagcataatatagcaaggactaacccctataccttctgcataatgaattaactagaaataactttgcaaggagagccaaagctaagacccccgaaaccagacgagctacctaagaacagctaaaagagcacacccgtctatgtagcaaaatagtgggaagatttataggtagaggcgacaaacctaccgagcctggtgatagctggttgtccaagatagaatcttagttcaactttaaatttgcccacagaaccctctaaatccccttgtaaatttaactgttagtccaaagaggaacagctctttggacactaggaaaaaaccttgtagagagagtaaaaaatttaacacccatagtaggcctaaaagcagccaccaattaagaaagcgttcaagctcaacacccactacctaaaaaatcccaaacatataactgaactcctcacacccaattggaccaatctatcaccctatagaagaactaatgttagtataagtaacatgaaaacattctcctccgcataagcctgcgtcagattaaaacactgaactgacaattaacagcccaatatctacaatcaaccaacaagtcattattaccctcactgtcaacccaacacaggcatgctcataaggaaaggttaaaaaaagtaaaaggaactcggcaaatcttaccccgcctgtttaccaaaaacatcacctctagcatcaccagtattagaggcaccgcctgcccagtgacacatgtttaacggccgcggtaccctaaccgtgcaaaggtagcataatcacttgttccttaaatagggacctgtatgaatggctccacgagggttcagctgtctcttacttttaaccagtgaaattgacctgcccgtgaagaggcgggcataacacagcaagacgagaagaccctatggagctttaatttattaatgcaaacagtacctaacaaacccacaggtcctaaactaccaaacctgcattaaaaatttcggttggggcgacctcggagcagaacccaacctccgagcagtacatgctaagacttcaccagtcaaagcgaactactatactcaattgatccaataacttgaccaacggaacaagttaccctagggataacagcgcaatcctattctagagtccatatcaacaatagggtttacgacctcgatgttggatcaggacatcccgatggtgcagccgctattaaaggttcgtttgttcaacgattaaagtcctacgtgatctgagttcagaccggagtaatccaggtcggtttctatctacnttcaaattcctccctgtacgaaaggacaagagaaataaggcctacttcacaaagcgccttcccccgtaaatgatatcatctcaacttagtattatacccacacccacccaagaacagggtttgttaagatggcagagcccggtaatcgcataaaacttaaaactttacagtcagaggttcaattcctcttcttaacaacatacccatggccaacctcctactcctcattgtacccattctaatcgcaatggcattcctaatgcttaccgaacgaaaaattctaggctatatacaactacgcaaaggccccaacgttgtaggcccctacgggctactacaacccttcgctgacgccataaaactcttcaccaaagagcccctaaaacccgccacatctaccatcaccctctacatcaccgccccgaccttagctctcaccatcgctcttctactatgaacccccctccccatacccaaccccctggtcaacctcaacctaggcctcctatttattctagccacctctagcctagccgtttactcaatcctctgatcagggtgagcatcaaactcaaactacgccctgatcggcgcactgcgagcagtagcccaaacaatctcatatgaagtcaccctagccatcattctactatcaacattactaataagtggctcctttaacctctccacccttatcacaacacaagaacacctctgattactcctgccatcatgacccttggccataatatgatttatctccacactagcagagaccaaccgaacccccttcgaccttgccgaaggggagtccgaactagtctcaggcttcaacatcgaatacgccgcaggccccttcgccctattcttcatagccgaatacacaaacattattataataaacaccctcaccactacaatcttcctaggaacaacatatgacgcactctcccctgaactctacacaacatattttgtcaccaagaccctacttctaacctccctgttcttatgaattcgaacagcatacccccgattccgctacgaccaactcatacacctcctatgaaaaaacttcctaccactcaccctagcattacttatatgatatgtctccatacccattacaatctccagcattccccctcaaacctaagaaatatgtctgataaaagagttactttgatagagtaaataataggagcttaaacccccttatttctaggactatgagaatcgaacccatccctgagaatccaaaattctccgtgccacctatcacaccccatcctaaagtaaggtcagctaaataagctatcgggcccataccccgaaaatgttggttatacccttcccgtactaattaatcccctggcccaacccgtcatctactctaccatctttgcaggcacactcatcacagcgctaagctcgcactgattttttacctgagtaggcctagaaataaacatgctagcttttattccagttctaaccaaaaaaataaaccctcgttccacagaagctgccatcaagtatttcctcacgcaagcaaccgcatccataatccttctaatagctatcctcttcaacaatatactctccggacaatgaaccataaccaatactaccaatcaatactcatcattaataatcataatggctatagcaataaaactaggaatagccccctttcacttctgagtcccagaggttacccaaggcacccctctgacatccggcctgcttcttctcacatgacaaaaactagcccccatctcaatcatataccaaatctctccctcactaaacgtaagccttctcctcactctctcaatcttatccatcatagcaggcagttgaggtggattaaaccaaacccagctacgcaaaatcttagcatactcctcaattacccacataggatgaataatagcagttctaccgtacaaccctaacataaccattcttaatttaactatttatattatcctaactactaccgcattcctactactcaacttaaactccagcaccacgaccctacttctatctcgcacctgaaacaagctaacatgactaacacccttaattccatccaccctcctctccctaggaggcctgcccccgctaaccggctttttgcccaaatgggccattatcgaagaattcacaaaaaacaatagcctcatcatccccaccatcatagccaccatcaccctccttaacctctacttctacctacgcctaatctactccacctcaatcacactactccccatatctaacaacgtaaaaataaaatgacagtttgaacatacaaaacccaccccattcctccccacactcatcgcccttaccacgctactcctacctatctccccttttatactaataatcttatagaaatttaggttaaatacagaccaagagccttcaaagccctcagtaagttgcaatacttaatttctgtaacagctaaggactgcaaaaccccactctgcatcaactgaacgcaaatcagccactttaattaagctaagcccttactagaccaatgggacttaaacccacaaacacttagttaacagctaagcaccctaatcaactggcttcaatctacttctcccgccgccgggaaaaaaggcgggagaagccccggcaggtttgaagctgcttcttcgaatttgcaattcaatatgaaaatcacctcggagctggtaaaaagaggcctaacccctgtctttagatttacagtccaatgcttcactcagccattttacctcacccccactgatgttcgccgaccgttgactattctctacaaaccacaaagacattggaacactatacctattattcggcgcatgagctggagtcctaggcacagctctaagcctccttattcgagccgagctgggccagccaggcaaccttctaggtaacgaccacatctacaacgttatcgtcacagcccatgcatttgtaataatcttcttcatagtaatacccatcataatcggaggctttggcaactgactagttcccctaataatcggtgcccccgatatggcgtttccccgcataaacaacataagcttctgactcttacctccctctctcctactcctgctcgcatctgctatagtggaggccggagcaggaacaggttgaacagtctaccctcccttagcagggaactactcccaccctggagcctccgtagacctaaccatcttctccttacacctagcaggtgtctcctctatcttaggggccatcaatttcatcacaacaattatcaatataaaaccccctgccataacccaataccaaacgcccctcttcgtctgatccgtcctaatcacagcagtcctacttctcctatctctcccagtcctagctgctggcatcactatactactaacagaccgcaacctcaacaccaccttcttcgaccccgccggaggaggagaccccattctataccaacacctattctgatttttcggtcaccctgaagtttatattcttatcctaccaggcttcggaataatctcccatattgtaacttactactccggaaaaaaagaaccatttggatacataggtatggtctgagctatgatatcaattggcttcctagggtttatcgtgtgagcacaccatatatttacagtaggaatagacgtagacacacgagcatatttcacctccgctaccataatcatcgctatccccaccggcgtcaaagtatttagctgactcgccacactccacggaagcaatatgaaatgatctgctgcagtgctctgagccctaggattcatctttcttttcaccgtaggtggcctgactggcattgtattagcaaactcatcactagacatcgtactacacgacacgtactacgttgtagcccacttccactatgtcctatcaataggagctgtatttgccatcataggaggcttcattcactgatttcccctattctcaggctacaccctagaccaaacctacgccaaaatccatttcactatcatattcatcggcgtaaatctaactttcttcccacaacactttctcggcctatccggaatgccccgacgttactcggactaccccgatgcatacaccacatgaaacatcctatcatctgtaggctcattcatttctctaacagcagtaatattaataattttcatgatttgagaagccttcgcttcgaagcgaaaagtcctaatagtagaagaaccctccataaacctggagtgactatatggatgccccccaccctaccacacattcgaagaacccgtatacataaaatctagacaaaaaaggaaggaatcgaaccccccaaagctggtttcaagccaaccccatggcctccatgactttttcaaaaaggtattagaaaaaccatttcataactttgtcaaagttaaattataggctaaatcctatatatcttaatggcacatgcagcgcaagtaggtctacaagacgccacttcccctatcatagaagagcttatcacctttcatgatcacgccctcataatcattttccttatctgcttcctagtcctgtatgcccttttcctaacactcacaacaaaactaactaatactaacatctcagacgctcaggaaatagaaaccgtctgaactatcctgcccgccatcatcctagtcctcatcgccctcccatccctacgcatcctttacataacagacgaggtcaacgatccctcccttaccatcaaatcaattggccaccaatggtactgaacctacgagtacaccgactacggcggactaatcttcaactcctacatacttcccccattattcctagaaccaggcgacctgcgactccttgacgttgacaatcgagtagtactcccgattgaagcccccattcgtataataattacatcacaagacgtcttgcactcatgagctgtccccacattaggcttaaaaacagatgcaattcccggacgtctaaaccaaaccactttcaccgctacacgaccgggggtatactacggtcaatgctctgaaatctgtggagcaaaccacagtttcatgcccatcgtcctagaattaattcccctaaaaatctttgaaatagggcccgtatttaccctatagcaccccctctaccccctctagagcccactgtaaagctaacttagcattaaccttttaagttaaagattaagagaaccaacacctctttacagtgaaatgccccaactaaatactaccgtatggcccaccataattacccccatactccttacactattcctcatcacccaactaaaaatattaaacacaaactaccacctacctccctcaccaaagcccataaaaataaaaaattataacaaaccctgagaaccaaaatgaacgaaaatctgttcgcttcattcattgcccccacaatcctaggcctacccgccgcagtactgatcattctatttccccctctattgatccccacctccaaatatctcatcaacaaccgactaatcaccacccaacaatgactaatcaaactaacctcaaaacaaatgataaccatacacaacactaaaggacgaacctgatctcttatactagtatccttaatcatttttattgccacaactaacctcctcggactcctgcctcactcatttacaccaaccacccaactatctataaacctagccatggccatccccttatgagcgggcgcagtgattataggctttcgctctaagattaaaaatgccctagcccacttcttaccacaaggcacacctacaccccttatccccatactagttattatcgaaaccatcagcctactcattcaaccaatagccctggccgtacgcctaaccgctaacattactgcaggccacctactcatgcacctaattggaagcgccaccctagcaatatcaaccattaaccttccctctacacttatcatcttcacaattctaattctactgactatcctagaaatcgctgtcgccttaatccaagcctacgttttcacacttctagtaagcctctacctgcacgacaacacataatgacccaccaatcacatgcctatcatatagtaaaacccagcccatgacccctaacaggggccctctcagccctcctaatgacctccggcctagccatgtgatttcacttccactccataacgctcctcatactaggcctactaaccaacacactaaccatataccaatgatggcgcgatgtaacacgagaaagcacataccaaggccaccacacaccacctgtccaaaaaggccttcgatacgggataatcctatttattacctcagaagtttttttcttcgcaggatttttctgagccttttaccactccagcctagcccctaccccccaattaggagggcactggcccccaacaggcatcaccccgctaaatcccctagaagtcccactcctaaacacatccgtattactcgcatcaggagtatcaatcacctgagctcaccatagtctaatagaaaacaaccgaaaccaaataattcaagcactgcttattacaattttactgggtctctattttaccctcctacaagcctcagagtacttcgagtctcccttcaccatttccgacggcatctacggctcaacattttttgtagccacaggcttccacggacttcacgtcattattggctcaactttcctcactatctgcttcatccgccaactaatatttcactttacatccaaacatcactttggcttcgaagccgccgcctgatactggcattttgtagatgtggtttgactatttctgtatgtctccatctattgatgagggtcttactcttttagtataaatagtaccgttaacttccaattaactagttttgacaacattcaaaaaagagtaataaacttcgccttaattttaataatcaacaccctcctagccttactactaataattattacattttgactaccacaactcaacggctacatagaaaaatccaccccttacgagtgcggcttcgaccctatatcccccgcccgcgtccctttctccataaaattcttcttagtagctattaccttcttattatttgatctagaaattgccctccttttacccctaccatgagccctacaaacaactaacctgccactaatagttatgtcatccctcttattaatcatcatcctagccctaagtctggcctatgagtgactacaaaaaggattagactgaaccgaattggtatatagtttaaacaaaacgaatgatttcgactcattaaattatgataatcatatttaccaaatgcccctcatttacataaatattatactagcatttaccatctcacttctaggaatactagtatatcgctcacacctcatatcctccctactatgcctagaaggaataatactatcgctgttcattatagctactctcataaccctcaacacccactccctcttagccaatattgtgcctattgccatactagtctttgccgcctgcgaagcagcggtgggcctagccctactagtctcaatctccaacacatatggcctagactacgtacataacctaaacctactccaatgctaaaactaatcgtcccaacaattatattactaccactgacatgactttccaaaaaacacataatttgaatcaacacaaccacccacagcctaattattagcatcatccctctactattttttaaccaaatcaacaacaacctatttagctgttccccaaccttttcctccgaccccctaacaacccccctcctaatactaactacctgactcctacccctcacaatcatggcaagccaacgccacttatccagtgaaccactatcacgaaaaaaactctacctctctatactaatctccctacaaatctccttaattataacattcacagccacagaactaatcatattttatatcttcttcgaaaccacacttatccccaccttggctatcatcacccgatgaggcaaccagccagaacgcctgaacgcaggcacatacttcctattctacaccctagtaggctcccttcccctactcatcgcactaatttacactcacaacaccctaggctcactaaacattctactactcactctcactgcccaagaactatcaaactcctgagccaacaacttaatatgactagcttacacaatagcttttatagtaaagatacctctttacggactccacttatgactccctaaagcccatgtcgaagcccccatcgctgggtcaatagtacttgccgcagtactcttaaaactaggcggctatggtataatacgcctcacactcattctcaaccccctgacaaaacacatagcctaccccttccttgtactatccctatgaggcataattataacaagctccatctgcctacgacaaacagacctaaaatcgctcattgcatactcttcaatcagccacatagccctcgtagtaacagccattctcatccaaaccccctgaagcttcaccggcgcagtcattctcataatcgcccacgggcttacatcctcattactattctgcctagcaaactcaaactacgaacgcactcacagtcgcatcataatcctctctcaaggacttcaaactctactcccactaatagctttttgatgacttctagcaagcctcgctaacctcgccttaccccccactattaacctactgggagaactctctgtgctagtaaccacgttctcctgatcaaatatcactctcctacttacaggactcaacatactagtcacagccctatactccctctacatatttaccacaacacaatggggctcactcacccaccacattaacaacataaaaccctcattcacacgagaaaacaccctcatgttcatacacctatcccccattctcctcctatccctcaaccccgacatcattaccgggttttcctcttgtaaatatagtttaaccaaaacatcagattgtgaatctgacaacagaggcttacgaccccttatttaccgagaaagctcacaagaactgctaactcatgcccccatgtctaacaacatggctttctcaacttttaaaggataacagctatccattggtcttaggccccaaaaattttggtgcaactccaaataaaagtaataaccatgcacactactataaccaccctaaccctgacttccctaattccccccatccttaccaccctcgttaaccctaacaaaaaaaactcatacccccattatgtaaaatccattgtcgcatccacctttattatcagtctcttccccacaacaatattcatgtgcctagaccaagaagttattatctcgaactgacactgagccacaacccaaacaacccagctctccctaagcttcaaactagactacttctccataatattcatccctgtagcattgttcgttacatggtccatcatagaattctcactgtgatatataaactcagacccaaacattaatcagttcttcaaatatctactcatcttcctaattaccatactaatcttagttaccgctaacaacctattccaactgttcatcggctgagagggcgtaggaattatatccttcttgctcatcagttgatgatacgcccgagcagatgccaacacagcagccattcaagcaatcctatacaaccgtatcggcgatatcggtttcatcctcgccttagcatgatttatcctacactccaactcatgagacccacaacaaatagcccttctaaacgctaatccaagcctcaccccactactaggcctcctcctagcagcagcaggcaaatcagcccaattaggtctccacccctgactcccctcagccatagaaggccccaccccagtctcagccctactccactcaagcactatagttgtagcaggaatcttcttactcatccgcttccaccccctagcagaaaatagcccactaatccaaactctaacactatgcttaggcgctatcaccactctgttcgcagcagtctgcgcccttacacaaaatgacatcaaaaaaatcgtagccttctccacttcaagtcaactaggactcataatagttacaatcggcatcaaccaaccacacctagcattcctgcacatctgtacccacgccttcttcaaagccatactatttatgtgctccgggtccatcatccacaaccttaacaatgaacaagatattcgaaaaataggaggactactcaaaaccatacctctcacttcaacctccctcaccattggcagcctagcattagcaggaatacctttcctcacaggtttctactccaaagaccacatcatcgaaaccgcaaacatatcatacacaaacgcctgagccctatctattactctcatcgctacctccctgacaagcgcctatagcactcgaataattcttctcaccctaacaggtcaacctcgcttccccacccttactaacattaacgaaaataaccccaccctactaaaccccattaaacgcctggcagccggaagcctattcgcaggatttctcattactaacaacatttcccccgcatcccccttccaaacaacaatccccctctacctaaaactcacagccctcgctgtcactttcctaggacttctaacagccctagacctcaactacctaaccaacaaacttaaaataaaatccccactatgcacattttatttctccaacatactcggattctaccctagcatcacacaccgcacaatcccctatctaggccttcttacgagccaaaacctgcccctactcctcctagacctaacctgactagaaaagctattacctaaaacaatttcacagcaccaaatctccacctccatcatcacctcaacccaaaaaggcataattaaactttacttcctctctttcttcttcccactcatcctaaccctactcctaatcacataacctattcccccgagcaatctcaattacaatatatacaccaacaaacaatgttcaaccagtaactactactaatcaacgcccataatcatacaaagcccccgcaccaataggatcctcccgaatcaaccctgacccctctccttcataaattattcagcttcctacactattaaagtttaccacaaccaccaccccatcatactctttcacccacagcaccaatcctacctccatcgctaaccccactaaaacactcaccaagacctcaacccctgacccccatgcctcaggatactcctcaatagccatcgctgtagtatatccaaagacaaccatcattccccctaaataaattaaaaaaactattaaacccatataacctcccccaaaattcagaataataacacacccgaccacaccgctaacaatcaatactaaacccccataaataggagaaggcttagaagaaaaccccacaaaccccattactaaacccacactcaacagaaacaaagcatacatcattattctcgcacggactacaaccacgaccaatgatatgaaaaaccatcgttgtatttcaactacaagaacaccaatgaccccaatacgcaaaactaaccccctaataaaattaattaaccactcattcatcgacctccccaccccatccaacatctccgcatgatgaaacttcggctcactccttggcgcctgcctgatcctccaaatcaccacaggactattcctagccatgcactactcaccagacgcctcaaccgccttttcatcaatcgcccacatcactcgagacgtaaattatggctgaatcatccgctaccttcacgccaatggcgcctcaatattctttatctgcctcttcctacacatcgggcgaggcctatattacggatcatttctctactcagaaacctgaaacatcggcattatcctcctgcttgcaactatagcaacagccttcataggctatgtcctcccgtgaggccaaatatcattctgaggggccacagtaattacaaacttactatccgccatcccatacattgggacagacctagttcaatgaatctgaggaggctactcagtagacagtcccaccctcacacgattctttacctttcacttcatcttgcccttcattattgcagccctagcagcactccacctcctattcttgcacgaaacgggatcaaacaaccccctaggaatcacctcccattccgataaaatcaccttccacccttactacacaatcaaagacgccctcggcttacttctcttccttctctccttaatgacattaacactattctcaccagacctcctaggcgacccagacaattataccctagccaaccccttaaacacccctccccacatcaagcccgaatgatatttcctattcgcctacacaattctccgatccgtccctaacaaactaggaggcgtccttgccctattactatccatcctcatcctagcaataatccccatcctccatatatccaaacaacaaagcataatatttcgcccactaagccaatcactttattgactcctagccgcagacctcctcattctaacctgaatcggaggacaaccagtaagctacccttttaccatcattggacaagtagcatccgtactatacttcacaacaatcctaatcctaataccaactatctccctaattgaaaacaaaatactcaaatgggcctgtccttgtagtataaactaatacaccagtcttgtaaaccggagatgaaaacctttttccaaggacaaatcagagaaaaagtctttaactccaccattagcacccaaagctaagattctaatttaaactattctctgttctttcatggggaagcagatttgggtaccacccaagtattgactcacccatcaacaaccgctatgtatttcgtacattactgccagccaccatgaatattgtacggtaccataaatacttgaccacctatagtacataaaaacccaatccacatcaaaaccccctccccatgcttacaagcaagtacagcaatcaaccctcaactatcacacatcaactgcaactccaaagccacccctcacccactaggataccaacaaacctacccacccttaacagtacatagtacataaagccatttaccgtacatagcacattacagtcaaatcccttctcgtccccatggatgacccccctcagataggggtcccttgaccaccatcctccgtgaaatcaatatcccgcacaagagtgctactctcctcgctccgggcccataacacttgggggtagctaaagtgaactgtatccgacatctggttcctacttcagggccataaagcctaaatagcccacacgttccccttaaataagacatcacgatg

SEQ ID NO: 416 - DNA, 16569 bp, Homo sapiens mitochondrial
  3107: "n" refers to a nucleotide at position 3107 of the Cambridge Reference Sequence (CRS, Anderson et al. 1981 Nature 290:457-465), later determined to be absent from the human mtDNA sequence according to the revised CRS (rCRS, Andrews et al. 1999 Nature Genetics 23:147); "n" therefore represents a single nucleotide deletion at a position corresponding to nucleotide 3107 of SEQ ID NO:1 as provided herein.
gatcacaggtctatcaccctattaaccactcacgggagctctccatgcatttggtattttcgtctggggggtgtgcacgcgatagcattgcgagacgctggagccggagcaccctatgtcgcagtatctgtctttgattcctgccccatcctgttatttatcgcacctacgttcaatattacaggcgaacatacttactaaagtgtgttaattaattaatgcttgtaggacatagtaataacaattgaatgtctgcacagccgctttccacacagacatcataacaaaaaatttccaccaaaccccccctcccccccgcttctggccacagcacttaaacacatctctgccaaaccccaaaaacaaagaaccctaacaccagcctaaccagatttcaaattttatcttttggcggtatgcacttttaacagtcaccccccaactaacacattattttcccctcccactcccatactactaatctcatcaatacaacccccgcccatcctacccagcacacacaccgctgctaaccccataccccgaaccaaccaaaccccaaagacaccccccacagtttatgtagcttacctcctcaaagcaatacactgaaaatgtttagacgggctcacatcaccccataaacaaataggtttggtcctggcctttctattagctcttagtaagattacacatgcaagcatccccgttccagtgagttcaccctctaaatcaccacgatcaaaagggacaagcatcaagcacgcagcaatgcagctcaaaacgcttagcctagccacacccccacgggaaacagcagtgattaacctttagcaataaacgaaagtttaactaagctatactaaccccagggttggtcaatttcgtgccagccaccgcggtcacacgattaacccaagtcaatagaagccggcgtaaagagtgttttagatcaccccctccccaataaagctaaaactcacctgagttgtaaaaaactccagttgacacaaaatagactacgaaagtggctttaacatatctgaacacacaatagctaagacccaaactgggattagataccccactatgcttagccctaaacctcaacagttaaatcaacaaaactgctcgccagaacactacgagccacagcttaaaactcaaaggacctggcggtgcttcatatccctctagaggagcctgttctgtaatcgataaaccccgatcaacctcaccacctcttgctcagcctatataccgccatcttcagcaaaccctgatgaaggctacaaagtaagcgcaagtacccacgtaaagacgttaggtcaaggtgtagcccatgaggtggcaagaaatgggctacattttctaccccagaaaactacgatagcccttatgaaacttaagggtcgaaggtggatttagcagtaaactgagagtagagtgcttagttgaacagggccctgaagcgcgtacacaccgcccgtcaccctcctcaagtatacttcaaaggacatttaactaaaacccctacgcatttatatagaggagacaagtcgtaacatggtaagtgtactggaaagtgcacttggacgaaccagagtgtagcttaacacaaagcacccaacttacacttaggagatttcaacttaacttgaccgctctgagctaaacctagccccaaacccactccaccttactaccagacaaccttagccaaaccatttacccagataaagtataggcgatagaaattgaaacctggcgcaatagatatagtaccgcaagggaaagatgaaaaattataaccaagcataatatagcaaggactaacccctataccttctgcataatgaattaactagaaataactttgcaaggagagccaaagctaagacccccgaaaccagacgagctacctaagaacagctaaaagagcacacccgtctatgtagcaaaatagtgggaagatttataggtagaggcgacaaacctaccgagcctggtgatagctggttgtccaagatagaatcttagttcaactttaaatttgcccacagaaccctctaaatccccttgtaaatttaactgttagtccaaagaggaacagctctttggacactaggaaaaaaccttgtagagagagtaaaaaatttaacacccatagtaggcctaaaagcagccaccaattaagaaagcgttcaagctcaacacccactacctaaaaaatcccaaacatataactgaactcctcacacccaattggaccaatctatcaccctatagaagaactaatgttagtataagtaacatgaaaacattctcctccgcataagcctgcgtcagattaaaacactgaactgacaattaacagcccaatatctacaatcaaccaacaagtcattattaccctcactgtcaacccaacacaggcatgctcataaggaaaggttaaaaaaagtaaaaggaactcggcaaatcttaccccgcctgtttaccaaaaacatcacctctagcatcaccagtattagaggcaccgcctgcccagtgacacatgtttaacggccgcggtaccctaaccgtgcaaaggtagcataatcacttgttccttaaatagggacctgtatgaatggctccacgagggttcagctgtctcttacttttaaccagtgaaattgacctgcccgtgaagaggcgggcatgacacagcaagacgagaagaccctatggagctttaatttattaatgcaaacagtacctaacaaacccacaggtcctaaactaccaaacctgcattaaaaatttcggttggggcgacctcggagcagaacccaacctccgagcagtacatgctaagacttcaccagtcaaagcgaactactatactcaattgatccaataacttgaccaacggaacaagttaccctagggataacagcgcaatcctattctagagtccatatcaacaatagggtttacgacctcgatgttggatcaggacatcccgatggtgcagccgctattaaaggttcgtttgttcaacgattaaagtcctacgtgatctgagttcagaccggagtaatccaggtcggtttctatctacnttcaaattcctccctgtacgaaaggacaagagaaataaggcctacttcacaaagcgccttcccccgtaaatgatatcatctcaacttagtattatacccacacccacccaagaacagggtttgttaagatggcagagcccggtaatcgcataaaacttaaaactttacagtcagaggttcaattcctcttcttaacaacatacccatggccaacctcctactcctcattgtacccattctaatcgcaatggcattcctaatgcttaccgaacgaaaaattctaggctatatacaactacgcaaaggccccaacgttgtaggcccctacgggctactacaacccttcgctgacgccataaaactcttcaccaaagagcccctaaaacccgccacatctaccatcaccctctacatcaccgccccgaccttagctctcaccatcgctcttctactatgaacccccctccccatacccaaccccctggtcaacctcaacctaggcctcctatttattctagccacctctagcctagccgtttactcaatcctctgatcagggtgagcatcaaactcaaactacgccctgatcggcgcactgcgagcagtagcccaaacaatctcatatgaagtcaccctagccatcattctactatcaacattactaataagtggctcctttaacctctccacccttatcacaacacaagaacacctctgattactcctgccatcatgacccttggccataatatgatttatctccacactagcagagaccaaccgaacccccttcgaccttgccgaaggggagtccgaactagtctcaggcttcaacatcgaatacgccgcaggccccttcgccctattcttcatagccgaatacacaaacattattataataaacaccctcaccactacaatcttcctaggaacaacatatgacgcactctcccctgaactctacacaacatattttgtcaccaagaccctacttctaacctccctgttcttatgaattcgaacagcatacccccgattccgctacgaccaactcatacacctcctatgaaaaaacttcctaccactcaccctagcattacttatatgatatgtctccatacccattacaatctccagcatcccccctcaaacctaagaaatatgtctgataaaagagttactttgatagagtaaataataggagcttaaacccccttatttctaggactatgagaatcgaacccatccctgagaatccaaaattctccgtgccacctatcacaccccatcctaaagtaaggtcagctaaataagctatcgggcccataccccgaaaatgttggttatacccttcccgtactaattaatcccctggcccaacccgtcatctactctaccatctttgcaggcacactcatcacagcgctaagctcgcactgattttttacctgagtaggcctagaaataaacatgctagcttttattccagttctaaccaaaaaaataaaccctcgttccacagaagctgccatcaagtatttcctcacgcaagcaaccgcatccataatccttctaatagctatcctcttcaacaatatactctccggacaatgaaccataaccaatactaccaatcaatactcatcattaataatcataatggctatagcaataaaactaggaatagccccctttcacttctgagtcccagaggttgcccaaggcacccctctgacatccggcctacttcttctcacatgacaaaaactagcccccatctcaatcatataccaaatctctccctcactaaacgtaagccttctcctcactctctcaatcttatccatcatagcaggcagttgaggtggattaaaccaaacccagctacgcaaaatcttagcatactcctcaattacccacataggatgaataatagcagttctaccttacaaccctaacataaccattcttaatttaactatttatattatcctaactactaccgcattcctactactcaacttaaactccagcaccacgaccctactactatctcgcacctgaaacaagctaacatgactaacacccttaattccatccaccctcctctccctaggaggcctgcccccgctaaccggctttttgcccaaatgggccattatcgaagaattcacaaaaaacaatagcctcatcatccccaccatcatagccaccatcaccctccttaacctctacttctacctacgcctaatctactccacctcaatcacactactccccatatctaacaacgtaaaaataaaatgacagtttgaacatacaaaacccaccccattcctccccacactcatcgcccttaccacgctactcctacctatctccccttttatactaataatcttatagaaatttaggttaaatacagaccaagagccttcaaagccctcagtaagttgcaatacttaatttctgtaacagctaaggactgcaaaaccccactctgcatcaactgaacgcaaatcagccactttaattaagctaagcccttactagaccaatgggacttaaacccacaaacacttagttaacagctaagcaccctaatcaactggcttcaatctacttctcccgccgccgggaaaaaaggcgggagaagccccggcaggtttgaagctgcttcttcgaatttgcaattcaatatgaaaatcacctcggagctggtaaaaagaggcctaacccctgtctttagatttacagtccaatgcttcactcagccattttacctcacccccactgatgttcgccgaccgttgactattctctacaaaccacaaagacattggaacactatacctattattcggcgcatgagctggagtcctaggcacagctctaagcctccttattcgagccgagctgggccagccaggcaaccttctaggtaacgaccacatctacaacgttatcgtcacagcccatgcatttgtaataatcttcttcatagtaatacccatcataatcggaggctttggcaactgactagttcccctaataatcggtgcccccgatatggcgtttccccgcataaacaacataagcttctgactcttacctccctctctcctactcctgctcgcatctgctatagtggaggccggagcaggaacaggttgaacagtctaccctcccttagcagggaactactcccaccctggagcctccgtagacctaaccatcttctccttacacctagcaggtgtctcctctatcttaggggccatcaatttcatcacaacaattatcaatataaaaccccctgccataacccaataccaaacgcccctcttcgtctgatccgtcctaatcacagcagtcctacttctcctatctctcccagtcctagctgctggcatcactatactactaacagaccgcaacctcaacaccaccttcttcgaccccgccggaggaggagaccccattctataccaacacctattctgatttttcggtcaccctgaagtttatattcttatcctaccaggcttcggaataatctcccatattgtaacttactactccggaaaaaaagaaccatttggatacataggtatggtctgagctatgatatcaattggcttcctagggtttatcgtgtgagcacaccatatatttacagtaggaatagacgtagacacacgagcatatttcacctccgctaccataatcatcgctatccccaccggcgtcaaagtatttagctgactcgccacactccacggaagcaatatgaaatgatctgctgcagtgctctgagccctaggattcatctttcttttcaccgtaggtggcctgactggcattgtattagcaaactcatcactagacatcgtactacacgacacgtactacgttgtagctcacttccactatgtcctatcaataggagctgtatttgccatcataggaggcttcattcactgatttcccctattctcaggctacaccctagaccaaacctacgccaaaatccatttcactatcatattcatcggcgtaaatctaactttcttcccacaacactttctcggcctatccggaatgccccgacgttactcggactaccccgatgcatacaccacatgaaacatcctatcatctgtaggctcattcatttctctaacagcagtaatattaataattttcatgatttgagaagccttcgcttcgaagcgaaaagtcctaatagtagaagaaccctccataaacctggagtgactatatggatgccccccaccctaccacacattcgaagaacccgtatacataaaatctagacaaaaaaggaaggaatcgaaccccccaaagctggtttcaagccaaccccatggcctccatgactttttcaaaaaggtattagaaaaaccatttcataactttgtcaaagttaaattataggctaaatcctatatatcttaatggcacatgcagcgcaaataggtctacaagacgctacttcccctatcatagaagagcttatcacctttcatgatcacgccctcataatcattttccttatctgcttcctagtcctgtatgcccttttcctaacactcacaacaaaactaactaatactaacatctcagacgctcaggaaatagaaaccgtctgaactatcctgcccgccatcatcctagtcctcatcgccctcccatccctacgcatcctttacataacagacgaggtcaacgacccctcccttaccatcaaatcaattggccaccaatggtactgaacctacgagtacaccgactacggcggactaatcttcaactcctacatacttcccccattattcctagaaccaggcgacctgcgactccttgacgttgacaatcgagtagtactcccgattgaaacccccattcgtataataattacatcacaagacgtcttgcactcatgagctgtccccacattaggcttaaaaacagatgcaattcccggacgtctaaaccaaaccactttcaccgctacacgaccgggggtatactacggtcaatgctctgaaatctgtggagcaaaccacagtttcatgcccatcgtcctagaattaattcccctaaaaatctttgaaatagggcccgtatttaccctatagcaccccctctaccccctctagagcccactgtaaagctaacttagcattaaccttttaagttaaagattaagagaaccaacacctctttacagtgaaatgccccaactaaatactaccgtatggcccaccataattacccccatactccttacactattcctcatcacccaactaaaaatattaaacacaaactaccacctacctccctcaccaaagcccataaaaataaaaaattataacaaaccctgagaaccaaaatgaacgaaaatctgttcgcttcattcattgcccccacaatcctaggcctacccgccgcagtactgatcattctatttccccctctattgatccccacctccaaatatctcatcaacaaccgactaatcaccacccaacaatgactaatcaaactaacctcaaaacaaatgataaccatacacaacactaaaggacgaacctgatctcttatactagtatccttaatcatttttattgccacaactaacctcctcggactcctgccttactcatttacaccaaccacccaactatctataaacctagccatggccatccccttatgagcgggcgcagtgattataggctttcgctctaagattaaaaatgccctagcccacttcttaccacaaggcacacctacaccccttatccccatactagttattatcgaaaccatcagcctactcattcaaccaatagccctggccgtacgcctaaccgctaacattactgcaggccacctactcatgcacctaattggaagcgccaccctagcaatatcaaccattaaccttccctctacacttatcatcttcacaattctaattctactgactatcctagaaatcgctgtcgccttaatccaagcctacgttttcacacttctagtaagcctctacctgcacgacaacacataatgacccaccaatcacatgcctatcatatagtaaaacccagcccatgacccctaacaggggccctctcagccctcctaatgacctccggcctagccatgtgatttcacttccactccataacgctcctcatactaggcctactaaccaacacactaaccatataccaatgatggcgcgatgtaacacgagaaagcacataccaaggccaccacacaccacctgtccaaaaaggccttcgatacgggataatcctatttattacctcagaagtttttttcttcgcaggatttttctgagccttttaccactccagcctagcccctaccccccaattaggagggcactggcccccaacaggcatcaccccgctaaatcccctagaagtcccactcctaaacacatccgtattactcgcatcaggagtatcaatcacctgagctcaccatagtctaatagaaaacaaccgaaaccaaataattcaagcactgcttattacaattttactgggtctctattttaccctcctacaagcctcagagtacttcgagtctcccttcaccatttccgacggcatctacggctcaacattttttgtagccacaggcttccacggacttcacgtcattattggctcaactttcctcactatctgcttcatccgccaactaatatttcactttacatccaaacatcactttggcttcgaagccgccgcctgatactggcattttgtagatgtggtttgactatttctgtatgtctccatctattgatgagggtcttactcttttagtataaatagtaccgttaacttccaattaactagttttgacaacattcaaaaaagagtaataaacttcgccttaattttaataatcaacaccctcctagccttactactaataattattacattttgactaccacaactcaacggctacatagaaaaatccaccccttacgagtgcggcttcgaccctatatcccccgcccgcgtccctttctccataaaattcttcttagtagctattaccttcttattatttgatctagaaattgccctccttttacccctaccatgagccctacaaacaactaacctgccactaatagttatgtcatccctcttattaatcatcatcctagccctaagtctggcctatgagtgactacaaaaaggattagactgaaccgaattggtatatagtttaaacaaaacgaatgatttcgactcattaaattatgataatcatatttaccaaatgcccctcatttacataaatattatactagcatttaccatctcacttctaggaatactagtatatcgctcacacctcatatcctccctactatgcctagaaggaataatactatcgctgttcattatagctactctcataaccctcaacacccactccctcttagccaatattgtgcctattgccatactagtctttgccgcctgcgaagcagcggtgggcctagccctactagtctcaatctccaacacatatggcctagactacgtacataacctaaacctactccaatgctaaaactaatcgtcccaacaattatattactaccactgacatgactttccaaaaaacacataatttgaatcaacacaaccacccacagcctaattattagcatcatccctctactattttttaaccaaatcaacaacaacctatttagctgttccccaaccttttcctccgaccccctaacaacccccctcctaatactaactacctgactcctacccctcacaatcatggcaagccaacgccacttatccagtgaaccactatcacgaaaaaaactctacctctctatactaatctccctacaaatctccttaattataacattcacagccacagaactaatcatattttatatcttcttcgaaaccacacttatccccaccttggctatcatcacccgatgaggcaaccagccagaacgcctgaacgcaggcacatacttcctattctacaccctagtaggctcccttcccctactcatcgcactaatttacactcacaacaccctaggctcactaaacattctactactcactctcactgcccaagaactatcaaactcctgagccaacaacttaatatgactagcttacacaatagcttttatagtaaagatacctctttacggactccacttatgactccctaaagcccatgtcgaagcccccatcgctgggtcaatagtacttgccgcagtactcttaaaactaggcggctatggtataatacgcctcacactcattctcaaccccctgacaaaacacatagcctaccccttccttgtactatccctatgaggcataattataacaagctccatctgcctacgacaaacagacctaaaatcgctcattgcatactcttcaatcagccacatagccctcgtagtaacagccattctcatccaaaccccctgaagcttcaccggcgcagtcattctcataatcgcccacggacttacatcctcattactattctgcctagcaaactcaaactacgaacgcactcacagtcgcatcataatcctctctcaaggacttcaaactctactcccactaatagctttttgatgacttctagcaagcctcgctaacctcgccttaccccccactattaacctactgggagaactctctgtgctagtaaccacgttctcctgatcaaatatcactctcctacttacaggactcaacatactagtcacagccctatactccctctacatatttaccacaacacaatgaggctcactcacccaccacattaacaacataaaaccctcattcacacgagaaaacaccctcatgttcatacacctatcccccattctcctcctatccctcaaccccgacatcattaccgggttttcctcttgtaaatatagtttaaccaaaacatcagattgtgaatctgacaacagaggcttacgaccccttatttaccgagaaagctcacaagaactgctaactcatgcccccatgtctaacaacatggctttctcaacttttaaaggataacagctatccattggtcttaggccccaaaaattttggtgcaactccaaataaaagtaataaccatgcacactactataaccaccctaaccctgacttccctaattccccccatccttaccaccctcgttaaccctaacaaaaaaaactcatacccccattatgtaaaatccattgtcgcatccacctttattatcagtctcttccccacaacaatattcatgtgcctagaccaagaagttattatctcgaactgacactgagccacaacccaaacaacccagctctccctaagcttcaaactagactacttctccataatattcatccctgtagcattgttcgttacatggtccatcatagaattctcactgtgatatataaactcagacccaaacattaatcagttcttcaaatatctactcattttcctaattaccatactaatcttagttaccgctaacaacctattccaactgttcatcggctgagagggcgtaggaattatatccttcttgctcatcagttgatgatacgcccgagcagatgccaacacagcagccattcaagcaatcctatacaaccgtatcggcgatatcggtttcatcctcgccttagcatgatttatcctacactccaactcatgagacccacaacaaatagcccttctaaacgctaatccaagcctcaccccactactaggcctcctcctagcagcagcaggcaaatcagcccaattaggtctccacccctgactcccctcagccatagaaggccccaccccagtctcagccctactccactcaagcactatagttgtagcaggaatcttcttactcatccgcttccaccccctagcagaaaatagcccactaatccaaactctaacactatgcttaggcgctatcaccactctgttcgcagcagtctgcgcccttacacaaaatgacatcaaaaaaatcgtagccttctccacttcaagtcaactaggactcataatagttacaatcggcatcaaccaaccacacctagcattcctgcacatctgtacccacgccttcttcaaagccatactatttatgtgctccgggtccatcatccacaaccttaacaatgaacaagatattcgaaaaataggaggactactcaaaaccatacctctcacttcaacctccctcaccattggcagcctagcattagcaggaatacctttcctcacaggtttctactccaaagaccacatcatcgaaaccgcaaacatatcatacacaaacgcctgagccctatctattactctcatcgctacctccctgacaagcgcctatagcactcgaataattcttctcaccctaacaggtcaacctcgcttccccacccttactaacattaacgaaaataaccccaccctactaaaccccattaaacgcctggcagccggaagcctattcgcaggatttctcattactaacaacatttcccccgcatcccccttccaaacaacaatccccctctacctaaaactcacagccctcgctgtcactttcctaggacttctaacagccctagacctcaactacctaaccaacaaacttaaaataaaatccccactatgcacattttatttctccaacatactcggattctaccctagcatcacacaccgcacaatcccctatctaggccttcttacgagccaaaacctgcccctactcctcctagacctaacctgactagaaaagctattacctaaaacaatttcacagcaccaaatctccacctccatcatcacctcaacccaaaaaggcataattaaactttacttcctctctttcttcttcccactcatcctaaccctactcctaatcacataacctattcccccgagcaatctcaattacaatatatacaccaacaaacaatgttcaaccagtaactactactaatcaacgcccataatcatacaaagcccccgcaccaataggatcctcccgaatcaaccctgacccctctccttcataaattattcagcttcctacactattaaagtttaccacaaccaccaccccatcatactctttcacccacagcaccaatcctacctccatcgctaaccccactaaaacactcaccaagacctcaacccctgacccccatgcctcaggatactcctcaatagccatcgctgtagtatatccaaagacaaccatcattccccctaaataaattaaaaaaactattaaacccatataacctcccccaaaattcagaataataacacacccgaccacaccgctaacaatcaatactaaacccccataaataggagaaggcttagaagaaaaccccacaaaccccattactaaacccacactcaacagaaacaaagcatacatcattattctcgcacggactacaaccacgaccaatgatatgaaaaaccatcgttgtatttcaactacaagaacaccaatgaccccaatacgcaaaattaaccccctaataaaattaattaaccactcattcatcgacctccccaccccatccaacatctccgcatgatgaaacttcggctcactccttggcgcctgcctgatcctccaaatcaccacaggactattcctagccatgcactactcaccagacgcctcaaccgccttttcatcaatcgcccacatcactcgagacgtaaattatggctgaatcatccgctaccttcacgccaatggcgcctcaatattctttatctgcctcttcctacacatcgggcgaggcctatattacggatcatttctctactcagaaacctgaaacatcggcattatcctcctgcttgcaactatagcaacagccttcataggctatgtcctcccgtgaggccaaatatcattctgaggggccacagtaattacaaacttactatccgccatcccatacattgggacagacctagttcaatgaatctgaggaggctactcagtagacagtcccaccctcacacgattctttacctttcacttcatcttgcccttcattattgcagccctagcagcactccacctcctattcttgcacgaaacgggatcaaacaaccccctaggaatcacctcccattccgataaaatcaccttccacccttactacacaatcaaagacgccctcggcttacttctcttccttctctccttaatgacattaacactattctcaccagacctcctaggcgacccagacaattataccctagccaaccccttaaacacccctccccacatcaagcccgaatgatatttcctattcgcctacacaattctccgatccgtccctaacaaactaggaggcgtccttgccctattactatccatcctcatcctagcaataatccccatcctccatatatccaaacaacaaagcataatatttcgcccactaagccaatcactttattgactcctagccgcagacctcctcattctaacctgaatcggaggacaaccagtaagctacccttttaccatcattggacaagtagcatccgtactatacttcacaacaatcctaatcctaataccaactatctccctaattgaaaacaaaatactcaaatgggcctgtccttgtagtataaactaatacaccagtcttgtaaaccggagatgaaaacctttttccaaggacaaatcagagaaaaagtctttaactccaccattagcacccaaagctaagattctaatttaaactattctctgttctttcatggggaagcagatttgggtaccacccaagtattgactcacccatcaacaaccgctatgtatttcgtacattactgccagtcaccatgaatattgtacggtaccataaatacttgaccacctgtagtacataaaaacccaatccacatcaaaaccccctccccatgcttacaagcaagcacagcaatcaaccttcaactatcacacatcaactgcaactccaaagccacccctcacccactaggataccaacaaacctatccacccttaacagtacatagtacataaaaccatttaccgtacatagcacattacagtcaaatcccttctcgcccccatggatgacccccctcagataggggtcccttgaccaccatcctccgtgaaatcaatatcccgcacaagagtgctactctcctcgctccgggcccataacacttgggggtagctaaagtgaactgtatccgacatctggttcctacttcagggtcataaagcctaaatagcccacacgttccccttaaataagacatcacgatg

SEQ ID NO: 417 - DNA, 16570 bp, Homo sapiens mitochondrial; identical to SEQ ID NO: 64
  3108: "n" refers to a nucleotide at position 3107 of the Cambridge Reference Sequence (CRS, Anderson et al. 1981 Nature 290:457-465), later determined to be absent from the human mtDNA sequence according to the revised CRS (rCRS, Andrews et al. 1999 Nature Genetics 23:147); "n" therefore represents a single nucleotide deletion at a position corresponding to nucleotide 3107 of SEQ ID NO:1 as provided herein.

SEQ ID NO: 418 - DNA, 16567 bp, Homo sapiens mitochondrial
  3105: "n" refers to a nucleotide at position 3107 of the Cambridge Reference Sequence (CRS, Anderson et al. 1981 Nature 290:457-465), later determined to be absent from the human mtDNA sequence according to the revised CRS (rCRS, Andrews et al. 1999 Nature Genetics 23:147); "n" therefore represents a single nucleotide deletion at a position corresponding to nucleotide 3107 of SEQ ID NO:1 as provided herein.
gatcacaggtctatcaccctattaaccactcacgggagctctccatgcatttggtattttcgtctggggggtgtgcacgcgatagcattgcgagacgctggagccggagcaccctatgtcgcagtatctgtctttgattcctgcctcatcctattatttatcgcacctacgttcaatattacaggcgaacatacttactaaagtgtgttaattaattaatgcttgtaggacataataataacaattgatgtctgcacagccgctttccacacagacatcataacaaaatttccaccaaaccccccctccccccccgcttctggccacagcacttaaacacatctctgccaaaccccaaaaacaaagaaccctaacaccagcctaaccagatttcaaattttatcttttggcggtatgcacttttaacagtcaccccccaactaacacattattttcccctcccactcccatactactaatctcatcaacacagcccccgcccatcctacccagcacacacaccgctgctaaccccataccccgaaccaaccaaaccccaaagacaccccccacagtttatgtagcttacctcctcaaagcaatacactgaaaatgtttagacgggctcacatcaccccataaacaaataggtttggtcctagcctttctattagctcttagtaagattacacatgcaagcatccccgttccagtgagttcaccctctaaatcaccacgatcaaaagggacaagcatcaagcacgcagcaatgcagctcaaaacgcttagcctagccacacccccacgggaaacagcagtgattaacctttagcaataaacgaaagtttaactaagctatactaaccccagggttggtcaatttcgtgccagccaccgcggtcacacgattaacccaagtcaatagaagccggcgtaaagagtgttttagatcaccccctccccaataaagctaaaactcacctgagttgtaaaaaactccagttgacacaaaatagactacgaaagtggctttaacatatctgaacacacaatagctaagacccaaactgggattagataccccactatgcttagccctaaacctcaacagttaaatcaacaaaactgctcgccagaacactacgagccacagcttaaaactcaaaggacctggcggtgcttcatatccctctagaggagcctgttctgtaatcgataaaccccgatcaacctcaccacctcttgctcagcctatataccgccatcttcagcaaaccctgatgaaggctacaaagtaagcgcaagtacccacgtaaagacgttaggtcaaggtgtagcccatgaggtggcaagaaatgggctacattttctaccccagaaaactacgatagcccttatgaaacttaagggtcgaaggtggatttagcagtaaactgagagtagagtgcttagttgaacagggccctgaagcgcgtacacaccgcccgtcaccctcctcaagtatacttcaaaggacatttaactaaaacccctacgcatttatatagaggagacaagtcgtaacatggtaagtgtactggaaagtgcacttggacgaaccagagtgtagcttaacacaaagcacccaacttacacttaggagatttcaacttaacttgaccgctctgagctaaacctagccccaaacccactccaccttactaccagacaaccttagccaaaccatttacccaaataaagtataggcgatagaaattgaaacctggcgcaatagatatagtaccgcaagggaaagatgaaaaattataaccaagcataatatagcaaggactaacccctataccttctgcataatgaattaactagaaataactttgcaaggagagccaaagctaagacccccgaaaccagacgagctacctaagaacagctaaaagagcacacccgtctatgtagcaaaatagtgggaagatttataggtagaggcgacaaacctaccgagcctggtgatagctggttgtccaagatagaatcttagttcaactttaaatttgcccacagaaccctctaaatccccttgtaaatttaactgttagtccaaagaggaacagctctttggacactaggaaaaaaccttgtagagagagtaaaaaatttaacacccatagtaggcctaaaagcagccaccaattaagaaagcgttcaagctcaacacccactacctaaaaaatcccaaacatataactgaactcctcacacccaattggaccaatctatcaccctatagaagaactaatgttagtataagtaacatgaaaacattctcctccgcataagcctgcgtcagattaaaacactgaactgacaattaacagcccaatatctacaatcaaccaacaagtcattattaccctcactgtcaacccaacacaggcatgctcataaggaaaggttaaaaaaagtaaaaggaactcggcaaatcttaccccgcctgtttaccaaaaacatcacctctagcatcaccagtattagaggcaccgcctgcccagtgacacatgtttaacggccgcggtaccctaaccgtgcaaaggtagcataatcacttgttccttaaatagggacctgtatgaatggctccacgagggttcagctgtctcttacttttaaccagtgaaattgacctgcccgtgaagaggcgggcatgacacagcaagacgagaagaccctatggagctttaatttattaatgcaaacagtacctaacaaacccacaggtcctaaactaccaaacctgcattaaaaatttcggttggggcgacctcggagcagaacccaacctccgagcagtacatgctaagacttcaccagtcaaagcgaactactatactcaattgatccaataacttgaccaacggaacaagttaccctagggataacagcgcaatcctattctagagtccatatcaacaatagggtttacgacctcgatgttggatcaggacatcccgatggtgcagccgctattaaaggttcgtttgttcaacgattaaagtcctacgtgatctgagttcagaccggagtaatccaggtcggtttctatctacnttcaaattcctccctgtacgaaaggacaagagaaataaggcctacttcacaaagcgccttcccccgtaaatgatatcatctcaacttagtattatacccacacccacccaagaacagggtttgttaagatggcagagcccggtaatcgcataaaacttaaaactttacagtcagaggttcaattcctcttcttaacaacatacccatggccaacctcctactcctcattgtacccattctaatcgcaatggcattcctaatgcttaccgaacgaaaaattctaggctatatacaactacgcaaaggccccaacgttgtaggcccctacgggctactacaacccttcgctgacgccataaaactcttcaccaaagagcccctaaaacccgccacatctaccatcaccctctacatcaccgccccgaccttagctctcaccatcgcacttctactatgaacccccctccccatacccaaccccctggtcaacctcaacctaggcctcctatttattctagccacctctagcctagccgtttactcaatcctctgatcagggtgagcatcaaactcaaactacgccctgatcggcgcactgcgagcagtagcccaaacaatctcatatgaagtcaccctagccatcattctactatcaacattactaataagtggctcctttaacctctccacccttatcacaacacaagaacacctctgattactcctgccatcatgacccttggccataatatgatttatctccacactagcagagaccaaccgaacccccttcgaccttgccgaaggggagtccgaactagtctcaggcttcaacatcgaatacgccgcaggccccttcgccctattcttcatagccgaatacacaaacattattataataaacaccctcaccactacaatcttcctaggaacaacatatgacgcactctcccctgaactctacacaacatattttgtcaccaagaccctacttctaacctccctgttcttatgaattcgaacagcatacccccgattccgctacgaccaactcatacacctcctatgaaaaaacttcctaccactcaccctagcattacttatatgatatgtctccatacccattacaatctccagcattccccctcaaacctaagaaatatgtctgataaaagagttactttgatagagtaaataataggagcttaaacccccttatttctaggactatgagaatcgaacccatccctgagaatccaaaattctccgtgccacctatcacaccccatcctaaagtaaggtcagctaaataagctatcgggcccataccccgaaaatgttggttatacccttcccgtactaattaatcccctggcccaacccgtcatctactctaccatctttgcaggcacactcatcacagcgctaagctcgcactgattttttacctgagtaggcctagaaataaacatgctagcttttattccagttctaaccaaaaaaataaaccctcgttccacagaagctgccatcaagtatttcctcacgcaagcaaccgcatccataatccttctaatagctatcctcttcaacaatatactctccgggcaatgaaccataaccaatactaccaatcaatactcatcattaataatcataatggctatagcaataaaactaggaatagccccctttcacttctgagtcccagaggttacccaaggcacccctctgacatccggcctgcttcttctcacatgacaaaaactagcccccatctcaatcatataccaaatctctccctcactaaacgtaagccttctcctcactctctcaatcttatccatcatagcaggcagttgaggtggattaaaccaaacccagctacgcaaaatcttagcatactcctcaattacccacataggatgaataatagcagttctaccgtacaaccctaacataaccattcttaatttaactatttatattatcctaactactaccgcattcctactactcaacttaaactccagcaccacgaccctactactatctcgcacctgaaacaagctaacatgactaacacccttaattccatccaccctcctctccctaggaggcctgcccccgctaaccggctttttgcccaaatgggccattatcgaagaattcacaaaaaacaatagcctcatcatccccaccatcatagccaccatcaccctccttaacctctacttctacctacgcctaatctactccacctcaatcacactactccccatatctaacaacgtaaaaataaaatgacagtttgaacatacaaaacccaccccattcctccccacactcatcgcccttaccacgctactcctacctatctccccttttatactaataatcttatagaaatttaggttaaatacagaccaagagccttcaaagccctcagtaagttgcaatacttaatttctgtaacagctaaggactgcaaaaccccactctgcatcaactgaacgcaaatcagccactttaattaagctaagcccttactagaccaatgggacttaaacccacaaacacttagttaacagctaagcaccctaatcaactggcttcaatctacttctcccgccgccgggaaaaaaggcgggagaagccccggcaggtttgaagctgcttcttcgaatttgcaattcaatatgaaaatcacctcggagctggtaaaaagaggcctaacccctgtctttagatttacagtccaatgcttcactcagccattttacctcacccccactgatgttcgccgaccgttgactattctctacaaaccacaaagacattggaacactatacctattattcggcgcatgagctggagtcctaggcacagctctaagcctccttattcgagccgagctgggccagccaggcaaccttctaggtaacgaccacatctacaacgttatcgtcacagcccatgcatttgtaataatcttcttcatagtaatacccatcataatcggaggctttggcaactgactagttcccctaataatcggtgcccccgatatggcgtttccccgcataaacaacataagcttctgactcttacctccctctctcctactcctgctcgcatctgctatagtggaggccggagcaggaacaggttgaacagtctaccctcccttagcagggaactactcccaccctggagcctccgtagacctaaccatcttctccttacacctagcaggtgtctcctctatcttaggggccatcaatttcatcacaacaattatcaatataaaaccccctgccataacccaataccaaacgcccctcttcgtctgatccgtcctaatcacagcagtcctacttctcctatctctcccagtcctagctgctggcatcactatactactaacagaccgcaacctcaacaccaccttcttcgaccccgccggaggaggagaccccattctataccaacacctattctgatttttcggtcaccctgaagtttatattcttatcctaccaggcttcggaataatctcccatattgtaacttactactccggaaaaaaagaaccatttggatacataggtatggtctgagctatgatatcaattggcttcctagggtttatcgtgtgagcacaccatatatttacagtaggaatagacgtagacacacgagcatatttcacctccgctaccataatcatcgctatccccaccggcgtcaaagtatttagctgactcgccacactccacggaagcaatatgaaatgatctgctgcagtgctctgagccctaggattcatctttcttttcaccgtaggtggcctgactggcattgtattagcaaactcatcactagacatcgtactacacgacacgtactacgttgtagctcacttccactatgtcctatcaataggagctgtatttgccatcataggaggcttcattcactgatttcccctattctcaggctacaccctagaccaaacctacgccaaaatccatttcactatcatattcatcggcgtaaatctaactttcttcccacaacactttctaggcctatccggaatgccccgacgttactcggactaccccgatgcatacaccacatgaaacatcctatcatctgtaggctcattcatttctctaacagcagtaatattaataattttcatgatttgagaagccttcgcttcgaagcgaaaagtcctaatagtagaagaaccctccataaacctggagtgactatatggatgccccccaccctaccacacattcgaagaacccgtatacataaaatctagacaaaaaaggaaggaatcgaaccccccaaagctggtttcaagccaaccccatggcctccatgactttttcaaaaaggtattagaaaaaccatttcataactttgtcaaagttaaattataggctaaatcctatatatcttaatggcacatgcagcgcaagtaggtctacaagacgctacttcccctatcatagaagagcttatcacctttcatgatcacgccctcataatcattttccttatctgcttcctagtcctgtatgcccttttcctaacactcacaacaaaactaactaatactaacatctcagacgctcaggaaatagaaaccgtctgaactatcctgcccgccatcatcctagtcctcatcgccctcccatccctacgcatcctttacataacagacgaggtcaacgatccctcccttaccatcaaatcaattggccaccaatggtactgaacctacgagtacaccgactacggcggactaatcttcaactcctacatacttcccccattattcctagaaccaggcgacctgcgactccttgacgttgacaatcgagtagtactcccgattgaagcccccattcgtataataattacatcacaagacgtcttgcactcatgagctgtccccacattaggcttaaaaacagatgcaattcccggacgtctaaaccaaaccactttcaccgctacacgaccgggggtatactacggtcaatgctctgaaatctgtggagcaaaccacagtttcatgcccatcgtcctagaattaattcccctaaaaatctttgaaatagggcccgtatttaccctatagcaccccctctaccccctctagagcccactgtaaagctaacttagcattaaccttttaagttaaagattaagagaaccaacacctctttacagtgaaatgccccaactaaatactaccgtatggcccaccataattacccccatactccttacactattcctcatcacccaactaaaaatattaaacacaaactaccacctacctccctcaccaaagcccataaaaataaaaaattataacaaaccctgagaaccaaaatgaacgaaaatctgttcgcttcattcattgcccccacaatcctaggcctacccgccacagtactgatcattctatttccccctctattgatccccacctccaaatatctcatcaacaaccgactaatcaccacccaacaatgactaatcaaactaacctcaaaacaaatgatagccatacacaacactaaaggacgaacctgatctcttatactagtatccttaatcatttttattgccacaactaacctcctcggactcctgcctcactcatttacaccaaccacccaactatctataaacctagccatggccatccccttatgagcgggcgcagtgattataggctttcgctctaagattaaaaatgccctagcccacttcttaccacaaggcacacctacaccccttatccccatactagttattatcgaaaccatcagcctactcattcaaccaatagccctggccgtacgcctaaccgctaacattactgcaggccacctactcatgcacctaattggaagcgccaccctagcaatatcaaccattaaccttccctctacacttatcatcttcacaattctaattctactgactatcctagaaatcgctgtcgccttaatccaagcctacgttttcacacttctagtaagcctctacctgcacgacaacacataatgacccaccaatcacatgcctatcatatagtaaaacccagcccatgacccctaacaggggccctctcagccctcctaatgacctccggcctagccatgtgatttcacttccactccataacgctcctcatactaggcctactaaccaacacactaaccatataccaatgatggcgcgatgtaacacgagaaagcacataccaaggccaccacacaccacctgtccaaaaaggccttcgatacgggataatcctatttattacctcagaagtttttttcttcgcaggatttttctgagccttttaccactccagcctagcccctaccccccaactaggggggcactggcccccaacaggcatcaccccgctaaatcccctagaagtcccactcctaaacacatccgtattactcgcatcaggagtatcaatcacctgagctcaccatagtctaatagaaaacaaccgaaaccaaataattcaagcactgcttattacaattttactgggtctctattttaccctcctacaagcctcagagtacttcgagtctcccttcaccatttccgacggcatctacggctcaacattttttgtagccacaggcttccacggacttcacgtcattattggctcaactttcctcactatctgcttcatccgccaactaatatttcactttacatccaaacatcactttggcttcgaagccgccgcctgatactggcattttgtagatgtggtttgactatttctgtatgtctccatctattgatgagggtcttactcttttagtataaatagtaccgttaacttccaattaactagttttgacaacattcaaaaaagagtaataaacttcgccttaattttaataatcaacaccctcctagccttactactaataattattacattttgactaccacaactcaacggctacatagaaaaatccaccccttacgagtgcggcttcgaccctatatcccccgcccgcgtccctttctccataaaattcttcttagtagctattaccttcttattatttgatctagaaattgccctccttttacccctaccatgagccctacaaacaactaacctgccactaatagttatgtcatccctcttattaatcatcatcctagccctaagtctggcctatgagtgactacaaaaaggattagactgagctgaattggtatatagtttaaacaaaacgaatgatttcgactcattaaattatgataatcatatttaccaaatgcccctcatttacataaatattatactagcatttaccatctcacttctaggaatactagtatatcgctcacacctcatatcctccctactatgcctagaaggaataatactatcgctgttcattatagctactctcataaccctcaacacccactccctcttagccaatattgtgcctattgccatactagtctttgccgcctgcgaagcagcggtgggcctagccctactagtctcaatctccaacacatatggcctagactacgtacataacctaaacctactccaatgctaaaactaatcgtcccaacaattatattactaccactgacatgactttccaaaaaacacataatttgaatcaacacaaccacccacagcctaattattagcatcatccccctactattttttaaccaaatcaacaacaacctatttagctgttccccaaccttttcctccgaccccctaacaacccccctcctaatactaactacctgactcctacccctcacaatcatggcaagccaacgccacttatccagtgaaccactatcacgaaaaaaactctacctctctatactaatctccctacaaatctccttaattataacattcacagccacagaactaatcatattttatatcttcttcgaaaccacacttatccccaccctggctatcatcacccgatgaggcaaccagccagaacgcctgaacgcaggcacatacttcctattctacaccctagtaggctcccttcccctactcatcgcactaatttacactcacaacaccctaggctcactaaacattctactactcactctcactgcccaagaactatcaaactcctgagccaacaacttaatatgactagcttacacaatagcttttatagtaaagatacctctttacggactccacttatgactccctaaagcccatgtcgaagcccccatcgctgggtcaatagtacttgccgcagtactcttaaaactaggcggctatggtataatacgcctcacactcattctcaaccccctgacaaaacacatagcctaccccttccttgtactatccctatgaggcataattataacaagctccatctgcctacgacaaacagacctaaaatcgctcattgcatactcttcaatcagccacatagccctcgtagtaacagccattctcatccaaaccccctgaagcttcaccggcgcagtcattctcataatcgcccacggacttacatcctcattactattctgcctagcaaactcaaactacgaacgcactcacagtcgcatcataatcctctctcaaggacttcaaactctactcccactaatagctttttgatgacttctagcaagcctcgctaacctcgccttaccccccactattaacctactgggagaactctctgtgctagtaaccacattctcctgatcaaatatcactctcctacttacaggactcaacatactagtcacagccctatactccctctacatatttaccacaacacaatggggctcactcacccaccacattaacaacataaaaccctcattcacacgagaaaacaccctcatgttcatacacctatcccccattctcctcctatccctcaaccccgacatcattaccgggttttcctcttgtaaatatagtttaaccaaaacatcagattgtgaatctgacaacagaggcttacgaccccttatttaccgagaaagctcacaagaactgctaactcatgcccccatgtctaacaacatggctttctcaacttttaaaggataacagctatccattggtcttaggccccaaaaattttggtgcaactccaaataaaagtaataaccatgcacactactataaccaccctaaccctgacttccctaattccccccatccttaccaccctcgttaaccctaacaaaaaaaactcatacccccattatgtaaaatccattgtcgcatccacctttattatcagtctcttccccacaacaatattcatgtgcctagaccaagaagttattatctcgaactgacactgagccacaacccaaacaacccagctctccctaagcttcaaactagactacttctccataatattcatccctgtagcattgttcgttacatggtccatcatagaattctcactgtgatatataaactcagacccaaacattaatcagttcttcaaatatctactcattttcctaattaccatactaatcttagttaccgctaacaacctattccaactgttcatcggctgagagggcgtaggaattatatccttcttgctcatcagttgatgatacgcccgagcagatgccaacacagcagccattcaagcaatcctatacaaccgtatcggcgatatcggtttcatcctcgccttagcatgatttatcctacactccaactcatgagacccacaacaaatagcccttctaaacgctaatccaagcctcaccccactactaggcctcctcctagcagcagcaggcaaatcagcccaattaggtctccacccctgactcccctcagccatagaaggccccaccccagtctcagccctactccactcaagcactatagttgtagcaggaatcttcttactcatccgcttccaccccctagcagaaaatagcccactaatccaaactctaacactatgcttaggcgctatcaccactctgttcgcagcagtctgcgcccttacacaaaatgacatcaaaaaaatcgtagccttctccacttcaagtcagctaggactcataatagttacaatcggcatcaaccaaccacacctagcattcctgcacatctgtacccacgccttcttcaaagccatactatttatgtgctccgggtccatcatccacaaccttaacaatgaacaagatattcgaaaaataggaggactactcaaaaccatacctctcacttcaacctccctcaccattggcagcctagcattagcaggaatacctttcctcacaggtttctactccaaagaccacatcatcgaaaccgcaaacatatcatacacaaacgcctgagccctatctattactctcatcgctacctccctgacaagcgcctatagcactcgaataattcttctcaccctaacaggtcaacctcgcttccccacccttactaacattaacgaaaataaccccaccctactaaaccccattaaacgcctggcagccggaagcctattcgcaggatttctcattactaacaacatttcccccgcatcccccttccaaacaacaatccccctctacctaaaactcacagccctcgctgtcactttcctaggacttctaacagccctagacctcaactacctaaccaacaaacttaaaataaaatccccactatgcacattttatttctccaacatactcggattctaccctagcatcacacaccgcacaatcccctatctaggccttcttacgagccaaaacctgcccctactcctcctagacctaacctgactagaaaagctattacctaaaacaatttcacagcaccaaatctccacctccatcatcacctcaacccaaaaaggcataattaaactttacttcctctctttcttcttcccactcatcctaaccctactcctaatcacataacctattcccccgagcaatctcaattacaatatatacaccaacaaacaatgttcaaccagtaactactactaatcaacgcccataatcatacaaagcccccgcaccaataggatcctcccgaatcaaccctgacccctctccttcataaattattcagcttcctacactactaaagtttaccacaaccaccaccccatcatactctttcacccacagcaccaatcctacctccatcgctaaccccactaaaacactcaccaagacctcaacccctgacccccatgcctcaggatactcctcaatagccatcgctgtagtatatccaaagacaaccatcattccccctaaataaattaaaaaaactattaaacccatataacctcccccaaaattcagaataataacacacccgaccacaccgctaacaatcaatactaaacccccataaataggagaaggcttagaagaaaaccccacaaaccccattactaaacccacactcaacagaaacaaagcatacatcattattctcgcacggactacaaccacgaccaatgatatgaaaaaccatcgttgtatttcaactacaagaacaccaatgaccccaatacgcaaaattaaccccctaataaaactaattaaccactcattcatcgacctccccaccccatccaacatctccgcatgatgaaacttcggctcactccttggcgcctgcctgatcctccaaatcaccacaggactattcctagccatgcactactcaccagacgcctcaaccgccttttcatcaatcgcccacatcactcgagacgtaaattatggctgaatcatccgctaccttcacgccaatggcgcctcaatattctttatctgcctcttcctacacatcggacgaggcctatattacggatcatttctctactcagaaacctgaaacatcggcattatcctcctgcttgcaactatagcaacagccttcataggctatgtcctcccgtgaggccaaatatcattctgaggggccacagtaattacaaacttactatccgccatcccatacattgggacagacctagttcaatgaatctgaggaggctactcagtagacagtcccaccctcacacgattctttacctttcacttcatcttacccttcattattgcagccctagcagcactccacctcctattcttgcacgaaacgggatcaaacaaccccctaggaatcacctcccattccgataaaatcaccttccacccttactacacaatcaaagacgccctcggcttacttctcttccttctctccttaatgacattaacactattctcacctgacctcctaggcgacccagacaattataccctagccaaccccttaaacacccctccccacatcaagcccgaatgatatttcctattcgcctacacaattctccgatccgtccctaacaaactaggaggcgtccttgccctattactatccatcctcatcctagcaataatccccatcctccatatatccaaacaacaaagcataatatttcgcccactaagccaatcactttattgactcctagccgcagacctcctcattctaacctgaatcggaggacaaccagtaagctacccttttaccatcattggacaagtagcatccgtactatacttcacaacaatcctaatcctaataccaactatctccctaattgaaaacaaaatactcaaatgggcctgtccttgtagtataaactaatacaccagtcttgtaaaccggagatgaaaacctttttccaaggacaaatcagagaaaaagtctttaactccaccattagcacccaaagctaagattctaatttaaactattctctgttctttcatggggaagcagatttgggtaccacccaagtattgactcacccatcaacaaccgctatgtatttcgtacattactgccagccaccatgaatattgtacggtaccataaatacttgaccacctgtagtacataaaaacccaatccacatcaaaaccccctccccatgcttacaagcaagtacagcaatcaaccctcaactatcacacatcaactgcaactccaaagccacccctcacccactaggataccaacaaacctacccaccctcaacagtacatagtacataaagccattcatcgtacatagcacattacagtcaaatcccttctcgtccccatggatgacccccctcagataggagtcccttgaccaccatcctccgtgaaatcaatatcccgcacaagagtgctactctcctcgctccgggcccataacacttgggggtagctaaagtgaactgtatccgacatctggttcctacttcagggccataaagcctaaatagcccacacgttccccttaaataagacatcacgatg

SEQ ID NO: 419 - DNA, 16561 bp, Homo sapiens mitochondrial
  3108: "n" refers to a nucleotide at position 3107 of the Cambridge Reference Sequence (CRS, Anderson et al. 1981 Nature 290:457-465), later determined to be absent from the human mtDNA sequence according to the revised CRS (rCRS, Andrews et al. 1999 Nature Genetics 23:147); "n" therefore represents a single nucleotide deletion at a position corresponding to nucleotide 3107 of SEQ ID NO:1 as provided herein.
gatcacaggtctatcaccctattaaccactcacgggagctctccatgcatttggtattttcgtttggggggtgtgcacgcgatagcattgcgagacgctggagccggagcaccctatgtcgcagtatctgtctttgattcctgccccatcctgttatttatcgcacctacgttcaatattacaggcgaacatacttactaaagtgtgttaattaattaatgcttgtaggacatagtaataacaattgaatgtctgcacagccgctttccacacagacatcataacaaaaaatttccaccaaaccccccctccccccccgcttctggccacagcacttaaacacatctctgccaaaccccaaaaacaaagaaccctaacaccagcctaaccagatttcaaattttatcttttggcggtatgcacttttaacagtcaccccccaactaacacattattttcccctcccactcccatactactaatctcatcaatacaacccccgcccatcctacccagcacacacaccgctgctaaccccataccccgaaccaaccaaaccccaaagacaccccccacagtttatgtagcttacctcctcaaagcaatacactgaaaatgtttagacgggctcacatcaccccataaacaaataggtttggtcctggcctttctattagctcttagtaagattacacatgcaagcatccccgttccagtgagttcaccctctaaatcaccacgatcaaaagggacaagcatcaagcacgcagcaatgcagctcaaaacgcttagcctagccacacccccacgggaaacagcagtgattaacctttagcaataaacgaaagtttaactaagctatactaaccccagggttggtcaatttcgtgccagccaccgcggtcacacgattaacccaagtcaatagaaaccggcgtaaagagtgttttagatcaccccctccccaataaagctaaaactcacctgagttgtaaaaaactccagttgacacaaaatagactacgaaagtggctttaacatatctgaacacacaatagctaagacccaaactgggattagataccccactatgcttagccctaaacctcaacagttaaatcaacaaaactgctcgccagaacactacgagccacagcttaaaactcaaaggacctggcggtgcttcatatccctctagaggagcctgttctgtaatcgataaaccccgatcaacctcaccacctcttgctcagcctatataccgccatcttcagcaaaccctgatgaaggctacaaagtaagcgcaagtacccacgtaaagacgttaggtcaaggtgtagcccatgaggtggcaagaaatgggctacattttctaccccagaaaactacgatagcccttatgaaacttaagggtcgaaggtggatttagcagtaaactgagagtagagtgcttagttgaacagggccctgaagcgcgtacacaccgcccgtcaccctcctcaagtatacttcaaaggacatttaactaaaacccctacgcatttatatagaggagacaagtcgtaacatggtaagtgtactggaaagtgcacttggacgaaccagagtgtagcttaacacaaagcacccaacttacacttaggagatttcaacttaacttgaccgctctgagctaaacctagccccaaacccactccaccttactaccagacaaccttagccaaaccatttacccagataaagtataggcgatagaaattgaaacctggcgcaatagatatagtaccgcaagggaaagatgaaaaattataaccaagcataatatagcaaggactaacccctataccttctgcataatgaattaactagaaataactttgcaaggagagccaaagctaagacccccgaaaccagacgagctacctaagaacagctaaaagagcacacccgtctatgtagcaaaatagtgggaagatttataggtagaggcgacaaacctaccgagcctggtgatagctggttgtccaagatagaatcttagttcaactttaaatttgcccacagaaccctctaaatccccttgtaaatttaactgttagtccaaagaggaacagctctttggacactaggaaaaaaccttgtagagagagtaaaaaatttaacacccatagtaggcctaaaagcagccaccaattaagaaagcgttcaagctcaacacccactacctaaaaaatcccaaacatataactgaactcctcacacccaattggaccaatctatcaccctatagaagaactaatgttagtataagtaacatgaaaacattctcctccgcataagcctgcgtcagattaaaacactgaactgacaattaacagcccaatatctacaatcaaccaacaagtcattattaccctcactgtcaacccaacacaggcatgctcataaggaaaggttaaaaaaagtaaaaggaactcggcaaatcttaccccgcctgtttaccaaaaacatcacctctagcatcaccagtattagaggcaccgcctgcccagtgacacatgtttaacggccgcggtaccctaaccgtgcaaaggtagcataatcacttgttccttaaatagggacctgtatgaatggctccacgagggttcagctgtctcttacttttaaccagtgaaattgacctgcccgtgaagaggcgggcatgacacagcaagacgagaagaccctatggagctttaatttattaatgcaaacagtacctaacaaacccacaggtcctaaactaccaaacctgcattaaaaatttcggttggggcgacctcggagcagaacccaacctccgagcagtacatgctaagacttcaccagtcaaagcgaactactatactcaattgatccaataacttgaccaacggaacaagttaccctagggataacagcgcaatcctattctagagtccatatcaacaatagggtttacgacctcgatgttggatcaggacatcccgatggtgcagccgctattaaaggttcgtttgttcaacgattaaagtcctacgtgatctgagttcagaccggagtaatccaggtcggtttctatctacnttcaaattcctccctgtacgaaaggacaagagaaataaggcctacttcacaaagcgccttcccccgtaaatgatatcatctcaacttagtattatacccacacccacccaagaacagggtttgttaagatggcagagcccggtaatcgcataaaacttaaaactttacagtcagaggttcaattcctcttcttaacaacatacccatggccaacctcctactcctcattgtacccattctaatcgcaatggcattcctaatgcttaccgaacgaaaaattctaggctatatacaactacgcaaaggccccaacgttgtaggcccctacgggctactacaacccttcgctgacgccataaaactcttcaccaaagagcccctaaaacccgccacatctaccatcaccctctacatcaccgccccgaccttagctctcaccatcgctcttctactatgaacccccctccccatacccaaccccctggtcaacctcaacctaggcctcctatttattctagccacctctagcctagccgtttactcaatcctctgatcagggtgagcatcaaactcaaactacgccctgatcggcgcactgcgagcagtagcccaaacaatctcatatgaagtcaccctagccatcattctactatcaacattactaataagtggctcctttaacctctccacccttatcacaacacaagaacacctctgattactcctgccatcatgacccttggccataatatgatttatctccacactagcagagaccaaccgaacccccttcgaccttgccgaaggggagtccgaactagtctcaggcttcaacatcgaatacgccgcaggccccttcgccctattcttcatagccgaatacacaaacattattataataaacaccctcaccactacaatcttcctaggaacaacatatgacgcactctcccctgaactctacacaacatattttgtcaccaagaccctacttctaacctccctgttcttatgaattcgaacagcatacccccgattccgctacgaccaactcatacacctcctatgaaaaaacttcctaccactcaccctagcattacttatatgatatgtctccatacccattacaatctccagcatcccccctcaaacctaagaaatatgtctgataaaagagttactttgatagagtaaataataggagcttaaacccccttatttctaggactatgagaatcgaacccatccctgagaatccaaaattctccgtgccacctatcacaccccatcctaaagtaaggtcagctaaataagctatcgggcccataccccgaaaatgttggttatacccttcccgtactaattaatcccctggcccaacccgtcatctactctaccatctttgcaggcacactcatcacagcgctaagctcgcactgattttttacctgagtaggcctagaaataaacatgctagcttttattccagttctaaccaaaaaaataaaccctcgttccacagaagctgccatcaagtatttcctcacgcaagcaaccgcatccataatccttctaatagctatcctcttcaacaatatactctccggacaatgaaccataaccaatactaccaatcaatactcatcattaataatcataatggctatagcaataaaactaggaatagccccctttcacttctgagtcccagaggttgcccaaggcacccctctgacatccggcctgcttcttctcacatgacaaaaactagcccccatctcaatcatataccaaatctctccctcactaaacgtaagccttctcctcactctctcaatcttatccatcatagcaggcagttgaggtggattaaaccaaacccagctacgcaaaatcttagcatactcctcaattacccacataggatgaataatagcagttctaccgtacaaccctaacataaccattcttaatttaactatttatattatcctaactactaccgcattcctactactcaacttaaactccagcaccacgaccctactactatctcgcacctgaaacaagctaacatgactaacacccttaattccatccaccctcctctccctaggaggcctgcccccgctaaccggctttttgcccaaatgggccattatcgaagaattcacaaaaaacaatagcctcatcatccccaccatcatagccaccatcaccctccttaacctctacttctacctacgcctaatctactccacctcaatcacactactccccatatctaacaacgtaaaaataaaatgacagtttgaacatacaaaacccaccccattcctccccacactcatcgcccttaccacgctactcctacctatctccccttttatactaataatcttatagaaatttaggttaaatacagaccaagagccttcaaagccctcagtaagttgcaatacttaatttctgtaacagctaaggactgcaaaaccccactctgcatcaactgaacgcaaatcagccactttaattaagctaagcccttactagaccaatgggacttaaacccacaaacacttagttaacagctaagcaccctaatcaactggcttcaatctacttctcccgccgccgggaaaaaaggcgggagaagccccggcaggtttgaagctgcttcttcgaatttgcaattcaatatgaaaatcacctcggagctggtaaaaagaggcctaacccctgtctttagatttacagtccaatgcttcactcagccattttacctcacccccactgatgttcgccgaccgttgactattctctacaaaccacaaagacattggaacactatacctattattcggcgcatgagctggagtcctaggcacagctctaagcctccttattcgagccgagctgggccagccaggcaaccttctaggtaacgaccacatctacaacgttatcgtcacagcccatgcatttgtaataatcttcttcatagtaatacccatcataatcggaggctttggcaactgactagttcccctaataatcggtgcccccgatatggcgtttccccgcataaacaacataagcttctgactcttacctccctctctcctactcctgctcgcatctgctatagtggaggccggagcaggaacaggttgaacagtctaccctcccttagcagggaattactcccaccctggagcctccgtagacctaaccatcttctccttacacctagcaggtgtctcctctatcttaggggccatcaatttcatcacaacaattatcaatataaaaccccctgccataacccaataccaaacgcccctcttcgtctgatccgtcctaatcacagcagtcctacttctcctatctctcccagtcctagctgctggcatcactatactactaacagaccgcaacctcaacaccaccttcttcgaccccgccggaggaggagaccccattctataccaacacctattctgatttttcggtcaccctgaagtttatattcttatcctaccaggcttcggaataatctcccatattgtaacttactactccggaaaaaaagaaccatttggatacataggtatggtctgagctatgatatcaattggcttcctagggtttatcgtgtgagcacaccatatatttacagtaggaatagacgtagacacacgagcatatttcacctccgctaccataatcatcgctatccccaccggcgtcaaagtatttagctgactcgccacactccacggaagcaatatgaaatgatctgctgcagtgctctgagccctaggattcatctttcttttcaccgtaggtggcctgactggcattgtattagcaaactcatcactagacatcgtactacacgacacgtactacgttgtagctcacttccactatgtcctatcaataggagctgtatttgccatcataggaggcttcattcactgatttcccctattctcaggctacaccctagaccaaacctacgccaaaatccatttcactatcatattcatcggcgtaaatctaactttcttcccacaacactttctcggcctatccggaatgccccgacgttactcggactaccccgatgcatacaccacatgaaacatcctatcatctgtaggctcattcatttctctaacagcagtaatattaataattttcatgatttgagaagccttcgcttcgaagcgaaaagtcctaatagtagaagaaccctccataaacctggagtgactatatggatgccccccaccctaccacacattcgaagaacccgtatacataaaatctagacaaaaaaggaaggaatcgaaccccccaaagctggtttcaagccaaccccatggcctccatgactttttcaaaaaggtattagaaaaaccatttcataactttgtcaaagttaaattataggctaaatcctatatatcttaatggcacatgcagcgcaagtaggtctacaagacgctacttcccctatcatagaagagcttatcacctttcatgatcacgccctcataatcattttccttatctgcttcctagtcctgtatgcccttttcctaacactcacaacaaaactaactaatactaacatctcagacgctcaggaaatagaaaccgtctgaactatcctgcccgccatcatcctagtcctcatcgccctcccatccctacgcatcctttacataacagacgaggtcaacgatccctcccttaccatcaaatcaattggccaccaatggtactgaacctacgagtacaccgactacggcggactaatcttcaactcctacatacttcccccattattcctagaaccaggcgacctgcgactccttgacgttgacaatcgagtagtactcccgattgaaacccccattcgtataataattacatcacaagacgtcttgcactcatgagctgtccccacattaggcttaaaaacagatgcaattcccggacgtctaaaccaaaccactttcaccgctacacgaccgggggtatactacggtcaatgctctgaaatctgtggagcaaaccacagtttcatgcccatcgtcctagaattaattcccctaaaaatctttgaaatagggcccgtatttaccctatagcaccccctctagagcccactgtaaagctaacttagcattaaccttttaagttaaagattaagagaaccaacacctctttacagtgaaatgccccaactaaatactaccgtatggcccaccataattacccccatactccttacactattcctcatcacccaactaaaaatattaaacacaaactaccacctacctccctcaccaaagcccataaaaataaaaaattataacaaaccctgagaaccaaaatgaacgaaaatctgttcgcttcattcattgcccccacaatcctaggcctacccgccgcagtactgatcattctatttccccctctattgatccccacctccaaatatctcatcaacaaccgactaatcaccacccaacaatgactaatcaaactaacctcaaaacaaatgataaccatacacaacactaaaggacgaacctgatctcttatactagtatccttaatcatttttattgccacaactaacctcctcggactcctgccttactcatttacaccaaccacccaactatctataaacctagccatggccatccccttatgagcgggcgcagtgattataggctttcgctctaagattaaaaatgccctagcccacttcttaccacaaggcacacctacaccccttatccccatactagttattatcgaaaccatcagcctactcattcaaccaatagccctggccgtacgcctaaccgctaacattactgcaggccacctactcatgcacctaattggaagcgccaccctagcaatatcaaccattaaccttccctctacacttatcatcttcacaattctaattctactgactatcctagaaatcgctgtcgccttaatccaagcctacgttttcacacttctagtaagcctctacctgcacgacaacacataatgacccaccaatcacatgcctatcatatagtaaaacccagcccatgacccctaacaggggccctctcagccctcctaatgacctccggcctagccatgtgatttcacttccactccataacgctcctcatactaggcctactaaccaacacactaaccatataccaatgatggcgcgatgtaacacgagaaagcacataccaaggccaccacacaccacctgtccaaaaaggccttcgatatgggataatcctatttattacctcagaagtttttttcttcgcaggatttttctgagccttttaccactccagcctagcccctaccccccaattaggagggcactggcccccaacaggcatcaccccgctaaatcccctagaagtcccactcctaaacacatccgtattactcgcatcaggagtatcaatcacctgagctcaccatagtctaatagaaaacaaccgaaaccaaataattcaagcactgcttattacaattttactgggtctctattttaccctcctacaagcctcagagtacttcgagtctcccttcaccatttccgacggcatctacggctcaacattttttgtagccacaggcttccacggacttcacgtcattattggctcaactttcctcactatctgcttcatccgccaactaatatttcactttacatccaaacatcactttggcttcgaagccgccgcctgatactggcattttgtagatgtggtttgactatttctgtatgtctccatctattgatgagggtcttactcttttagtataaatagtaccgttaacttccaattaactagttttgacaacattcaaaaaagagtaataaacttcgccttaattttaataatcaacaccctcctagccttactactaataattattacattttgactaccacaactcaacggctacatagaaaaatccaccccttacgagtgcggcttcgaccctatatcccccgcccgcgtccctttctccataaaattcttcttagtagctattaccttcttattatttgatctagaaattgccctccttttacccctaccatgagccctacaaacaactaacctgccactaatagttatgtcatccctcttattaatcatcatcctagccctaagtctggcctatgagtgactacaaaaaggattagactgaaccgaattggtatatagtttaaacaaaacgaatgatttcgactcattaaattatgataatcatatttaccaaatgcccctcatttacataaatattatactagcatttaccatctcacttctaggaatactagtatatcgctcacacctcatatcctccctactatgcctagaaggaataatactatcgctgttcattatagctactctcataaccctcaacacccactccctcttagccaatattgtgcctattgccatactagtctttgccgcctgcgaagcagcggtgggcctagccctactagtctcaatctccaacacatatggcctagactacgtacataacctaaacctactccaatgctaaaactaatcgtcccaacaattatattactaccactgacatgactttccaaaaaacacataatttgaatcaacacaaccacccacagcctaattattagcatcatccctctactattttttaaccaaatcaacaacaacctatttagctgttccccaaccttttcctccgaccccctaacaacccccctcctaatactaactacctgactcctacccctcacaatcatggcaagccaacgccacttatccagtgaaccactatcacgaaaaaaactctacctctctatactaatctccctacaaatctccttaattataacattcacagccacagaactaatcatattttatatcttcttcgaaaccacacttatccccaccttggctatcatcacccgatgaggcaaccagccagaacgcctgaacgcaggcacatacttcctattctacaccctagtaggctcccttcccctactcatcgcactaatttacactcacaacaccctaggctcactaaacattctactactcactctcactgcccaagagctatcaaactcctgagccaacaacttaatatgactagcttacacaatagcttttatagtaaagatacctctttacggactccacttatgactccctaaagcccatgtcgaagcccccatcgctgggtcaatagtacttgccgcagtactcttaaaactaggcggctatggtataatacgcctcacactcattctcaaccccctgacaaaacacatagcctaccccttccttgtactatccctatgaggcataattataacaagctccatctgcctacgacaaacagacctaaaatcgctcattgcatactcttcaatcagccacatagccctcgtagtaacagccattctcatccaaaccccctgaagcttcaccggcgcaatcattctcataatcgcccacggacttacatcctcattactattctgcctagcaaactcaaactacgaacgcactcacagtcgcatcataatcctctctcaaggacttcaaactctactcccactaatagctttttgatgacttctagcaagcctcgctaacctcgccttaccccccactattaacctactgggagaactctctgtgctagtaaccacgttctcctgatcaaatatcactctcctacttacaggactcaacatactagtcacagccctatactccctctacatatttaccacaacacaatgaggctcactcacccaccacattaacaacataaaaccctcattcacacgagaaaacaccctcatgttcatacacctatcccccattctcctcctatccctcaaccccgacatcattaccgggttttcctcttgtaaatatagtttaaccaaaacatcagattgtgaatctgacaacagaggcttacgaccccttatttaccgagaaagctcacaagaactgctaactcatgcccccatgtctaacaacatggctttctcaacttttaaaggataacagctatccattggtcttaggccccaaaaattttggtgcaactccaaataaaagtaataaccatgcacactactataaccaccctaaccctgacttccctaattccccccatccttaccaccctcgttaaccctaacaaaaaaaactcatacccccattatgtaaaatccattgtcgcatccacctttattatcagtctcttccccacaacaatattcatgtgcctagaccaagaagttattatctcgaactgacactgagccacaacccaaacaacccagctctccctaagcttcaaactagactacttctccataatattcatccctgtagcattgttcgttacatggtccatcatagaattctcactgtgatatataaactcagacccaaacattaatcagttcttcaaatatctactcattttcctaattaccatactaatcttagttaccgctaacaacctattccaactgttcatcggctgagagggcgtaggaattatatccttcttgctcatcagttgatgatacgcccgagcagatgccaacacagcagccattcaagcaatcctatacaaccgtatcggcgatatcggtttcatcctcgccttagcatgatttatcctacactccaactcatgagacccacaacaaatagcccttctaaacgctaatccaagcctcaccccactactaggcctcctcctagcagcagcaggcaaatcagcccaattaggtctccacccctgactcccctcagccatagaaggccccaccccagtctcagccctactccactcaagcactatagttgtagcaggaatcttcttactcatccgcttccaccccctagcagaaaatagcccactaatccaaactctaacactatgcttaggcgctatcaccactctgttcgcagcagtctgcgcccttacacaaaatgacatcaaaaaaatcgtagccttctccacttcaagtcaactaggactcataatagttacaatcggcatcaaccaaccacacctagcattcctgcacatctgtacccacgccttcttcaaagccatactatttatgtgctccgggtccatcatccacaaccttaacaatgaacaagacattcgaaaaataggaggactactcaaaaccatacctctcacttcaacctccctcaccattggcagcctagcattagcaggaatacctttcctcacaggtttctactccaaagaccacatcatcgaaaccgcaaacatatcatacacaaacgcctgagccctatctattactctcatcgctacctccctgacaagcgcctatagcactcgaataattcttctcaccctaacaggtcaacctcgcttccccacccttactaacattaacgaaaataaccccaccctactaaaccccattaaacgcctggcagccggaagcctattcgcaggatttctcattactaacaacatttcccccgcatcccccttccaaacaacaatccccctctacctaaaactcacagccctcgctgtcactttcctaggacttctaacagccctagacctcaactacctaaccaacaaacttaaaataaaatccccactatgcacattttatttctccaacatactcggattctaccctagcatcacacaccgcacaatcccctatctaggccttcttacgagccaaaacctgcccctactcctcctagacctaacctgactagaaaagctattacctaaaacaatttcacagcaccaaatctccacctccatcatcacctcaacccaaaaaggcataattaaactttacttcctctctttcttcttcccactcatcctaaccctactcctaatcacataacctattcccccgagcaatctcaattacaatatatacaccaacaaacaatgttcaaccagtaactactactaatcaacgcccataatcatacaaagcccccgcaccaataggatcctcccgaatcaaccctgacccctctccttcataaattattcagcttcctacactattaaagtttaccacaaccaccaccccatcatactctttcacccacagcaccaatcctacctccatcgctaaccccactaaaacactcaccaagacctcaacccctgacccccatgcctcaggatactcctcaatagccatcgctgtagtatatccaaagacaaccatcattccccctaaataaattaaaaaaactattaaacccatataacctcccccaaaattcagaataataacacacccgaccacaccgctaacaatcaatactaaacccccataaataggagaaggcttagaagaaaaccccacaaaccccattactaaacccacactcaacagaaacaaagcatacatcattattctcgcacggactacaaccacgaccaatgatatgaaaaaccatcgttgtatttcaactacaagaacaccaatgaccccaatacgcaaaattaaccccctaataaaattaattaaccactcattcatcgacctccccaccccatccaacatctccgcatgatgaaacttcggctcactccttggcgcctgcctgatcctccaaatcaccacaggactattcctagccatgcactactcaccagacgcctcaaccgccttttcatcaatcgcccacatcactcgagacgtaaattatggctgaatcatccgctaccttcacgccaatggcgcctcaatattctttatctgcctcttcctacacatcgggcgaggcctatattacggatcatttctctactcagaaacctgaaacatcggcattatcctcctgcttgcaactatagcaacagccttcataggctatgtcctcccgtgaggccaaatatcattctgaggggccacagtaattacaaacttactatccgccatcccatacattgggacagacctagttcaatgaatctgaggaggctactcagtagacagtcccaccctcacacgattctttacctttcacttcatcttgcccttcattattgcagccctagcagcactccacctcctattcttgcacgaaacgggatcaaacaaccccctaggaatcacctcccattccgataaaatcaccttccacccttactacacaatcaaagacgccctcggcttacttctcttccttctctccttaatgacattaacactattctcaccagacctcctaggcgacccagacaattataccctagccaaccccttaaacacccctccccacatcaagcccgaatgatatttcctattcgcctacacaattctccgatccgtccctaacaaactaggaggcgtccttgccctattactatccatcctcatcctagcaataatccccatcctccatatatccaaacaacaaagcataatatttcgcccactaagccaatcactttattgactcctagccgcagacctcctcattctaacctgaatcggaggacaaccagtaagctacccttttaccatcattggacaagtagcatccgtactatacttcacaacaatcctaatcctaataccaactatctccctaattgaaaacaaaatactcaaatgggcctgtccttgtagtataaactaatacaccagtcttgtaaaccggagatgaaaacctttttccaaggacaaatcagagaaaaagtctttaactccaccattagcacccaaagctaagattctaatttaaactattctctgttctttcatggggaagcagatttgggtaccacccaagtattgactcacccatcaacaaccgctatgtatttcgtacattactgccagtcaccatgaatattgtacggtaccataaatacttgaccacctgtagtacataaaaacccaatccacatcaaaaccccctccccatgcttacaagcaagtacagcaatcaaccttcaactatcacacatcaactgcaactccaaagccacccctcacccactaggataccaacaaacctatccacccttaacagtacatagtacataaaaccatttaccgtacatagcacattacagtcaaatcccttctcgcccccatggatgacccccctcagataggagtcccttgaccaccatcctccgtgaaatcaatatcccgcacaagagtgctactctcctcgctccgggcccataacacttgggggtagctaaagtgaactgtatccgacatctggttcctacttcagggtcataaagcctaaatagcccacacgttccccttaaataagacatcacgatg

SEQ ID NO: 420 - DNA, 16562 bp, Homo sapiens mitochondrial
  3108: "n" refers to a nucleotide at position 3107 of the Cambridge Reference Sequence (CRS, Anderson et al. 1981 Nature 290:457-465), later determined to be absent from the human mtDNA sequence according to the revised CRS (rCRS, Andrews et al. 1999 Nature Genetics 23:147); "n" therefore represents a single nucleotide deletion at a position corresponding to nucleotide 3107 of SEQ ID NO:1 as provided herein.
gatcacaggtctatcaccctattaaccactcacgggagctctccatgcatttggtattttcgtctggggggtgtgcacgcgatagcattgcgagacgctggagccggagcaccctatgtcgcagtatctgtctttgattcctgcctcatcccattatttatcgcacctacgttcaatattacaggcgaacatacttactaaagtgtgttaattaattaatgcttgtaggacataataataacaattgaatgtctgcacagccgctttccatacagacatcataacaaaaaatttccaccaaaccccccctccccccccgcttctggccacagcacttaaacacatctctgccaaaccccaaaaacaaagaaccctaacaccagcctaaccagatttcaaattttatcttttggcggtatgcacttttaacagtcaccccccaactaacacattattccccccccactcccatactactaatctcatcaatacaacccccacccatcctacccagcacacacacaccgctgctaaccccataccccgaaccaaccaaaccccaaagacaccccccacagtttatgtagcttacctcctcaaagcaatacactgaaaatgtttagacgggctcacatcaccccataaacaaataggtttggtcctagcctttctattagctcttagtaagattacacatgcaagcatccccgttccagtgagttcaccctctaaatcaccacgatcaaaagggacaagcatcaagcacgcagcaatgcagctcaaaacgcttagcctagccacacccccacgggaaacagcagtgattagcctttagcaataaacgaaagtttaactaagctatactaaccccagggttggtcaatttcgtgccagccaccgcggtcacacgattaacccaagtcaatagaagccggcgtaaagagtgttttagatcaccccctccccaataaagctaaaactcacctgagttgtaaaaaactccagttgacacaaaatagactacgaaagtggctttaacatatctgaacacacaatagctaagacccaaactgggattagataccccactatgcttagccctaaacctcaacagttaaatcaacaaaactgctcgccagaacactacgagccacagcttaaaactcaaaggacctggcggtgcttcatatccctctagaggagcctgttctgtaatcgataaaccccgatcaacctcaccacctcttgctcagcctatataccgccatcttcagcaaaccctgatgaaggctacaaagtaagcgcaagtacccacgtaaagacgttaggtcaaggtgtagcccatgaggtggcaagaaatgggctacattttctaccccagaaaactacgatagcccttatgaaacttaagggtcgaaggtggatttagcagtaaactgagagtagagtgcttagttgaacagggccctgaagcgcgtacacaccgcccgtcaccctcctcaagtatacttcaaaggacatttaactaaaacccctacgcatttatatagaggagacaagtcgtaacatggtaagtgtactggaaagtgcacttggacgaaccagagtgtagcttaacacaaagcacccaacttacacttaggagatttcaacttaacttgaccgctctgagctaaacctagccccaaacccactccaccttactaccagacaaccttagccaaaccatttacccaaataaagtataggcgatagaaattgaaacctggcgcaatagatatagtaccgcaagggaaagatgaaaaattataaccaagcataatatagcaaggactaacccctataccttctgcataatgaattaactagaaataactttgcaaggagagccaaagctaagacccccgaaaccagacgagctacctaagaacagctaaaagagcacacccgtctatgtagcaaaatagtgggaagatttataggtagaggcgacaaacctaccgagcctggtgatagctggttgtccaagatagaatcttagttcaactttaaatttgcccacagaaccctctaaatccccttgtaaatttaactgttagtccaaagaggaacagctctttggacactaggaaaaaaccttgtagagagagtaaaaaatttaacacccatagtaggcctaaaagcagccaccaattaagaaagcgttcaagctcaacacccactacctaaaaaatcccaaacatataactgaactcctcacacccaattggaccaatctatcaccctatagaagaactaatgttagtataagtaacatgaaaacattctcctccgcataagcctgcgtcagattaaaacactgaactgacaattaacagcccaatatctacaatcaaccaacaagtcattattaccctcactgtcaacccaacacaggcatgctcataaggaaaggttaaaaaaagtaaaaggaactcggcaaatcttaccccgcctgtttaccaaaaacatcacctctagcatcaccagtattagaggcaccgcctgcccagtgacacatgtttaacggccgcggtaccctaaccgtgcaaaggtagcataatcacttgttccttaaatagggacctgtatgaatggctccacgagggttcagctgtctcttacttttaaccagtgaaattgacctgcccgtgaagaggcgggcatgacacagcaagacgagaagaccctatggagctttaatttattaatgcaaacagtacctaacaaacccacaggtcctaaactaccaaacctgcattaaaaatttcggttggggcgacctcggagcagaacccaacctccgagcagtacatgctaagacttcaccagtcaaagcgaactactatactcaattgatccaataacttgaccaacggaacaagttaccctagggataacagcgcaatcctattctagagtccatatcaacaatagggtttacgacctcgatgttggatcaggacatcccgatggtgcagccgctattaaaggttcgtttgttcaacgattaaagtcctacgtgatctgagttcagaccggagtaatccaggtcggtttctatctacnttcaaattcctccctgtacgaaaggacaagagaaataaggcctacttcacaaagcgccttcccccgtaaatgatatcatctcaacttagtattatacccacacccacccaagaacagggtttgttaagatggcagagcccggtaatcgcataaaacttaaaactttacagtcagaggttcaattcctcttcttaacaacatacccatggccaacctcctactcctcattgtacccattctaatcgcaatggcattcctaatgcttaccgaacgaaaaattctaggctatatacaactacgcaaaggccccaacgttgtaggcccctacgggctactacaacccttcgctgacgccataaaactcttcaccaaagagcccctaaaacccgccacatctaccatcaccctctacatcaccgccccgaccttagctctcaccgtcgctcttctactatgaacccccctccccatacccaaccccctggtcaacctcaacctaggcctcctatttattctagccacctctagcctagccgtttactcaatcctctgatcagggtgagcatcaaactcaaactacgccctgatcggcgcactgcgagcagtagcccaaacaatctcatatgaagtcaccctagccatcattctactatcaacattactaataagtggctcctttaacctctccacccttatcacaacacaagaacacctctgattactcctgccatcatgacccttggccataatatgatttatctccacactagcagagaccaaccgaacccccttcgaccttgccgaaggggaatccgaactagtctcaggcttcaacatcgaatacgccgcaggccccttcgccctattcttcatagccgaatacacaaacattattataataaacgccctcaccactacaatcttcctaggaacaacatatgacgcactctcccctgaactctacacaacatattttgtcaccaagaccctacttctaacctccctgttcttatgaattcgaacagcatacccccgattccgctacgaccaactcatacacctcctatgaaaaaacttcctaccactcaccctagcattacttatatgatatgtctccatacccactacaatctccagcattccccctcaaacctaagaaatatgtctgataaaagagttactttgatagagtaaataataggagcttaaacccccttatttctaggactatgagaatcgaacccatccctgagaatccaaaattctccgtgccacctatcacaccccatcctaaagtaaggtcagctaaataagctatcgggcccataccccgaaaatgttggttatacccttcccgtactaattaatcccctggcccaacccgtcatctactctaccatctttgcaggcacactcatcacagcgctaagctcgcactgattttttacctgagtaggcctagaaataaacatgctagcttttattccagttctaaccaaaaaaataaaccctcgttccacagaagctgccatcaagtatttcctcacgcaagcaaccgcatccataatccttctaatagctatcctcttcaacaatatactctccggacaatgaaccataaccaatactaccaatcaatactcatcattaataatcataatggctatagcaataaaactaggaatagccccctttcacttctgagtcccagaagttacccaaggcacccctctgacatccggcctgcttcttctcacatgacaaaaactagcccccatctcaatcatataccaaatctctccctcactaaacgtaagccttctcctcactctctcaatcttatccatcatagcaggcagttgaggtggactaaaccaaacccagctacgcaaaatcttagcatactcctcaattacccacataggatgaataatagcagttctaccgtacaaccctaacataaccattcttaatttaactatttatattatcctaactactaccgcattcctactactcaacttaaactccagcaccacgaccctactactatctcgcacctgaaacaagctaacatgactaacacccttaattccatccaccctcctctccctaggaggcctgcccccgctaaccggctttttgcccaaatgggccattatcgaagaattcacaaaaaacaatagcctcatcatccccaccatcatagccaccatcaccctccttaacctctacttctacctacgcctaatctactccacctcaatcacactactccccatatctaacaacgtaaaaataaaatgacagtttgaacatacaaaacccaccccattcctccccacactcatcgcccttaccacgctactcctacctatctccccttttatactaataatcttatagaaatttaggttaaatacagaccaagagccttcaaagccctcagtaagttgcaatacttaatttctgtaacagctaaggactgcaaaaccccactctgcatcaactgaacgcaaatcagccactttaattaagctaagcccttactagaccaatgggacttaaacccacaaacacttagttaacagctaagcaccctaatcaactggcttcaatctacttctcccgccgccgggaaaaaaggcgggagaagccccggcaggtttgaagctgcttcttcgaatttgcaattcaatatgaaaatcacctcggagctggtaaaaagaggcctaacccctgtctttagatttacagtccaatgcttcactcagccattttacctcacccccactgatgttcgccgaccgttgactattctctacaaaccacaaagacattggaacactatacctattattcggcgcatgagctggagtcctaggcacagctctaagcctccttattcgagccgagctgggccagccaggcaaccttctaggtaacgaccacatctacaacgttatcgtcacagcccatgcatttgtaataatcttcttcatagtaatacccatcataatcggaggctttggcaactgactagttcccctaataatcggtgcccccgatatggcgtttccccgcataaacaacataagcttctgactcttacctccctctctcctactcctgctcgcatctgctatagtggaggccggagcaggaacaggttgaacagtctaccctcccttagcagggaactactcccaccctggagcctccgtagacctaaccatcttctccttacacctagcaggtgtctcctctatcttaggggccatcaatttcatcacaacaattatcaatataaaaccccctgccataacccaataccaaacgcccctcttcgtctgatccgtcctaattacagcagtcctacttctcctatctctcccagtcctagctgctggcatcactatactactaacagaccgcaacctcaacaccaccttcttcgaccccgccggaggaggagaccccattctataccaacacctattctgatttttcggtcaccctgaagtttatattcttatcctaccaggcttcggaataatctcccatattgtaacttactactccggaaaaaaagaaccatttggatacataggtatggtctgagctatgatatcaattggcttcctaggatttatcgtgtgagcacaccatatatttacagtaggaatagacgtagacacacgagcatatttcacctccgctaccataatcatcgctatccccaccggcgtcaaagtatttagctgactcgccacactccacggaagcaatatgaaatgatctgctgcagtgctctgagccctaggattcatctttcttttcaccgtaggtggcctgactggcattgtattagcaaactcatcactagacatcgtactacacgacacgtactacgttgtagctcacttccactatgtcctatcaataggagctgtatttgccatcataggaggcttcattcactgatttcccctattctcaggctacaccctagaccaaacctacgccaaaatccatttcactatcatattcatcggcgtaaatctaactttcttcccacaacactttctcggcctatccggaatgccccgacgttactcggactaccccgatgcatacaccacatgaaacatcctatcatctgtaggctcattcatttctctaacagcagtaatattaataattttcatgatttgagaagccttcgcttcgaagcgaaaagtcctaatagtagaagaaccctccataaacctggagtgactatatggatgccccccaccctaccacacattcgaagaacccgtatacataaaatctagacaaaaaaggaaggaatcgaaccccccaaagctggtttcaagccaaccccatggcctccatgactttttcaaaaaggtattagaaaaaccatttcataactttgtcaaagttaaattataggctaaatcctatatatcttaatggcacatgcagcgcaagtaggtctacaagacgctacttcccctatcatagaagagcttatcacctttcatgatcacgccctcataatcattttccttatctgcttcctagtcctgtatgcccttttcctaacactcacaacaaaactaactaatactaacatctcagacgctcaggaaatagaaaccgtctgaactatcctgcccgccatcatcctagtcctcatcgccctcccatccctacgcatcctttacataacagacgaggtcaacgatccctcccttaccatcaaatcaattggccaccaatggtactgaacctacgagtacaccgactacggcggactaatcttcaactcctacatacttcccccattattcctagaaccaggcgacctgcgactccttgacgttgacaatcgagtagtactcccgattgaagcccccattcgtataataattacatcacaagacgtcttgcactcatgagctgtccccacattaggcttaaaaacagatgcaattcccggacgtctaaaccaaaccactttcaccgctacacgaccgggggtatactacggtcaatgctctgaaatctgtggagcaaaccacagtttcatgcccatcgtcctagaattaattcccctaaaaatctttgaaatagggcccgtatttaccctatagcacccccctctagagcccactgtaaagctaacttagcattaaccttttaagttaaagattaagagaaccaacacctctttacagtgaaatgccccaactaaatactaccgtatggcccaccataattacccccatactccttacactattcctcatcacccaactaaaaatattaaacacaaactaccacctacctccctcaccaaagcccataaaaataaaaaattataacaaaccctgagaaccaaaatgaacgaaaatctgttcgcttcattcattgcccccacaatcctaggcctacccgccgcagtactgatcattctatttccccctctattgatccccacctccaaatatctcatcaacaaccgactaatcaccacccaacaatgactaatcaaactaacctcaaaacaaatgataaccatacacaacactaaaggacgaacctgatctcttatactagtatccttaatcatttttattgccacaactaacctcctcggactcctgcctcactcatttacaccaaccacccaactatctataaacctagccatggccatccccttatgagcgggcgcagtgattataggctttcgctctaagattaaaaatgccctagcccacttcttaccacaaggcacacctacaccccttatccccatactagttattatcgaaaccatcagcctactcattcaaccaatagccctggccgtacgcctaaccgctaacattactgcaggccacctactcatgcacctaattggaagcgccaccctagcaatatcaaccattaaccttccctctacacttatcatcttcacaattctaattctactgactatcctagaaatcgctgtcgccttaatccaagcctacgttttcacacttctagtaagcctctacctgcacgacaacacataatgacccaccaatcacatgcctatcatatagtaaaacccagcccatgacccctaacaggggccctctcagccctcctaatgacctccggcctagccatgtgatttcacttccactccataacgctcctcatactaggcctactaaccaacacactaaccatataccaatgatggcgcgatgtaacacgagaaagcacataccaaggccaccacacaccacctgtccaaaaaggccttcgatacgggataatcctatttattacctcagaagtttttttcttcgcaggatttttctgagccttttaccactccagcctagcccctaccccccaattaggagggcactggcccccaacaggcatcaccccgctaaatcccctagaagtcccactcctaaacacatccgtattactcgcatcaggagtatcaatcacctgagctcaccatagtctaatagaaaacaaccgaaaccaaataattcaagcactgcttattacaattttactgggtctctattttaccctcctacaagcctcagagtacttcgagtctcccttcaccatttccgacggcatctacggctcaacattttttgtagccacaggcttccacggacttcacgtcattattggctcaactttcctcactatctgcttcatccgccaactaatatttcactttacatccaaacatcactttggcttcgaagccgccgcctgatactggcattttgtagatgtggtctgactatttctgtatgtctccatctattgatgagggtcttactcttttagtataaatagtaccgttaacttccaattaactagttttgacaacattcaaaaaagagtaataaacttcgccttaattttaataatcaacaccctcctagccttactactaataattattacattttgactaccacaactcaacggctacatagaaaaatccaccccttacgagtgcggcttcgaccctatatcccccgcccgcgtccctttctccataaaattcttcttagtagctattaccttcttattatttgatctagaaattgccctccttttacccctaccatgagccctacaaacaactaacctgccactaatagttatgtcatccctcttattaatcatcatcctagccctaagtctggcctatgagtgactacaaaaaggattagactgaaccgaattggtatatagtttaaacaaaacgaatgatttcgactcattaaattatgataatcatatttaccaaatgcccctcatttacataaatattatactagcatttaccatctcacttctaggaatactagtatatcgctcacacctcatatcctccctactatgcctagaaggaataatactatcgctgttcattatagctactctcataaccctcaacacccactccctcttagccaatattgtgcctattgccatactagtctttgccgcctgcgaagcagcggtgggcctagccctactagtctcaatctccaacacatatggcctagactacgtacataacctaaacctactccaatgctaaaactaatcgtcccaacaattatattactaccactgacatgactttccaaaaaacacataatttgaatcaacacaaccacccacagcctaattattagcatcatccctctactattttttaaccaaatcaacaacaacctatttagctgttccccaaccttttcctccgaccccctaacaacccccctcctaatactaactacctgactcctacccctcacaatcatggcaagccaacgccacttatccagtgaaccactatcacgaaaaaaactctacctctctatactaatctccctacaaatctccttaattataacattcacagccacagaactaatcatattttatatcttcttcgaaaccacacttatccccaccttggctatcatcacccgatgaggcaaccagtcagaacgcctgaacgcaggcacatacttcctattctacaccctagtaggctcccttcccctactcatcgcactaatttacactcacaacaccctaggctcactaaacattctactactcactctcactgcccaagaactatcaaactcctgagccaacaacttaatatgactagcttacacaatagcttttatagtaaagatacctctttacggactccacttatgactccctaaagcccatgtcgaagcccccatcgctgggtcaatagtacttgccgcagtactcttaaaactaggcggctatggtataatacgcctcacactcattctcaaccccctgacaaaacacatagcctaccccttccttgtactatccctatgaggcataattataacaagctccatctgcctacgacaaacagacctaaaatcgctcattgcatactcttcaatcagccacatagccctcgtagtaacagccattctcatccaaaccccctgaagcttcaccggcgcagtcattctcataatcgcccacggacttacatcctcattactattctgcctagcaaactcaaactacgaacgcactcacagtcgcatcataatcctctctcaaggacttcaaactctactcccactaatagctttttgatgacttctagcaagcctcgctaacctcgccttaccccccactattaacctactgggagaactctctgtgctagtaaccacgttctcctgatcaaatatcactctcctacttacaggactcaacatactagtcacagccctatactccctctacatatttaccacaacacaatggggctcactcacccaccacattaacaacataaaaccctcattcacacgagaaaacaccctcatgttcatacacctatcccccattctcctcctatccctcaaccccgacatcattaccgggttttcctcttgtaaatatagtttaaccaaaacatcagattgtgaatctgacaacagaggcttacgaccccttatttaccgagaaagctcacaagaactgctaactcatgcccccatgtctaacaacatggctttctcaacttttaaaggataacagctatccattggtcttaggccccaaaaattttggtgcaactccaaataaaagtaataaccatgcacactactataaccaccctaaccctgacttccctaattccccccatccttaccaccctcgttaaccctaacaaaaaaaactcatacccccattatgtaaaatccattgtcgcatccacctttattatcagtctcttccccacaacaatattcatgtgcctagaccaagaagttattatctcgaactgacactgagccacaacccaaacaacccagctctccctaagcttcaaactagactacttctccataatattcatccctgtagcattgttcgttacatggtccatcatagaattctcactgtgatatataaactcagacccaaacattaatcagttcttcaaatatctactcatcttcctaattaccatactaatcttagttaccgctaacaacctattccaactgttcatcggctgagagggcgtaggaattatatccttcttgctcatcagttgatgatacgcccgagcagatgccaacacagcagccattcaagcaatcctatacaaccgtatcggcgatatcggtttcatcctcgccttagcatgatttatcctacactccaactcatgagacccacaacaaatagcccttctaaacgctaatccaagcctcaccccactactaggcctcctcctagcagcagcaggcaaatcagcccaattaggtctccacccctgactcccctcagccatagaaggccccaccccagtctcagccctactccactcaagcactatagttgtagcaggaatcttcttactcatccgcttccaccccctagcagaaaatagcccactaatccaaactctaacactatgcttaggcgctatcaccactctgttcgcagcagtctgcgcccttacacaaaatgacatcaaaaaaatcgtagccttctccacttcaagtcaactaggactcataatagttacaatcggcatcaaccaaccacacctagcattcctgcacatctgtacccacgccttcttcaaagccatactatttatgtgctccgggtccatcatccacaaccttaacaatgaacaagatattcgaaaaataggaggactactcaaaaccatacctctcacttcaacctccctcaccattggcagcctagcattagcaggaatacctttcctcacaggtttctactccaaagaccacatcatcgaaaccgcaaacatatcatacacaaacgcctgagccctatctattactctcatcgctacctccctaacaagcgcctatagcactcgaataattcttctcaccctaacaggtcaacctcgcttccccacccttactaacattaacgaaaataaccccaccctactaaaccccattaaacgcctgacagccggaagcctattcgcaggatttctcattactaacaacatttcccccgcatcccccttccaaacaacaatccccctctacctaaaactcacagccctcgctgtcactttcctaggacttctaacagccctagacctcaactacctaaccaacaaacttaaaataaaatccccactatgcacattttatttctccaacatactcggattctaccctagcatcacacaccgcacaatcccctatctaggccttcttacgagccaaaacctgcccctactcctcctagacctaacctgactagaaaagctattacctaaaacaatttcacagcaccaaatctccacctccatcatcacctcaacccaaaaaggcataattaaactttacttcctctctttcttcttcccactcatcctaaccctactcctaatcacataacctattcccccgagcaatctcaattacaatatatacaccaacaaacaatgttcaaccagtaactactactaatcaacgcccataatcatacaaagcccccgcaccaataggatcctcccgaatcaaccctgacccctctccttcataaattattcagcttcctacactattaaagtttaccacaaccaccaccccatcatactctttcacccacagcaccaatcctacctccatcgctaaccccactaaaacactcaccaagacctcaacccctgacccccatgcctcaggatactcctcaatagccatcgctgtagtatatccaaagacaaccatcattccccctaaataaattaaaaaaactattaaacccatataacctcccccaaaattcagaataataacacacccgaccacaccgctaacaatcaatactaaacccccataaataggagaaggcttagaagaaaaccccacaaaccccattactaaacccacactcaacagaaacaaagcatacatcattattctcgcacggactacaaccacgaccaatgatatgaaaaaccatcgttgtatttcaactacaagaacaccaatgaccccaatacgcaaaattaaccccctaataaaattaattaaccactcattcatcgacctccccaccccatccaacatctccgcatgatgaaacttcggctcactccttggcgcctgcctgatcctccaaatcaccacaggactattcctagccatgcactactcaccagacgcctcaaccgccttttcatcaatcgcccacatcactcgagacgtaaattatggctgaatcatccgctaccttcacgccaatggcgcctcaatattctttatctgcctcttcctacacatcgggcgaggcctatattacggatcatttctctactcagaaacctgaaacatcggcattatcctcctgcttgcaactatagcaacagccttcataggctatgtcctcccgtgaggccaaatatcattctgaggggccacagtaattacaaacttactatccgccatcccatacattgggacagacctagttcaatgaatctgaggaggctactcagtagacagtcccaccctcacacgattctttacctttcacttcatcttgcccttcattattgcagccctagcagcactccacctcctattcttgcacgaaacgggatcaaacaaccccctaggaatcacctcccattccgataaaatcaccttccacccttactacacaatcaaagacgccctcggcttacttctcttccttctctccttaatgacattaacactattctcaccagacctcctaggcgacccagacaattataccctagccaaccccttaaatacccctccccacatcaagcccgaatgatatttcctattcgcctacacaattctccgatccgtccctaacaaactaggaggcgtccttgccctattactatccatcctcatcctagcaataatccccatcctccatatatccaaacaacaaagcataatatttcgcccactaagccaatcactttattgactcctagccgcagacctcctcattctaacctgaatcggaggacaaccagtaagctacccctttaccatcattggacaagtagcatccgtactatacttcacaacaatcctaatcctaataccaactatctccctaattgaaaacaaaatactcaaatgggcctgtccttgtagtataaactaatacaccagtcttgtaaaccggagatgaaaacctttttccaaggacaaatcagagaaaaagtctttaactccaccattagcacccaaagctaagattctaatttaaactattctctgttctttcatggggaagcagatttgggtaccacccaagtattgactcacccatcaacaaccgctatgtacttcgtacattactgccagccaccatgaatattgtacggtaccataaatacttgaccacctgtagtacataaaaacccaatccacatcaaccccccccccccatgcttacaagcaagtacagcaaccaaccctcaactatcacacatcaactgcaaccccaaagccacccctcacccactaggataccaacaaacctacccacccttaacagtacatagtgcataaagccatttaccgtacatagcacattatagtcaaatcccttctcgtccccatggatgacccccctcagataggggtcccttgaccaccatcctccgtgaaatcaatatcccgcacaagagtgctactctcctcgctccgggcccataacacttgggggtagctaaagtgaactgtatccgacatctggttcctacttcagggccataaagcctaaatagcccacacgttccccttaaataagacatcacgatg

SEQ ID NO: 421 - DNA, 16570 bp, Homo sapiens mitochondrial
  3108: "n" refers to a nucleotide at position 3107 of the Cambridge Reference Sequence (CRS, Anderson et al. 1981 Nature 290:457-465), later determined to be absent from the human mtDNA sequence according to the revised CRS (rCRS, Andrews et al. 1999 Nature Genetics 23:147); "n" therefore represents a single nucleotide deletion at a position corresponding to nucleotide 3107 of SEQ ID NO:1 as provided herein.
gatcacaggtctatcaccctattaaccactcacgggagctctccatgcatttggtattttcgtctggggggtgtgcacgcgatagcattgcgagacgctggagccggagcaccctatgtcgcagtatctgtctttgattcctgcctcatcctattatttatcgcacctacgttcaatattacaggcgaacatacttactaaagtgtgttaattagttaatgcttgtaggacataataataacaattgatgtctgcacagccgctttccacacagacatcataacaaaatttccaccaaaccccccctccccccccgcttctggccacagcacttaaacacatctctgccaaaccccaaaaacaaagaaccctaacaccagcctaaccagatttcaaattttatcttttggcggtatgcacttttaacagtcaccccccaactaacacattattttcccctcccactcccatactactaatctcatcaacacaacccccgcccatcctacccagcacacacacaccgctgctaaccccataccccgaaccaaccaaaccccaaagacaccccccaccagtttatgtagcttacctcctcaaagcaatacactgaaaatgtttagacgggctcacatcaccccataaacaaataggtttggtcctagcctttctattagctcttagtaagattacacatgcaagcatccccgttccagtgagttcaccctctaaatcaccacgatcaaaagggacaagcatcaagcacgcagcaatgcagctcaaaacgcttagcctagccacacccccacgggaaacagcagtgattaacctttagcaataaacgaaagtttaactaagctatactaaccccagggttggtcaatttcgtgccagccaccgcggtcacacgattaacccaagtcaatagaagccggcgtaaagagtgttttagatcaccccctccccaataaagctaaaactcacctgagttgtaaaaaactccagttgacacaaaatagactacgaaagtggctttaacatatctgaacacacaatagctaagacccaaactgggattagataccccactatgcttagccctaaacctcaacagttaaatcaacaaaactgctcgccagaacactacgagccacagcttaaaactcaaaggacctggcggtgcttcatatccctctagaggagcctgttctgtaatcgataaaccccgatcaacctcaccacctcttgctcagcctatataccgccatcttcagcaaaccctgatgaaggctacaaagtaagcgcaagtacccacgtaaagacgttaggtcaaggtgtagcccatgaggtggcaagaaatgggctacattttctaccccagaaaactacgatagcccttatgaaacttaagggtcgaaggtggatttagcagtaaactgagagtagagtgcttagttgaacagggccctgaagcgcgtacacaccgcccgtcaccctcctcaagtatacttcaaaggacatttaactaaaacccctacgcatttatatagaggagacaagtcgtaacatggtaagtgtactggaaagtgcacttggacgaaccagagtgtagcttaacacaaagcacccaacttacacttaggagatttcaacttaacttgaccgctctgagctaaacctagccccaaacccactccaccttactaccagacaaccttagccaaaccatttacccaaataaagtataggcgatagaaattgaaacctggcgcaatagatatagtaccgcaagggaaagatgaaaaattataaccaagcataatatagcaaggactaacccctataccttctgcataatgaattaactagaaataactttgcaaggagaaccaaagctaagacccccgaaaccagacgagctacctaagaacagctaaaagagcacacccgtctatgtagcaaaatagtgggaagatttataggtagaggcgacaaacctaccgagcctggtgatagctggttgtccaagatagaatcttagttcaactttaaatttgcccacagaaccctctaaatccccttgtaaatttaactgttagtccaaagaggaacagctctttggacactaggaaaaaaccttgtagagagagtaaaaaatttaacacccatagtaggcctaaaagcagccaccaattaagaaagcgttcaagctcaacacccactacctaaaaaatcccaaacatataactgaactcctcacacccaattggaccaatctatcaccctatagaagaactaatgttagtataagtaacatgaaaacattctcctccgcataagcctgcgtcagattaaaacactgaactgacaattaacagcccaatatctacaatcaaccaacaagtcattattaccctcactgtcaacccaacacaggcatgctcataaggaaaggttaaaaaaagtaaaaggaactcggcaaatcttaccccgcctgtttaccaaaaacatcacctctagcatcaccagtattagaggcaccgcctgcccagtgacacatgtttaacggccgcggtaccctaaccgtgcaaaggtagcataatcacttgttccttaaatagggacctgtatgaatggctccacgagggttcagctgtctcttacttttaaccagtgaaattgacctgcccgtgaagaggcgggcatgacacagcaagacgagaagaccctatggaactttaatttattaatgcaaacagtacctaacaaacccacaggtcctaaactaccaaacctgcattaaaaatttcggttggggcgacctcggagcagaacccaacctccgagcagtacatgctaagacttcaccagtcaaagcgaactactatactcaattgatccaataacttgaccaacggaacaagttaccctagggataacagcgcaatcctattctagagtccatatcaacaatagggtttacgacctcgatgttggatcaggacatcccgatggtgcagccgctattaaaggttcgtttgttcaacgattaaagtcctacgtgatctgagttcagaccggagtaatccaggtcggtttctatctacnttcaaattcctccctgtacgaaaggacaagagaaataaggcctacttcacaaagcgccttcccccgtaaatgatatcatctcaacttagtattatacccacacccacccaagaacagggtttgttaagatggcagagcccggtaatcgcataaaacttaaaactttacagtcagaggttcaattcctcttcttaacaacatacccatggccaacctcctactcctcattgtacccattctaatcgcaatggcattcctaatgcttaccgaacgaaaaattctaggctatatacaactacgcaaaggccccaacgttgtaggcccctacgggctactacaacccttcgctgacgccataaaactcttcaccaaagagcccctaaaacccgccacatctaccatcaccctctacatcaccgccccgaccttagctctcaccatcgcacttctactatgaacccccctccccatacccaaccccctggtcaacctcaacctaggcctcctatttattctagccacctctagcctagccgtttactcaatcctctgatcagggtgagcatcaaactcaaactacgccctgatcggcgcactgcgagcagtagcccaaacaatctcatatgaagtcaccctagccatcattctactatcaacattactaataagtggctcctttaacctctccacccttatcacaacacaagaacacctctgattactcctgccatcatgacccttggccataatatgatttatctccacactagcagagaccaaccgaacccccttcgaccttgccgaaggggagtccgaactagtctcaggcttcaacatcgaatacgccgcaggccccttcgccctattcttcatagccgaatacacaaacattattataataaacaccctcaccactacaatcttcctaggaacaacatatgacgcactctcccctgaactctacacaacatattttgtcaccaagaccctacttctaacctccctgttcttatgaattcgaacagcatacccccgattccgctacgaccaactcatacacctcctatgaaaaaacttcctaccactcaccctagcattacttatatgatatgtctccatacccattacaatctccagcattccccctcaaacctaagaaatatgtctgataaaagagttactttgatagagtaaataataggagcttaaacccccttatttctaggactatgagaatcgaacccatccctgagaatccaaaattctccgtgccacctatcacaccccatcctaaagtaaggtcagctaaataagctatcgggcccataccccgaaaatgttggttatacccttcccgtactaattaatcccctggcccaacccgtcatctactctaccatctttgcaggcacactcatcacagcgctaagctcgcactgattttttacctgagtaggcctagaaataaacatgctagcttttattccagttctaaccaaaaaaataaaccctcgttccacagaagctgccatcaagtatttcctcacgcaagcaaccgcatccataatccttctaatagctatcctcttcaacaatatactctccgggcaatgaaccataaccaatactaccaatcaatactcatcattaataatcataatggctatagcaataaaactaggaatagccccctttcacttctgagtcccagaggttacccaaggcacccctctgacatccggcctgcttcttctcacatgacaaaaactagcccccatctcaatcatataccaaatctctccctcactaaacgtaagccttctcctcactctctcaatcttatccatcatagcaggcagttgaggtggattaaaccaaacccagctacgcaaaatcttagcatactcctcaattacccacataggatgaataatagcagttctaccgtacaaccctaacataaccattcttaatttaactatttatattatcctaactactaccgcattcctactactcaacttaaactccagcaccacgaccctactactatctcgcacctgaaacaagctaacatgactaacacccttaattccatccaccctcctctccctaggaggcctgcccccgctaaccggctttttgcccaaatgggccattatcgaagaattcacaaaaaacaatagcctcatcatccccaccatcatagccaccatcaccctccttaacctctacttctacctacgcctaatctactccacctcaatcacactactccccatatctaacaacgtaaaaataaaatgacagtttgaacatacaaaacccaccccattcctccccacactcatcgcccttaccacgctactcctacctatctccccttttatactaataatcttatagaaatttaggttaaatacagaccaagagccttcaaagccctcagtaagttgcaatacttaatttctgtaacagctaaggactgcaaaaccccactctgcatcaactgaacgcaaatcagccactttaattaagctaagcccttactagaccaatgggacttaaacccacaaacacttagttaacagctaagcaccctaatcaactggcttcaatctacttctcccgccgccgggaaaaaaggcgggagaagccccggcaggtttgaagctgcttcttcgaatttgcaattcaatatgaaaatcacctcggagctggtaaaaagaggcctaacccctgtctttagatttacagtccaatgcttcactcagccattttacctcacccccactgatgttcgccgaccgttgactattctctacaaaccacaaagacattggaacactatacctattattcggcgcatgagctggagtcctaggcacagctctaagcctccttattcgagccgagctgggccagccaggcaaccttctaggtaacgaccacatctacaacgttatcgtcacagcccatgcatttgtaataatcttcttcatagtaatacccatcataatcggaggctttggcaactgactagttcccctaataatcggtgcccccgatatggcgtttccccgcataaacaacataagcttctgactcttacctccctctctcctactcctgctcgcatctgctatagtggaggccggagcaggaacaggttgaacagtctaccctcccttagcagggaactactcccaccctggagcctccgtagacctaaccatcttctccttacacctagcaggtgtctcctctatcttaggggccatcaatttcatcacaacaattatcaatataaaaccccctgccataacccaataccaaacgcccctcttcgtctgatccgtcctaatcacagcagtcctacttctcctatctctcccagtcctagctgctggcatcactatactactaacagaccgcaacctcaacaccaccttcttcgaccccgccggaggaggagaccccattctataccaacacctattctgatttttcggtcaccctgaagtttatattcttatcctaccaggcttcggaataatctcccatattgtaacttactactccggaaaaaaagaaccatttggatacataggtatggtctgagctatgatatcaattggcttcctagggtttatcgtgtgagcacaccatatatttacagtaggaatagacgtagacacacgagcatatttcacctccgctaccataatcatcgctatccccaccggcgtcaaagtatttagctgactcgccacactccacggaagcaatatgaaatgatctgctgcagtgctctgagccctaggattcatctttcttttcaccgtaggtggcctgactggcattgtattagcaaactcatcactagacatcgtactacacgacacgtactacgttgtagctcacttccactatgtcctatcaataggagctgtatttgccatcataggaggcttcattcactgatttcccctattctcaggctacaccctagaccaaacctacgccaaaatccatttcactatcatattcatcggcgtaaatctaactttcttcccacaacactttctaggcctatccggaatgccccgacgttactcggactaccccgatgcatacaccacatgaaacatcctatcatctgtaggctcattcatttctctaacagcagtaatattaataattttcatgatttgagaagccttcgcttcgaagcgaaaagtcctaatagtagaagaaccctccataaacctggagtgactatatggatgccccccaccctaccacacattcgaagaacccgtatacataaaatctagacaaaaaaggaaggaatcgaaccccccaaagctggtttcaagccaaccccatggcctccatgactttttcaaaaaggtattagaaaaaccatttcataactttgtcaaagttaaattataggctaaatcctatatatcttaatggcacatgcagcgcaagtaggtctacaagacgctacttcccctatcatagaagagcttatcacctttcatgatcacgccctcataatcattttccttatctgcttcctagtcctgtatgcccttttcctaacactcacaacaaaactaactaatactaacatctcagacgctcaggaaatagaaaccgtctgaactatcctgcccgccatcatcctagtcctcatcgccctcccatccctacgcatcctttacataacagacgaggtcaacgatccctcccttaccatcaaatcaattggccaccaatggtactgaacctacgagtacaccgactacggcggactaatcttcaactcctacatacttcccccattattcctagaaccaggcgacctgcgactccttgacgttgacaatcgagtagtactcccgattgaagcccccattcgtataataattacatcacaagacgtcttgcactcatgagctgtccccacattaggcttaaaaacagatgcaattcccggacgtctaaaccaaaccactttcaccgctacacgaccgggggtatactacggtcaatgctctgaaatctgtggagcaaaccacagtttcatgcccatcgtcctagaattaattcccctaaaaatctttgaaatagggcccgtatttaccctatagcaccccctctaccccctctagagcccactgtaaagctaacttagcattaaccttttaagttaaagattaagagaaccaacacctctttacagtgaaatgccccaactaaatactaccgtatggcccaccataattacccccatactccttacactattcctcatcacccaactaaaaatattaaacacaaactaccacctacctccctcaccaaagcccataaaaataaaaaattataacaaaccctgagaaccaaaatgaacgaaaatctgttcgcttcattcattgcccccacaatcctaggcctacccgccacagtactgatcattctatttccccctctattgatccccacctccaaatatctcatcaacaaccgactaatcaccacccaacaatgactaatcaaactaacctcaaaacaaatgatagccatacacaacactaaaggacgaacctgatctcttatactagtatccttaatcatttttattgccacaactaacctcctcggactcctgcctcactcatttacaccaaccacccaactatctataaacctagccatggccatccccttatgagcgggcgcagtgattataggctttcgctctaagattaaaaatgccctagcccacttcttaccacaaggcacacctacaccccttatccccatactagttattatcgaaaccatcagcctactcattcaaccaatagccctggccgtacgcctaaccgctaacattactgcaggccacctactcatgcacctaattggaagcgccaccctagcaatatcaaccattaaccttccctctacacttatcatcttcacaattctaattctactgactatcctagaaatcgctgtcgccttaatccaagcctacgttttcacacttctagtaagcctctacctgcacgacaacacataatgacccaccaatcacatgcctatcatatagtaaaacccagcccatgacccctaacaggggccctctcagccctcctaatgacctccggcctagccatgtgatttcacttccactccataacgctcctcatactaggcctactaaccaacacactaaccatataccaatgatggcgcgatgtaacacgagaaagcacataccaaggccaccacacaccacctgtccaaaaaggccttcgatacgggataatcctatttattacctcagaagtttttttcttcgcaggatttttctgagccttttaccactccagcctagcccctaccccccaactaggggggcactggcccccaacaggcatcaccccgctaaatcccctagaagtcccactcctaaacacatccgtattactcgcatcaggagtatcaatcacctgagctcaccatagtctaatagaaaacaaccgaaaccaaataattcaagcactgcttattacaattttactgggtctctattttaccctcctacaagcctcagagtacttcgagtctcccttcaccatttccgacggcatctacggctcaacattttttgtagccacaggcttccacggacttcacgtcattattggctcaactttcctcactatctgcttcatccgccaactaatatttcactttacatccaaacatcactttggcttcgaagccgccgcctgatactggcattttgtagatgtggtttgactatttctgtatgtctccatctattgatgagggtcttactcttttagtataaatagtaccgttaacttccaattaactagttttgacaacattcaaaaaagagtaataaacttcgccttaattttaataatcaacaccctcctagccttactactaataattattacattttgactaccacaactcaacggctacatagaaaaatccaccccttacgagtgcggcttcgaccctatatcccccgcccgcgtccctttctccataaaattcttcttagtagctattaccttcttattatttgatctagaaattgccctccttttacccctaccatgagccctacaaacaactaacctgccactaatagttatgtcatccctcttattaatcatcatcctagccctaagtctggcctatgagtgactacaaaaaggattagactgagctgaattggtatatagtttaaacaaaacgaatgatttcgactcattaaattatgataatcatatttaccaaatgcccctcatttacataaatattatactagcatttaccatctcacttctaggaatactagtatatcgctcacacctcatatcctccctactatgcctagaaggaataatactatcgctgttcattatagctactctcataaccctcaacacccactccctcttagccaatattgtgcctattgccatactagtctttgccgcctgcgaagcagcggtgggcctagccctactagtctcaatctccaacacatatggcctagactacgtacataacctaaacctactccaatgctaaaactaatcgtcccaacaattatattactaccactgacatgactttccaaaaaacacataatttgaatcaacacaaccacccacagcctaattattagcatcatccccctactattttttaaccaaatcaacaacaacctatttagctgttccccaaccttttcctccgaccccctaacaacccccctcctaatactaactacctgactcctacccctcacaatcatggcaagccaacgccacttatccagtgaaccactatcacgaaaaaaactctacctctctatactaatctccctacaaatctccttaattataacattcacagccacagaactaatcatattttatatcttcttcgaaaccacacttatccccaccttggctatcatcacccgatgaggcaaccagccagaacgcctgaacgcaggcacatacttcctattctacaccctagtaggctcccttcccctactcatcgcactaatttacactcacaacaccctaggctcactaaacattctactactcactctcactgcccaagaactatcaaactcctgagccaacaacttaatatgactagcttacacaatagcttttatagtaaagatacctctttacggactccacttatgactccctaaagcccatgtcgaagcccccatcgctgggtcaatagtacttgccgcagtactcttaaaactaggcggctatggtataatacgcctcacactcattctcaaccccctgacaaaacacatagcctaccccttccttgtactatccctatgaggcataattataacaagctccatctgcctacgacaaacagacctaaaatcgctcattgcatactcttcaatcagccacatagccctcgtagtaacagccattctcatccaaaccccctgaagcttcaccggcgcagtcattctcataatcgcccacggacttacatcctcattactattctgcctagcaaactcaaactacgaacgcactcacagtcgcatcataatcctctctcaaggacttcaaactctactcccactaatagctttttgatgacttctagcaagcctcgctaacctcgccttaccccccactattaacctactgggagaactctctgtgctagtaaccacattctcctgatcaaatatcactctcctacttacaggactcaacatactagtcacagccctatactccctctacatatttaccacaacacaatggggctcactcacccaccacattaacaacataaaaccctcattcacacgagaaaacaccctcatgttcatacacctatcccccattctcctcctatccctcaaccccgacatcattaccgggttttcctcttgtaaatatagtttaaccaaaacatcagattgtgaatctgacaacagaggcttacgaccccttatttaccgagaaagctcacaagaactgctaactcatgcccccatgtctaacaacatggctttctcaacttttaaaggataacagctatccattggtcttaggccccaaaaattttggtgcaactccaaataaaagtaataaccatgcacactactataaccaccctaaccctgacttccctaattccccccatccttaccaccctcgttaaccctaacaaaaaaaactcatacccccattatgtaaaatccattgtcgcatccacctttattatcagtctcttccccacaacaatattcatgtgcctagaccaagaagttattatctcgaactgacactgagccacaacccaaacaacccagctctccctaagcttcaaactagactacttctccataatattcatccctgtagcattgttcgttacatggtccatcatagaattctcactgtgatatataaactcagacccaaacattaatcagttcttcaaatatctactcattttcctaattaccatactaatcttagttaccgctaacaacctattccaactgttcatcggctgagagggcgtaggaattatatccttcttgctcatcagttgatgatacgcccgagcagatgccaacacagcagccattcaagcaatcctatacaaccgtatcggcgatatcggtttcatcctcgccttagcatgatttatcctacactccaactcatgagacccacaacaaatagcccttctaaacgctaatccaagcctcaccccactactgggcctcctcctagcagcagcaggcaaatcagcccaattaggtctccacccctgactcccctcagccatagaaggccccaccccagtctcagccctactccactcaagcactatagttgtagcaggaatcttcttactcatccgcttccaccccctagcagaaaatagcccactaatccaaactctaacactatgcttaggcgctatcaccactctgttcgcagcagtctgcgcccttacacaaaatgacatcaaaaaaatcgtagccttctccacttcaagtcagctaggactcataatagttacaatcggcatcaaccaaccacacctagcattcctgcacatctgtacccacgccttcttcaaagccatactatttatgtgctccgggtccatcatccacaaccttaacaatgaacaagatattcgaaaaataggaggactactcaaaaccatacctctcacttcaacctccctcaccattggcagcctagcattagcaggaatacctttcctcacaggtttctactccaaagaccacatcatcgaaaccgcaaacatatcatacacaaacgcctgagccctatctattactctcatcgctacctccctgacaagcgcctatagcactcgaataattcttctcaccctaacaggtcaacctcgcttccccacccttactaacattaacgaaaataaccccaccctactaaaccccattaaacgcctggcagccggaagcctattcgcaggatttctcattactaacaacatttcccccgcatcccccttccaaacaacaatccccctctacctaaaactcacagccctcgctgtcactttcctaggacttctaacagccctagacctcaactacctaaccaacaaacttaaaataaaatccccactatgcacattttatttctccaacatactcggattctaccctagcatcacacaccgcacaatcccctatctaggccttcttacgagccaaaacctgcccctactcctcctagacctaacctgactagaaaagctattacctaaaacaatttcacagcaccaaatctccacctccatcatcacctcaacccaaaaaggcataattaaactttacttcctctctttcttcttcccactcatcctaaccctactcctaatcacataacctattcccccgagcaatctcaattacaatatatacaccaacaaacaatgttcaaccagtaactactactaatcaacgcccataatcatacaaagcccccgcaccaataggatcctcccgaatcaaccctgacccctctccttcataaattattcagcttcctacactactaaagtttaccacaaccaccaccccatcatactctttcacccacagcaccaatcctacctccatcgctaaccccactaaaacactcaccaagacctcaacccctgacccccatgcctcaggatactcctcaatagccatcgctgtagtatatccaaagacaaccatcattccccctaaataaattaaaaaaactattaaacccatataacctcccccaaaattcagaataataacacacccgaccacaccgctaacaatcaatactaaacccccataaataggagaaggcttagaagaaaaccccacaaaccccattactaaacccacactcaacagaaacaaagcatacatcattattctcgcacggactacaaccacgaccaatgatatgaaaaaccatcgttgtatttcaactacaagaacaccaatgaccccaatacgcaaaattaaccccctaataaaactaattaaccactcattcatcgacctccccaccccatccaacatctccgcatgatgaaacttcggctcactccttggcgcctgcctgatcctccaaatcaccacaggactattcctagccatgcactactcaccagacgcctcaaccgccttttcatcaatcgcccacatcactcgagacgtaaattatggctgaatcatccgctaccttcacgccaatggcgcctcaatattctttatctgcctcttcctacacatcggacgaggcctatattacggatcatttctctactcagaaacctgaaacatcggcattatcctcctgcttgcaactatagcaacagccttcataggctatgtcctcccgtgaggccaaatatcattctgaggggccacagtaattacaaacttactatccgccatcccatacattgggacagacctagttcaatgaatctgaggaggctactcagtagacagtcccaccctcacacgattctttacctttcacttcatcttacccttcattattgcagccctagcagcactccacctcctattcttgcacgaaacgggatcaaacaaccccctaggaatcacctcccattccgataaaatcaccttccacccttactacacaatcaaagacgccctcggcttacttctcttccttctctccttaatgacattaacactattctcacctgacctcctaggcgacccagacaattataccctagccaaccccttaaacacccctccccacatcaagcccgaatgatatttcctattcgcctacacaattctccgatccgtccctaacaaactaggaggcgtccttgccctattactatccatcctcatcctagcaataatccccatcctccatatatccaaacaacaaagcataatatttcgcccactaagccaatcactttattgactcctagccgcagacctcctcattctaacctgaatcggaggacaaccagtaagctacccttttaccatcattggacaagtagcatccgtactatacttcacaacaatcctaatcctaataccaactatctccctaattgaaaacaaaatactcaaatgggcctgtccttgtagtataaactaatacaccagtcttgtaaaccggaaatgaaaacctttttccaaggacaaatcagagaaaaagtctttaactccaccattagcacccaaagctaagattctaatttaaactattctctgttctttcatggggaagcagatttgggtaccacccaagtattgactcacccatcaacaaccgctatgtatttcgtacattactgccagccaccatgaatattgtacggtaccataaatacttgaccacctgtagtacataaaaacccaatccacatcaaaaccccctccccatgcttacaagcaagtacagcaatcaaccttcaactatcacacatcaactgcaactccaaagccacccctcacccactaggataccaacaaacctacccaccctcaacagtacatagtacataaagccattcatcgtacatagcacattacagtcaaatcccttctcgtccccatggatgacccccctcagataggggtcccttgaccaccatcctccgtgaaatcaatatcccgcacaagagtgctactctcctcgctccgggcccataacacttgggggtagctaaagtgaactgtatccgacatctggttcctacttcagggtcataaagcctaaatagcccacacgttccccttaaataagacatcacgatg

SEQ ID NO: 422 - DNA, 16571 bp, Homo sapiens mitochondrial
  3109: "n" refers to a nucleotide at position 3107 of the Cambridge Reference Sequence (CRS, Anderson et al. 1981 Nature 290:457-465), later determined to be absent from the human mtDNA sequence according to the revised CRS (rCRS, Andrews et al. 1999 Nature Genetics 23:147); "n" therefore represents a single nucleotide deletion at a position corresponding to nucleotide 3107 of SEQ ID NO:1 as provided herein.
gatcacaggtctatcaccctattaaccactcacgggagctctccatgcatttggtattttcgtctggggggtgtgcacgcgatagcattgcgagacgctggagccggagcaccctatgtcgcagtatctgtctttgattcctgccccatcccattatttatcgcacctacgttcaatattacaggcgaacatacctactaaagtgtgttaattaattaatgcttgtaggacataataataacaattgaatgtctgcacagccgctttccacacagacatcataacaaaaaatttccaccaaaccccccctcccccccgcttctggccacagcacttaaacacatctctgccaaaccccaaaaacaaagaaccctaacaccagcctaaccagatttcaaattttatcttttggcggtatgcacttttaacagtcaccccccaactaacacattattttcccctcccactcccatactactaatctcatcaatacaacccccgcccatcctacccagcacacacacaccgctgctaaccccataccccgaaccaaccaaaccccaaagacaccccccacagtttatgtagcttacctcctcaaagcaatacactgaaaatgtttagacgggctcacatcaccccataaacaaataggtttggtcctagcctttctattagctcttagtaagattacacatgcaagcatccccgttccagtgagttcaccctctaaatcaccacgatcaaaagggacaagcatcaagcacgcaacaatgcagctcaaaacgcttagcctagccacacccccacgggaaacagcagtgattaacctttagcaataaacgaaagtttaactaagctatactaaccccagggttggtcaatttcgtgccagccaccgcggtcacacgattaacccaagtcaatagaagccggcgtaaagagtgttttagatcaccccctccccaataaagctaaaactcacctgagttgtaaaaaactccagttgacacaaaataaactacgaaagtggctttaacatatctgaacacacaatagctaagacccaaactgggattagataccccactatgcttagccctaaacctcaacagttaaatcaacaaaactgctcgccagaacactacgagccacagcttaaaactcaaaggacctggcggtgcttcatatccctctagaggagcctgttctgtaatcgataaaccccgatcaacctcaccacctcttgctcagcctatataccgccatcttcagcaaaccctgatgaaggctacaaagtaagcgcaagtacccacgtaaagacgttaggtcaaggtgtagcccatgaggtggcaagaaatgggctacattttctaccccagaaaactacgatagcccttatgaaacttaagggtcgaaggtggatttagcagtaaactgagagtagagtgcttagttgaacagggccctgaagcgcgtacacaccgcccgtcaccctcctcaagtatacttcaaaggacatttaactaaaacccctacgcatttatatagaggagacaagtcgtaacatggtaagtgtactggaaagtgcacttggacgaaccagagtgtagcttaacacaaagcacccaacttacacttaggagatttcaacttaacttgaccgctctgagctaaacctagccccaaacccactccaccttactaccagacaaccttagccaaaccatttacccaaataaagtataggcgatagaaattgaaacctggcgcaatagatatagtaccgcaagggaaagatgaaaaattataaccaagcataatatagcaaggactaacccctataccttctgcataatgaattaactagaaataactttgcaaggagagccaaagctaagacccccgaaaccagacgagctacctaagaacagctaaaagagcacacccgtctatgtagcaaaatagtgggaagatttataggtagaggcgacaaacctaccgagcctggtgatagctggttgtccaagatagaatcttagttcaactttaaatttgcccacagaaccctctaaatccccttgtaaatttaactgttagtccaaagaggaacagctctttggacactaggaaaaaaccttgtagagagagtaaaaaatttaacacccatagtaggcctaaaagcagccaccaattaagaaagcgttcaagctcaacacccactacctaaaaaatcccaaacatataactgaactcctcacacccaattggaccaatctatcaccctatagaagaactaatgttagtataagtaacatgaaaacattctcctccgcataagcctgcgtcagattaaaacactgaactgacaattaacagcccaatatctacaatcaaccaacaagtcattattacccccactgtcaacccaacacaggcatgctcataaggaaaggttaaaaaaagtaaaaggaactcggcaaatcttaccccgcctgtttaccaaaaacatcacctctagcatcaccagtattagaggcaccgcctgcccagtgacacatgtttaacggccgcggtaccctaaccgtgcaaaggtagcataatcacttgttccttaaatagggacctgtatgaatggctccacgagggttcagctgtctcttacttttaaccagtgaaattgacctgcccgtgaagaggcgggcatgacacagcaagacgagaagaccctatggagctttaatttattaatgcaaacagtacctaacaaacccacaggtcctaaactactaaacctgcattaaaaatttcggttggggcgacctcggagcagaacccaacctccgagcagtacatgctaagacttcaccagtcaaagcgaactactatactcaattgatccaataacttgaccaacggaacaagttaccctagggataacagcgcaatcctattctagagtccatatcaacaatagggtttacgacctcgatgttggatcaggacatcccgatggtgcagccgctattaaaggttcgtttgttcaacgattaaagtcctacgtgatctgagttcagaccggagtaatccaggtcggtttctatctacnttcaaattcctccctgtacgaaaggacaagagaaataaggcctacttcacaaagcgccttcccccgtaaatgatatcatctcaacttagtattatacccacacccacccaagaacagggtttgttaagatggcagagcccggtaatcgcataaaacttaaaactttacagtcagaggttcaattcctcttcttaacaacatacccatggccaacctcctactcctcattgtacccattctaatcgcaatggcattcctaatgcttaccgaacgaaaaattctaggctatatacaactacgcaaaggccccaacgttgtaggcccctacgggctactacaacccttcgctgacgccataaaactcttcaccaaagagcccctaaaaccagccacatctaccatcaccctctacatcaccgccccgaccttagctctcaccatcgctcttctactatgaacccccctccccatacccaaccccctggttaacctcaacctaggcctcctatttattctagccacctctagcctagccgtttactcaatcctctgatcagggtgagcatcaaactcaaactacgccctgatcggcgcactgcgagcagtagcccaaacaatctcatatgaagtcaccctagccatcattctactatcaacattactaataagtggctcctttaacctctccacccttatcacaacacaagaacacctctgattactcctgccatcatgacccttggccataatatgatttatctccacactagcagagaccaaccgaacccccttcgaccttgccgaaggggagtccgaactagtctcaggcttcaacatcgaatacgccgcaggccccttcgccctattcttcatagccgaatacacaaacattattataataaacaccctcaccactacaatcttcctaggaacaacatatgacgcactctcccctgaactctacacaacatattttgtcaccaagaccctacttctgacctccctgttcttatgaattcgaacagcatacccccgattccgctacgaccaactcatacacctcctatgaaaaaacttcctaccactcaccctagcattacttatatgatatgtctccatacccattacaatctccagcattccccctcaaacctaagaaatatgtctgataaaagagttactttgatagagtaaataataggagcttaaacccccttatttctaggactatgagaatcgaacccatccctgagaatccaaaattctccgtgccacctatcacaccccatcctaaagtaaggtcagctaaataagctatcgggcccataccccgaaaatgttggttatacccttcccgtactaattaatcccctggcccaacccgtcatctactctaccatctttgcaggcacactcatcacagcgctaagctcgcactgattttttacctgagtaggcctagaaataaacatgctagcttttattccagttctaaccaaaaaaataaaccctcgttccacagaagctgccatcaagtatttcctcacgcaagcaaccgcatccataatccttctaatagctatcctcttcaacaatatactctccggacaatgaaccataaccaatactaccaatcaatactcatcattaataatcataatggctatagcaataaaactaggaatagccccctttcacttctgagtcccagaggttacccaaggcacccctctgacatccggcctgcttcttctcacatgacaaaaactagcccccatctcaatcatataccaaatctctccctcactaaacgtaagccttctcctcactctctcaatcttatccatcatagcaggcagttgaggtggattaaaccaaacccagctacgcaaaatcttagcatactcctcaattacccacataggatgaataatagcagttctaccgtacaaccctaacataaccattcttaatttaactatttatattatcctaactactaccgcattcctactactcaacttaaactccagcaccacgaccctactactatctcgcacctgaaacaagctaacatgactaacacccttaattccatccaccctcctctccctaggaggcctgcccccactaaccggctttttgcccaaatgggccattatcgaagaattcacaaaaaacaatagcctcatcatccccaccatcatagccaccatcaccctccttaacctctacttctacctacgcctaatctactccacctcaatcacactactccccatatctaacaacgtaaaaataaaatgacagtttgaacatacaaaacccaccccattcctccccacactcatcgcccttaccacgctactcctacctatctccccttttatactaataatcttatagaaatttaggttaaatacagaccaagagccttcaaagccctcagtaagttgcaatacttaatttctgtaacagctaaggactgcaaaaccccactctgcatcaactgaacgcaaatcagccactttaattaagctaagcccttactagaccaatgggacttaaacccacaaacacttagttaacagctaagcaccctaatcaactggcttcaatctacttctcccgccgccgggaaaaaaggcgggagaagccccggcaggtttgaagctgcttcttcgaatttgcaattcaatatgaaaatcacctcggagctggtaaaaagaggcctaacccctgtctttagatttacagtccaatgcttcactcagccattttacctcacccccactgatgttcgccgaccgttgactattctctacaaaccacaaagacattggaacactatacctattattcggcgcatgagctggagtcctaggcacagctctaagcctccttattcgagccgagctgggccagccaggcaaccttctaggtaacgaccacatctacaacgttatcgtcacagcccatgcatttgtaataatcttcttcatagtaatacccatcataatcggaggctttggcaactgactagttcccctaataatcggtgcccccgatatggcgtttccccgcataaacaacataagcttctgactcttacctccctctctcctactcctgctcgcatctgctatagtggaggccggagcaggaacaggttgaacagtctaccctcccttagcagggaactactcccaccctggagcctccgtagacctaaccatcttctccttacacctagcaggtgtctcctctatcttaggggccatcaatttcatcacaacaattatcaatataaaaccccctgccataacccaataccaaacgcccctcttcgtctgatccgtcctaatcacagcagtcctacttctcctatctctcccagtcctagctgctggcatcactatactactaacagaccgcaacctcaacaccaccttcttcgaccccgccggaggaggagaccccattctataccaacacctattctgatttttcggtcaccctgaagtttatattcttatcctaccaggcttcggaataatctcccatattgtaacttactactccggaaaaaaagaaccatttggatacataggtatggtctgagctatgatatcaattggcttcctagggtttatcgtgtgagcacaccatatatttacagtaggaatagacgtagacacacgagcatatttcacctccgctaccataatcatcgctatccccaccggcgtcaaagtatttagctgactcgccacactccacggaagcaatatgaaatgatctgctgcagtgctctgagccctaggattcatctttcttttcaccgtaggtggcctgactggcattgtattagcaaactcatcactagacatcgtactacacgacacgtactacgttgtagctcacttccactatgtcctatcaataggagctgtatttgccatcataggaggcttcattcactgatttcccctattctcaggctacaccctagaccaaacctacgccaaaatccatttcactatcatattcatcggcgtaaatctaaccttcttcccacaacactttctcggcctatccggaatgccccgacgttactcggactaccccgatgcatacaccacatgaaatatcctatcatctgtaggttcattcatttctctaacagcagtaatattaataattttcatgatttgagaagccttcgcttcgaagcgaaaagtcctaatagtagaagaaccctccataaacctggagtgactatatggatgccccccaccctaccacacattcgaagaacccgtatacataaaatctagacaaaaaaggaaggaatcgaaccccccaaagctggtttcaagccaaccccatggcctccatgactttttcaaaaagatattagaaaaaccatttcataactttgtcaaagttaaattataggctaaatcctatatatcttaatggcacatgcagcgcaagtaggtctacaagacgctacttcccctatcatagaagagcttatcacctttcatgatcacgccctcataatcattttccttatctgcttcctagtcctgtatgcccttttcctaacactcacaacaaaactaactaatactaacatctcagacgctcaggaaatagagaccgtctgaactatcctgcccgccatcatcctagtcctcatcgccctcccatccctacgcatcctttacataacagacgaggtcaacgatccctcccttaccatcaaatcaattggccaccaatggtactgaacctacgagtacaccgactacggcggactaatcttcaactcctacatacttcccccattattcctagaaccaggcgacctgcgactccttgacgttgacaatcgagtagtactcccgattgaagcccccattcgtataataattacatcacaagacgtcttgcactcatgagctgtccccacattaggcttaaaaacagatgcaattcccggacgtctaaaccaaaccactttcaccgctacacgaccgggggtatactacggtcaatgctctgaaatctgtggagcaaaccacagtttcatacccatcgtcctagaattaattcccctaaaaatctttgaaatagggcccgtatttaccctatagcaccccctctaccccctctagagcccactgtaaagctaacttagcattaaccttttaagttaaagattaagagaaccaacacctctttacagtgaaatgccccaactaaatactaccgtatggcccaccataattacccccatactccttacactattcctcatcacccaactaaaaatattaaacacaaactaccacctacctccctcaccaaagcccataaaaataaaaaattataacaaaccctgagaaccaaaatgaacgaaaatctattcgcttcattcattgcccccacaatcctaggcctacccgccgcagtactgatcattctatttccccctctattgatccccacctccaaatatctcatcaacaaccgactaatcaccacccaacaatgactaatcaaactaacctcaaaacaaatgatagccatacacaacactaaaggacgaacctgatctcttatactagtatccttaatcatttttattgccacaactaacctcctcggactcctacctcactcatttacaccaaccacccaactatctataaacctagccatggccatccccttatgagcgggcgcagtgattataggctttcgctctaagattaaaaatgccctagcccacttcttaccacaaggcacacctacaccccttatccccatactagttattatcgaaaccatcagcctactcattcaaccaatagccctggccgtacgcctaaccgctaacattactgcaggccacctactcatgcacctaattggaagcgccaccctagcaatatcaaccattaaccttccctctacacttatcatcttcacaattctaattctactgactatcctagaaatcgctgtcgccttaatccaagcctacgttttcacacttctagtaagcctctacctgcacgacaacacataatgacccaccaatcgcatgcctatcatatagtaaaacccagcccatgacccctaacaggggccctctcagccctcctaatgacctccggcctagccatgtgatttcacttccactccataacgctcctcatactaggcctactaaccaacacactaaccatataccaatgatggcgcgatgtaacacgagaaagcacataccaaggccaccacacaccacctgtccaaaaaggccttcgatacgggataatcctatttattacctcagaagtttttttcttcgcaggatttttctgagccttttaccactccagcctagcccctaccccccaactaggagggcactggcccccaacaggcatcaccccgctaaatcccctagaagtcccactcctaaacacatccgtattactcgcatcaggagtatcaatcacctgagctcaccatagtctaatagaaaacaaccgaaaccaaataattcaagcactgcttattacaattttactgggtctctattttaccctcctacaagcctcagagtacttcgagtcccccttcaccatttccgacggcatctacggctcaacattttttgtagccacaggcttccacggacttcacgtcattattggctcaactttcctcactatctgcttcatccgccaactaatatttcactttacatccaaacatcactttggcttcgaagccgccgcctgatactggcattttgtagatgtggtttgactatttctgtatgtctccatctattgatgagggtcttactcttttagtataaatagtaccgttaacttccaattaactagttttgacaacattcaaaaaagagtaataaacttcgccttaattttaataatcaacaccctcctagccttactactaataatcattacattttgactaccacaactcaacggctacatagaaaaatccaccccttacgagtgcggcttcgaccctatatcccccgcccgcgtccctttctccataaaattcttcttagtagctattaccttcttattatttgatctagaaattgccctccttttacccctaccatgagccctacaaacaactaacctgccactaatagttatgtcatccctcttattaatcatcatcctagccctaagtctggcctatgagtgactacaaaaaggattagactgagccgaattggtatatagtttaaacaaaacgaatgatttcgactcattaaattatgataatcatatttaccaaatgcccctcatttacataaatattatactagcatttaccatctcacttctaggaatactagtatatcgctcacacctcatatcctccctactatgcctagaaggaataatactatcgctgttcattatagctaccctcataaccctcaacacccactccctcttagccaatattgtgcctattgccatactagtctttgccgcctgcgaagcagcggtgggcctagccctactagtctcaatctccaacacatatggcctagactacgtacataacctaaacctactccaatgctaaaactaatcgtcccaacaattatattactaccactgacatgactttccaaaaaacacataatttgaatcaacacaaccacccacagcctaattattagcatcatccccctactattttttaaccaaatcaacaacaacctatttagctgttccccaaccttttcctccgaccccctaacaacccccctcctaatactaactacctgactcctacccctcacaatcatggcaagccaacgccacttatccagtgaaccactatcacgaaaaaaactctacctctctatactaatctccctacaaatctccttaattataacattcacagccacagaactaatcatattttatatcttcttcgaaaccacacttatccccaccttggctatcatcacccgatgaggcaaccagccagaacgcctgaacgcaggcacatacttcctattctacaccctagtaggctcccttcccctactcatcgcactaatttacactcacaacaccctaggctcactaaacattctactactcactctcactgcccaagaactatcaaactcctgagccaacaacttaatatgactagcttacacaatagcttttatagtaaagatacctctttacggactccacttatgactccctaaagcccatgtcgaagcccccatcgctgggtcaatagtacttgccgcagtactcttaaaactaggcggctatggtataatacgcctcacactcattctcaaccccctgacaaaacacatagcctaccccttccttgtactatccctatgaggcataattataacaagctccatctgcctacgacaaacagacctaaaatcgctcattgcatactcttcaatcagccacatagccctcgtagtaacagccattctcatccaaaccccctgaagcttcaccggcgcagtcattctcataatcgcccacggacttacatcctcattactattctgcctagcaaactcaaactacgaacgcactcacagtcgcatcataatcctctctcaaggacttcaaactctactcccactaatagctttttgatgacttctagcaagcctcgctaacctcgccttaccccccactattaacctactgggagaactctctgtgctagtaaccacattctcctgatcaaatatcactctcctactcacaggactcaacatactagtcacagccctatactccctctacatatttaccacaacacaatggggctcactcacccaccacattaacaacataaaaccctcattcacacgagaaaacaccctcatgttcatacacctatcccccattctcctcctatccctcaaccccgacatcattaccgggttttcctcttgtaaatatagtttaaccaaaacatcagattgtgaatctgacaacagaggcttacgaccccttatttaccgagaaagctcacaagaactgctaactcatgcccccatgtctaacaacatggctttctcaacttttaaaggataacagctatccattggtcttaggccccaaaaattttggtgcaactccaaataaaagtaataaccatgcacactactataaccaccctaaccctgacttccctaattccccccatccttaccaccctcgttaaccctaacaaaaaaaactcatacccccattatgtaaaatccattgtcgcatccacctttattatcagtctcttccccacaacaatattcatgtgcctagaccaagaagttattatctcgaactgacactgagccacaacccaaacaacccagctctccctaagcttcaaactagactacttctccataatattcatccctgtagcattgttcgttacatgatccatcatagaattctcactgtgatatataaactcagacccaaacattaatcagttcttcaagtatctactcattttcctaattaccatactaatcttagttaccgctaacaacctattccaactgttcatcggctgagagggcgtaggaattatatccttcttgctcatcagttgatgatacgcccgagcagatgccaacacagcagccattcaagcaatcctatacaaccgtatcggcgatatcggtttcatcctcgccttagcatgatttatcctacactccaactcatgagacccacaacaaatagcccttctaaacgctaatccaagcctcaccccactactaggcctcctcctagcagcagcaggcaaatcagcccaattaggtctccacccctgactcccctcagccatagaaggccccaccccagtctcagccctactccactcaagcactatagttgtagcaggaatcttcttactcatccgcttccaccccctagcagaaaatagcccactaatccaaactctaacactatgcttaggcgctatcaccactctgttcgcagcagtctgcgcccttacacaaaatgacatcaaaaaaatcgtagccttctccacttcaagtcaactaggactcataatagttacaatcggcatcaaccaaccacacctagcattcctgcacatctgtacccacgccttcttcaaagccatactatttatgtgctccgggtccatcatccacaaccttaacaatgaacaagatattcgaaaaataggaggactactcaaaaccatacctctcacttcaacctccctcaccattggcagcctagcattagcaggaatacctttcctcacaggtttctactccaaagaccacatcatcgaaaccgcaaacatatcatacacaaacgcctgagccctatctattactctcatcgctacctccctaacaagcgcctatagcactcgaataattcttctcaccctaacaggtcaacctcgcttccctacccttactaacattaacgaaaataaccccaccctactaaaccccattaaacgcctggcagccggaagcctattcgcaggatttctcattactaacaacatttcccccgcatcccccttccaaacaacaatccccctctacctaaaactcacggccctcgctgtcactttcctaggacttctaacagccctagacctcaactacctaaccaacaaacttaaaataaaatccccactatgcacattttatttctccaacatactcggattctaccctagcatcacacaccgcacaatcccctatctaggccttcttacgagccaaaacctgcccctactcctcctagacctaacctgactagaaaagctattacctaaaacaatttcacagcaccaaatctccacctccatcatcacctcaacccaaaaaggcataattaaactttacttcctctctttcttcttcccactcatcctaaccctactcctaatcacataacctattcccccgagcaatctcaattacaatatatacaccaacaaacaatgttcaaccagtaactactactaatcaacgcccataatcatacaaagcccccgcaccaataggatcctcccgaatcaaccctgacccctctccttcataaattattcagcttcctacactattaaagtttaccacaaccaccaccccatcatactctttcacccacagcaccaatcctacctccatcgctaaccccactaaaacactcaccaagacctcaacccctgacccccatgcctcaggatactcctcaatagccatcgctgtagtatatccaaagacaaccatcattccccctaaataaattaaaaaaactattaaacccatataacctcccccaaaattcagaataataacacacccgaccacgccgctaacaatcaatactaaacccccataaatgggagaaggcttagaagaaaaccccacaaaccccattactaaacccacactcaacagaaacaaagcatacatcattattctcgcacggactacaaccacgaccaatgatatgaaaaaccatcgttgtatttcaactacaagaacaccaatgaccccaatacgcaaaattaaccccctaataaaattaattaaccactcattcatcgacctccccaccccatccaacatctccgcatgatgaaacttcggctcactccttggcgcctgcctgatcctccaaatcaccacaggactattcctagccatgcactactcaccagacgcctcaaccgccttttcatcaatcgcccacatcactcgagacgtaaattatggctgaatcatccgctaccttcacgccaatggcgcctcaatattctttatctgcctcttcctacacatcgggcgaggcctatattacggatcatttctctactcagaaacctgaaacatcggcattatcctcctgcttgcaactatagcaacagccttcataggctatgtcctcccgtgaggccaaatatcattctgaggggccacagtaattacaaacttactatccgccatcccatacattgggacagacctagttcaatgaatctgaggaggctactcagtagacagtcccaccctcacacgattctttacctttcacttcatcttacccttcattattgcagccctagcagcactccacctcctattcttgcacgaaacgggatcaaacaaccccctaggaatcacctcccattccgataaaatcaccttccacccttactacacaatcaaagacgccctcggcttacttctcttccttctctccttaatgacattaacactattctcaccagacctcctaggcgacccagacaattataccctagccaaccccttaaacacccctccccacatcaagcccgaatgatatttcctattcgcctacacaattctccgatccgtccctaacaaactaggaggcgtccttgccctattactatccatcctcatcctagcaataatccccatcctccatatatccaaacaacaaagcataatatttcgcccactaagccaatcactttattgactcctagccgcagacctcctcattctaacctgaatcggaggacaaccagtaagctacccctttaccatcattggacaagtagcatccgtactatacttcacaacaatcctaatcctaataccaactatctccctaattgaaaacaaaatactcaaatgggcctgtccttgtagtataaactaatacaccagtcttgtaaaccggagatgaaaacctttttccaaggacaaatcagagaaaaagtctttaactccaccattagcacccaaagctaagattctaatttaaactattctctgttctttcatggggaagcagatttgggtaccacccaagtattgactcacccatcaacaaccgctatgtatttcgtacattactgccagccaccatgaatattgtacggtaccataaatacttgaccacctgtagtacataaaaacccaatccacatcaaaaccccctccccatgcttacaagcaagtacagcaatcaaccctcaactatcacacatcaactgcaactccaaagccactcctcacccactaggatatcaacaaacctacccatccttaacagtacatggtacataaagccatttaccgtacatagcacattacagtcaaatcccttctcgtccccatggatgacccccctcagataggagtcccttgaccaccatcctccgtgaaatcaatatcccgcacaagagtgctactctcctcgctccgggcccataacacttgggggtagctaaagtgaactgtatccgacatctggttcctacttcagggccataaagcctaaatagcccacacgttccccttaaataagacatcacgatg

SEQ ID NO: 423 - DNA, 16570 bp, Homo sapiens mitochondrial
  3108: "n" refers to a nucleotide at position 3107 of the Cambridge Reference Sequence (CRS, Anderson et al. 1981 Nature 290:457-465), later determined to be absent from the human mtDNA sequence according to the revised CRS (rCRS, Andrews et al. 1999 Nature Genetics 23:147); "n" therefore represents a single nucleotide deletion at a position corresponding to nucleotide 3107 of SEQ ID NO:1 as provided herein.
gatcacaggtctatcaccctattaaccactcacgggagctctccatgcatttggtattttcgtctggggggtatgcacgcgatagcattgcgagacgctggagccggagcaccctatgtcgcagtatctgtctttgattcctgcctcatcctattatttatcgcacctacgttcaatattacaggcgaacatacttactaaagtgtgttaattaattaatgcttgtaggacataataataacaattgaatgtctgcacagccgctttccacacagacatcataacaaaaaatttccaccaaaccccccctcccccgccttctggccacagcacttaaacacatctctgccaaaccccaaaaacaaagaaccctaacaccagcctaaccagatttcaaattttatcttttggcggtatgcacttttaacagtcaccccccaactaacacattattttcccctcccactcccatactactaatctcatcaatacaacccccgcccatcctacccagcacacacacaccgctgctaaccccataccccgaaccaaccaaaccccaaagacaccccccacagtttatgtagcttacctcctcaaagcaatacactgaaaatgtttagacgggctcacatcaccccataaacaaataggtttggtcctagcctttctattagctcttagtaagattacacatgcaagcatccccgttccagtgagttcaccctctaaatcaccacgatcaaaagggacaagcatcaagcacgcagcaatgcagctcaaaacgcttagcctagccacacccccacgggaaacagcagtgattaacctttagcaataaacgaaagtttaactaagctatactaaccccagggttggtcaatttcgtgccagccaccgcggtcacacgattaacccaagtcaatagaagccggcgtaaagagtgttttagatcaccccctccccaataaagctaaaactcacctgagttgtaaaaaactccagttgacacaaaatagactacgaaagtggctttaacatatctgaacacacaatagctaagacccaaactgggattagataccccactatgcttagccctaaacctcaacagttaaatcaacaaaactgctcgccagaacactacgagccacagcttaaaactcaaaggacctggcggtgcttcatatccctctagaggagcctgttctgtaatcgataaaccccgatcaacctcaccacctcttgctcagcctatataccgccatcttcagcaaaccctgatgaaggctacaaagtaagcgcaagtacccacgtaaagacgttaggtcaaggtgtagcccatgaggtggcaagaaatgggctacattttctaccccagaaaactacgatagcccttatgaaacttaagggtcgaaggtggatttagcagtaaactgagagtagagtgcttagttgaacagggccctgaagcgcgtacacaccgcccgtcaccctcctcaagtatacttcaaaggacatttaactaaaacccctacgcatttatatagaggagacaagtcgtaacatggtaagtgtactggaaagtgcacttggacgaaccagagtgtagcttaacacaaagcacccaacttacacttaggagatttcaacttaacttgaccgctctgagctaaacctagccccaaacccactccaccttactaccagacaaccttagccaaaccatttacccaaataaagtataggcgatagaaattgaaacctggcgcaatagatatagtaccgcaagggaaagatgaaaaattataaccaagcataatatagcaaggactaacccctataccttctgcataatgaattaactagaaataactttgcaaggagagccaaagctaagacccccgaaaccagacgagctacctaagaacagctaaaagagcacacccgtctatgtagcaaaatagtgggaagatttataggtagaggcgacaaacctaccgagcctggtgatagctggttgtccaagatagaatcttagttcaactttaaatttgcccacagaaccctctaaatccccttgtaaatttaactgttagtccaaagaggaacagctctttggacactaggaaaaaaccttgtagagagagtaaaaaatttaacacccatagtaggcctaaaagcagccaccaattaagaaagcgttcaagctcaacacccactacctaaaaaatcccaaacatataactgaactcctcacacccaattggaccaatctatcaccctatagaagaactaatgttagtataagtaacatgaaaacattctcctccgcataagcctgcgtcagattaaaacactgaactgacaattaacagcccaatatctacaatcaaccaacaagtcattattaccctcactgtcaacccaacacaggcatgctcataaggaaaggttaaaaaaagtaaaaggaactcggcaaatcttaccccgcctgtttaccaaaaacatcacctctagcatcaccagtattagaggcaccgcctgcccagtgacacatgtttaacggccgcggtaccctaaccgtgcaaaggtagcataatcacttgttccttaaatagggacctgtatgaatggctccacgagggttcagctgtctcttacttttaaccagtgaaattgacctgcccgtgaagaggcgggcataacacagcaagacgagaagaccctatggagctttaatttattaatgcaaacagtacctaacaaacccacaggtcctaaactaccaaacctgcattaaaaatttcggttggggcgacctcggagcagaacccaacctccgagcagtacatgctaagacttcaccagtcaaagcgaactactatactcaattgatccaataacttgaccaacggaacaagttaccctagggataacagcgcaatcctattctagagtccatatcaacaatagggtttacgacctcgatgttggatcaggacatcccaatggtgcagccgctattaaaggttcgtttgttcaacgattaaagtcctacgtgatctgagttcagaccggagtaatccaggtcggtttctatctacnttcaaattcctccctgtacgaaaggacaagagaaataaggcctacttcacaaagcgccttcccccgtaaatgatatcatctcaacttagtattatacccacacccacccaagaacagggtttgttaagatggcagagcccggtaatcgcataaaacttaaaactttacagtcagaggttcaattcctcttcttaacaacatacccatggccaacctcctactcctcattgtacccattctaatcgcaatggcattcctaatgcttaccgaacgaaaaattctaggctatatacaactacgcaaaggccccaacgttgtaggcccctacgggctactacaacccttcgctgacgccataaaactcttcaccaaagagcccctaaaacccgccacatctaccatcaccctctacatcaccgccccgaccttagctctcaccatcgctcttctactatgaacccccctccccatacccaaccccctggtcaacctcaacctaggcctcctatttattctagccacctctagcctagccgtttactcaatcctctgatcagggtgagcatcaaactcaaactacgccctgatcggcgcactgcgagcagtagcccaaacaatctcatatgaagtcaccctagccatcattctactatcaacattactaataagtggctcctttaacctctccacccttatcacaacacaagaacacctctgattactcctgccatcatgacccttggccataatatgatttatctccacactagcagagaccaaccgaacccccttcgaccttgccgaaggggagtccgaactagtctcaggcttcaacatcgaatacgccgcaggccccttcgccctattcttcatagccgaatacacaaacattattataataaacaccctcaccactacaatcttcctaggaacaacatatgacgcactctcccctgaactctacacaacatattttgtcaccaagaccctacttctaacctccctgttcttatgaattcgaacagcatacccccgattccgctacgaccaactcatacacctcctatgaaaaaacttcctaccactcaccctagcattacttatatgatatgtctccatacccattacaatctccagcattccccctcaaacctaagaaatatgtctgataaaagagttactttgatagagtaaataataggagcttaaacccccttatttctaggactatgagaatcgaacccatccctgagaatccaaaattctccgtgccacctatcacaccccatcctaaagtaaggtcagctaaataagctatcgggcccataccccgaaaatgttggttatacccttcccgtactaattaatcccctggcccaacccgtcatctactctaccatctttgcaggcacactcatcacagcgctaagctcgcactgattttttacctgagtaggcctagaaataaacatgctagcttttattccagttctaaccaaaaaaataaaccctcgttccacagaagctgccatcaagtatttcctcacgcaagcaaccgcatccataatccttctaatagctatcctcttcaacaatatactctccggacaatgaaccataaccaatactaccaatcaatactcatcattaataatcataatggctatagcaataaaactaggaatagccccctttcacttctgagtcccagaggttacccaaggcacccctctgacatccggcctgcttctcctcacatgacaaaaactagcccccatctcaatcatataccaaatctctccctcactaaacgtaagccttctcctcactctctcaatcttatccatcatagcaggcagttgaggtggattaaaccaaacccagctacgcaaaatcttagcatactcctcaattacccacataggatgaataatagcagttctaccgtacaaccctaacataaccattcttaatttaactatttatattatcctaactactaccgcattcctactactcaacttaaactccagcaccacgaccctactactatctcgcacctgaaacaagctaacatgactaacacccttaattccatccaccctcctctccctaggaggcctgcccccgctaaccggctttttgcccaaatgggccattatcgaagaattcacaaaaaacaatagcctcatcatccccaccatcatagccaccatcaccctccttaacctctacttctacctacgcctaatctactccacctcaatcacactactccccatatctaacaacgtaaaaataaaatgacagtttgaacatacaaaacccaccccattcctccccacactcatcgcccttaccacgctactcctacctatctccccttttatactaataatcttatagaaatttaggttaaatacagaccaagagccttcaaagccctcagtaagttgcaatacttaatttctgtaacagctaaggactgcaaaaccccactctgcatcaactgaacgcaaatcagccactttaattaagctaagcccttactagaccaatgggacttaaacccacaaacacttagttaacagctaagcaccctaatcaactggcttcaatctacttctcccgccgccgggaaaaaaggcgggagaagccccggcaggtttgaagctgcttcttcgaatttgcaattcaatatgaaaatcacctcggagctggtaaaaagaggcctaacccctgtctttagatttacagtccaatgcttcactcagccattttacctcacccccactgatgttcgccgaccgttgactattctctacaaaccacaaagacattggaacactatacctattattcggcgcatgagctggagtcctaggcacagctctaagcctccttattcgagccgagctgggccagccaggcaaccttctaggtaacgaccacatctacaacgttatcgtcacagcccatgcatttgtaataatcttcttcatagtaatacccatcataatcggaggctttggcaactgactagttcccctaataatcggtgcccccgatatggcgtttccccgcataaacaacataagcttctgactcttacctccctctctcctactcctgctcgcatctgctatagtggaggccggagcaggaacaggttgaacagtctaccctcccttagcagggaactactcccaccctggagcctccgtagacctaaccatcttctccttacacctagcaggtgtctcctctatcttaggggccatcaatttcatcacaacaattatcaatataaaaccccctgccataacccaataccaaacgcccctcttcgtctgatccgtcctaatcacagcagtcctacttctcctatctctcccagtcctagctgctggcatcactatactactaacagaccgcaacctcaacaccaccttcttcgaccccgccggaggaggagaccccattctataccaacacctattctgatttttcggtcaccctgaagtttatattcttatcctaccaggcttcggaataatctcccatattgtaacttactactccggaaaaaaagaaccatttggatacataggtatggtctgagctatgatatcaattggcttcctagggtttatcgtgtgagcacaccatatatttacagtaggaatagacgtagacacacgagcatatttcacctccgctaccataatcatcgctatccccaccggcgtcaaagtatttagctgactcgccacactccacggaagcaatatgaaatgatctgctgcagtgctctgagccctaggattcatctttcttttcaccgtaggtggcctgactggcattgtattagcaaactcatcactagacatcgtactacacgacacgtactacgttgtagcccacttccactatgtcctatcaataggagctgtatttgccatcataggaggcttcattcactgatttcccctattctcaggctacaccctagaccaaacctacgccaaaatccatttcactatcatattcatcggcgtaaatctaactttcttcccacaacactttctcggcctatccggaatgccccgacgttactcggactaccccgatgcatacaccacatgaaacatcctatcatctgtaggctcattcatttctctaacagcagtaatattaataattttcatgatttgagaagccttcgcttcgaagcgaaaagtcctaatagtagaagaaccctccataaacctggagtgactatatggatgccccccaccctaccacacattcgaagaacccgtatacataaaatctagacaaaaaaggaaggaatcgaaccccccaaagctggtttcaagccaaccccatggcctccatgactttttcaaaaaggtattagaaaaaccatttcataactttgtcaaagttaaattataggctaaatcctatatatcttaatggcacatgcagcgcaagtaggtctacaagacgctacttcccctatcatagaagagcttatcacctttcatgatcacgccctcataatcattttccttatctgcttcctagtcctgtatgcccttttcctaacactcacaacaaaactaactaatactaacatctcagacgctcaggaaatagaaaccgtctgaactatcctgcccgccatcatcctagtcctcatcgccctcccatccctacgcatcctttacataacagacgaggtcaacgatccctcccttaccatcaaatcaattggccaccaatggtactgaacctacgagtacaccgactacggcggactaatcttcaactcctacatacttcccccattattcctagaaccaggcgacctgcgactccttgacgttgacaatcgagtagtactcccgattgaagcccccattcgtataataattacatcacaagacgtcttgcactcatgagctgtccccacattaggcttaaaaacagatgcaattcccggacgtctaaaccaaaccactttcaccgctacacgaccgggggtatactacggtcaatgctctgaaatctgtggagcaaaccacagtttcatgcccatcgtcctagaattaattcccctaaaaatctttgaaatagggcccgtatttaccctatagcaccccctctaccccctctagagcccactgtaaagctaacttagcattaaccttttaagttaaagattaagagaaccaacacctctttacagtgaaatgccccaactaaatactaccgtatggcccaccataattacccccatactccttacactattcctcatcacccaactaaaaatattaaacacaaactaccacctacctccctcaccaaagcccataaaaataaaaaattataacaaaccctgagaaccaaaatgaacgaaaatctgttcgcttcattcattgcccccacaatcctaggcctacccgccgcagtactgatcattctatttccccctctattgatccccacctccaaatatctcatcaacaaccgactaatcaccacccaacaatgactaatcaaactaacctcaaaacaaatgataaccatacacaacactaaaggacgaacctgatctcttatactagtatccttaatcatttttattgccacaactaacctcctcggactcctgcctcactcatttacaccaaccacccaactatctataaacctagccatggccatccccttatgagcgggcgcagtgattataggctttcgctctaagattaaaaatgccctagcccacttcttaccacaaggcacacctacaccccttatccccatactagttattatcgaaaccatcagcctactcattcaaccaatagccctggccgtacgcctaaccgctaacattactgcaggccacctactcatgcacctaattggaagcgccaccctagcaatatcaaccattaaccttccctctacacttatcatcttcacaattctaattctactgactatcctagaaatcgctgtcgccttaatccaagcctacgttttcacacttctagtaagcctctacctgcacgacaacacataatgacccaccaatcacatgcctatcatatagtaaaacccagcccatgacccctaacaggggccctctcagccctcctaatgacctccggcctggccatgtgatttcacttccactccataacgctcctcatactaggcctactaaccaacacactaaccatataccaatgatggcgcgatgtaacacgagaaagcacataccaaggccaccacacaccacctgtccaaaaaggccttcgatacgggataatcctatttattacctcagaagtttttttcttcgcaggatttttctgagccttttaccactccagcctagcccctaccccccaattaggagggcactggcccccaacaggcatcaccccgctaaatcccctagaagtcccactcctaaacacatccgtattactcgcatcaggagtatcaatcacctgagctcaccatagtctaatagaaaacaaccgaaaccaaataattcaagcactgcttattacaattttactgggtctctattttaccctcctacaagcctcagagtacttcgagtctcccttcaccatttccgacggcatctacggctcaacattttttgtagccacaggcttccacggacttcacgtcattattggctcaactttcctcactatctgcttcatccgccaactaatatttcactttacatccaaacatcactttggcttcgaagccgccgcctgatactggcattttgtagatgtggtttgactatttctgtatgtctccatctattgatgagggtcttactcttttagtataaatagtaccgttaacttccaattaactagttttgacaacattcaaaaaagagtaataaacttcgccttaattttaataatcaacaccctcctagccttactactaataattattacattttgactaccacaactcaacggctacatagaaaaatccaccccttacgagtgcggcttcgaccctatatcccccgcccgcgtccctttctccataaaattcttcttagtagctattaccttcttattatttgatctagaaattgccctccttttacccctaccatgagccctacaaacaactaacctgccactaatagttatgtcatccctcttattaatcatcatcctagccctaagtctggcctatgaatgactacaaaaaggattagactgaaccgaattggtatatagtttaaacaaaacgaatgatttcgactcattaaattatgataatcatatttaccaaatgcccctcatttacataaatattatactagcatttaccatctcacttctaggaatactagtatatcgctcacacctcatatcctccctactatgcctagaaggaataatactatcgctgttcattatagctactctcataaccctcaacacccactccctcttagccaatattgtgcctattgccatactagtctttgccgcctgcgaagcagcggtgggcctagccctactagtctcaatctccaacacatatggcctagactacgtacataacctaaacctactccaatgctaaaactaatcgtcccaacaattatattactaccactgacatgactttccaaaaaacacataatttgaatcaacacaaccacccacagcctaattattagcatcatccctctactattttttaaccaaatcaacaacaacctatttagctgttccccaaccttttcctccgaccccctaacaacccccctcctaatactaactacctgactcctacccctcacaatcatggcaagccaacgccacttatccagtgaaccactatcacgaaaaaaactctacctctctatactaatctccctacaaatctccttaattataacattcacagccacagaactaatcatattttatatcttcttcgaaaccacacttatccccaccttggctatcatcacccgatgaggcaaccagccagaacgcctgaacgcaggcacatacttcctattctacaccctagtaggctcccttcccctactcatcgcactaatttacactcacaacaccctaggctcactaaacattctactactcactctcactgcccaagaactatcaaactcctgagccaacaacttaatatgactagcttacacaatagcttttatagtaaagatacctctttacggactccacttatgactccctaaagcccatgtcgaagcccccatcgctgggtcaatagtacttgccgcagtactcttaaaactaggcggctatggtataatacgcctcacactcattctcaaccccctgacaaaacacatagcctaccccttccttgtactatccctatgaggcataattataacaagctccatctgcctacgacaaacagacctaaaatcgctcattgcatactcttcaatcagccacatagccctcgtagtaacagccattctcatccaaaccccctgaagcttcaccggcgcagtcattctcataatcgcccacgggcttacatcctcattactattctgcctagcaaactcaaactacgaacgcactcacagtcgcatcataatcctctctcaaggacttcaaactctactcccactaatagctttttgatgacttctagcaagcctcgctaacctcgccttaccccccactattaacctactgggagaactctctgtgctagtaaccacgttctcctgatcaaatatcactctcctacttacaggactcaacatactagtcacagccctatactccctctacatatttaccacaacacaatggggctcactcacccaccacattaacaacataaaaccctcattcacacgagaaaacaccctcatgttcatacacctatcccccattctcctcctatccctcaaccccgacatcattaccgggttttcctcttgtaaatatagtttaaccaaaacatcagattgtgaatctgacaacagaggcttacgaccccttatttaccgagaaagctcacaagaactgctaactcatgcccccatgtctaacaacatggctttctcaacttttaaaggataacagctatccattggtcttaggccccaaaaattttggtgcaactccaaataaaagtaataaccatgcacactactataaccaccctaaccctgacttccctaattccccccatccttaccaccctcgttaaccctaacaaaaaaaactcatacccccattatgtaaaatccattgtcgcatccacctttattatcagtctcttccccacaacaatattcatgtgcctagaccaagaagttattatctcgaactgacactgagccacaacccaaacaacccagctctccctaagcttcaaactagactacttctccataatattcatccctgtagcattgttcgttacatggtccatcatagaattctcactgtgatatataaactcagacccaaacattaatcagttcttcaaatatctactcatcttcctaattaccatactaatcttagttaccgctaacaacctattccaactgttcatcggctgagagggcgtaggaattatatccttcttgctcatcagttgatgatacgcccgagcagatgccaacacagcagccattcaagcaatcctatacaaccgtatcggcgatatcggtttcatcctcgccttagcatgatttatcctacactccaactcatgagacccacaacaaatagcccttctaaacgctaatccaagcctcaccccactactaggcctcctcctagcagcagcaggcaaatcagcccaattaggtctccacccctgactcccctcagccatagaaggccccaccccagtctcagccctactccactcaagcactatagttgtagcaggaatcttcttactcatccgcttccaccccctagcagaaaatagcccactaatccaaactctaacactatgcttaggcgctatcaccactctgttcgcagcagtctgcgcccttacacaaaatgacatcaaaaaaatcgtagccttctccacttcaagtcaactaggactcataatagttacaatcggcatcaaccaaccacacctagcattcctgcacatctgtacccacgccttcttcaaagccatactatttatgtgctccgggtccatcatccacaaccttaacaatgaacaagatattcgaaaaataggaggactactcaaaaccatacctctcacttcaacctccctcaccattggcagcctagcattagcaggaatacctttcctcacaggtttctactccaaagaccacatcatcgaaaccgcaaacatatcatacacaaacgcctgagccctatctattactctcatcgctacctccctgacaagcgcctatagcactcgaataattcttctcaccctaacaggtcaacctcgcttccccacccttactaacattaacgaaaataaccccaccctactaaaccccattaaacgcctggcagccggaagcctattcgcaggatttctcattactaacaacatttcccccgcatcccccttccaaacaacaatccccctctacctaaaactcacagccctcgctgtcactttcctaggacttctaacagccctagacctcaactacctaaccaacaaacttaaaataaaatccccactatgcacattttatttctccaacatactcggattctaccctagcatcacacaccgcacaatcccctatctaggccttcttacgagccaaaacctgcccctactcctcctagacctaacctgactagaaaaactattacctaaaacaatttcacagcaccaaatctccacctccatcatcacctcaacccaaaaaggcataattaaactttacttcctctctttcttcttcccactcatcctaaccctactcctaatcacataacctattcccccgagcaatctcaattacaatatatacaccaacaaacaatgttcaaccagtaactactactaatcaacgcccataatcatacaaagcccccgcaccaataggatcctcccgaatcaaccctgacccctctccttcataaattattcagcttcctacactattaaagtttaccacaaccaccaccccatcatactctttcacccacagcaccaatcctacctccatcgctaaccccactaaaacactcaccaagacctcaacccctgacccccatgcctcaggatactcctcaatagccatcgctgtagtatatccaaagacaaccatcattccccctaaataaattaaaaaaactattaaacccatataacctcccccaaaattcagaataataacacacccgaccacaccgctaacaatcaatactaaacccccataaataggagaaggcttagaagaaaaccccacaaaccccattactaaacccacactcaacagaaacaaagcatacatcattattctcgcacggactacaaccacgaccaatgatatgaaaaaccatcgttgtatttcaactacaagaacaccaatgaccccaatacgcaaaactaaccccctaataaaattaattaaccactcattcatcgacctccccaccccatccaacatctccgcatgatgaaacttcggctcactccttggcgcctgcctgatcctccaaatcaccacaggactattcctagccatgcactactcaccagacgcctcaaccgccttttcatcaatcgcccacatcactcgagacgtaaattatggctgaatcatccgctaccttcacgccaatggcgcctcaatattctttatctgcctcttcctacacatcgggcgaggcctatattacggatcatttctctactcagaaacctgaaacatcggcattatcctcctgcttgcaactatagcaacagccttcataggctatgtcctcccgtgaggccaaatatcattctgaggggccacagtaattacaaacttactatccgccatcccatacattgggacagacctagttcaatgaatctgaggaggctactcagtagacagtcccaccctcacacgattctttacctttcacttcatcttgcccttcattattgcagccctagcagcactccacctcctattcttgcacgaaacgggatcaaacaaccccctaggaatcacctcccattccgataaaatcaccttccacccttactacacaatcaaagacgccctcggcttacttctcttccttctctccttaatgacattaacactattctcaccagacctcctaggcgacccagacaattataccctagccaaccccttaaacacccctccccacatcaagcccgaatgatatttcctattcgcctacacaattctccgatccgtccctaacaaactaggaggcgtccttgccctattactatccatcctcatcctagcaataatccccatcctccatatatccaaacaacaaagcataatatttcgcccactaagccaatcactttattgactcctagccgcagacctcctcattctaacctgaatcggaggacaaccagtaagctacccttttaccatcattggacaagtagcatccgtactatacttcacaacaatcctaatcctaataccaactatctccctaattgaaaacaaaatactcaaatgggcctgtccttgtagtataaactaatacaccagtcttgtaaaccggagatgaaaacctttttccaaggacaaatcagagaaaaagtctttaactccaccattagcacccaaagctaagattctaatttaaactattctctgttctttcatggggaagcagatttgggtaccacccaagtattgactcacccatcaacaaccgctatgtatttcgtacattactgccagccaccatgaatattgtacggtaccataaatacttgaccacctgtagtacataaaaacccaatccacatcaaaaccccgtccccatgcttacaagcaagtacagcaatcaaccctcaactatcacacatcaactgcaactccaaagccacccctcacccactaggataccaacaaacctacccacccttaacagtacatagtacataaagccatttaccgtacatagcacattacagtcaaatcccttctcgtccccatggatgacccccctcagataggggtcccttgaccaccatcctccgtgaaatcaatatcccgcacaagagtgctactctcctcgctccgggcccataacacttgggggtagctaaagtgaactgtatccgacatctggttcctacttcagggccataaagcctaaatagcccacacgttccccttaaataagacatcacgatg

SEQ ID NO: 424 - DNA, 16568 bp, Homo sapiens mitochondrial
  3106: "n" refers to a nucleotide at position 3107 of the Cambridge Reference Sequence (CRS, Anderson et al. 1981 Nature 290:457-465), later determined to be absent from the human mtDNA sequence according to the revised CRS (rCRS, Andrews et al. 1999 Nature Genetics 23:147); "n" therefore represents a single nucleotide deletion at a position corresponding to nucleotide 3107 of SEQ ID NO:1 as provided herein.
gatcacaggtctatcaccctattaaccactcacgggagctctccatgcatttggtattttcgtctggggggtatgcacgcgatagcattgcgagacgctggagccggagcaccctatgtcgcagtatctgtctttgattcctgcctcatcctattatttatcgcacctacgttcaatattacaggcgaacatacttactaaagtgtgttaattaattaatgcttgtaggacataataataacaattgaatgtctgcacagccgctttccacacagacatcataacaaaaaatttccaccaaaccccccctcccccgccttctggccacagcacttaaacacatctctgccaaaccccaaaaacaaagaaccctaacaccagcctaaccagatttcaaattttatcttttggcggtatgcacttttaacagtcaccccccaactaacacattattttcccctcccactcccatactactaatctcatcaatacaacccccgcccatcctacccagcacacacaccgctgctaaccccataccccgaaccaaccaaaccccaaagacaccccccacagtttatgtagcttacctcctcaaagcaatacactgaaaatgtttagacgggctcacatcaccccataaacaaataggtttggtcctagcctttctattagctcttagtaagattacacatgcaagcatccccgttccagtgagttcaccctctaaatcaccacgatcaaaagggacaagcatcaagcacgcagcaatgcagctcaaaacgcttagcctagccacacccccacgggaaacagcagtgattaacctttagcaataaacgaaagtttaactaagctatactaaccccagggttggtcaatttcgtgccagccaccgcggtcacacgattaacccaagtcaatagaagccggcgtaaagagtgttttagatcaccccctccccaataaagctaaaactcacctgagttgtaaaaaactccagttgacacaaaatagactacgaaagtggctttaacatatctgaacacacaatagctaagacccaaactgggattagataccccactatgcttagccctaaacctcaacagttaaatcaacaaaactgctcgccagaacactacgagccacagcttaaaactcaaaggacctggcggtgcttcatatccctctagaggagcctgttctgtaatcgataaaccccgatcaacctcaccacctcttgctcagcctatataccgccatcttcagcaaaccctgatgaaggctacaaagtaagcgcaagtacccacgtaaagacgttaggtcaaggtgtagcccatgaggtggcaagaaatgggctacattttctaccccagaaaactacgatagcccttatgaaacttaagggtcgaaggtggatttagcagtaaactgagagtagagtgcttagttgaacagggccctgaagcgcgtacacaccgcccgtcaccctcctcaagtatacttcaaaggacatttaactaaaacccctacgcatttatatagaggagacaagtcgtaacatggtaagtgtactggaaagtgcacttggacgaaccagagtgtagcttaacacaaagcacccaacttacacttaggagatttcaacttaacttgaccgctctgagctaaacctagccccaaacccactccaccttactaccagacaaccttagccaaaccatttacccaaataaagtataggcgatagaaattgaaacctggcgcaatagatatagtaccgcaagggaaagatgaaaaattataaccaagcataatatagcaaggactaacccctataccttctgcataatgaattaactagaaataactttgcaaggagagccaaagctaagacccccgaaaccagacgagctacctaagaacagctaaaagagcacacccgtctatgtagcaaaatagtgggaagatttataggtagaggcgacaaacctaccgagcctggtgatagctggttgtccaagatagaatcttagttcaactttaaatttgcccacagaaccctctaaatccccttgtaaatttaactgttagtccaaagaggaacagctctttggacactaggaaaaaaccttgtagagagagtaaaaaatttaacacccatagtaggcctaaaagcagccaccaattaagaaagcgttcaagctcaacacccactacctaaaaaatcccaaacatataactgaactcctcacacccaattggaccaatctatcaccctatagaagaactaatgttagtataagtaacatgaaaacattctcctccgcataagcctgcgtcagattaaaacactgaactgacaattaacagcccaatatctacaatcaaccaacaagtcattattaccctcactgtcaacccaacacaggcatgctcataaggaaaggttaaaaaaagtaaaaggaactcggcaaatcttaccccgcctgtttaccaaaaacatcacctctagcatcaccagtattagaggcaccgcctgcccagtgacacatgtttaacggccgcggtaccctaaccgtgcaaaggtagcataatcacttgttccttaaatagggacctgtatgaatggctccacgagggttcagctgtctcttacttttaaccagtgaaattgacctgcccgtgaagaggcgggcataacacagcaagacgagaagaccctatggagctttaatttattaatgcaaacagtacctaacaaacccacaggtcctaaactaccaaacctgcattaaaaatttcggttggggcgacctcggagcagaacccaacctccgagcagtacatgctaagacttcaccagtcaaagcgaactactatactcaattgatccaataacttgaccaacggaacaagttaccctagggataacagcgcaatcctattctagagtccatatcaacaatagggtttacgacctcgatgttggatcaggacatcccgatggtgcagccgctattaaaggttcgtttgttcaacgattaaagtcctacgtgatctgagttcagaccggagtaatccaggtcggtttctatctacnttcaaattcctccctgtacgaaaggacaagagaaataaggcctacttcacaaagcgccttcccccgtaaatgatatcatctcaacttagtattatacccacacccacccaagaacagggtttgttaagatggcagagcccggtaatcgcataaaacttaaaactttacagtcagaggttcaattcctcttcttaacaacatacccatggccaacctcctactcctcattgtacccattctaatcgcaatggcattcctaatgcttaccgaacgaaaaattctaggctatatacaactacgcaaaggccccaacgttgtaggcccctacgggctactacaacccttcgctgacgccataaaactcttcaccaaagagcccctaaaacccgccacatctaccatcaccctctacatcaccgccccgaccttagctctcaccatcgctcttctactatgaacccccctccccatacccaaccccctggtcaacctcaacctaggcctcctatttattctagccacctctagcctagccgtttactcaatcctctgatcagggtgagcatcaaactcaaactacgccctgatcggcgcactgcgagcagtagcccaaacaatctcatatgaagtcaccctagccatcattctactatcaacattactaataagtggctcctttaacctctccacccttatcacaacacaagaacacctctgattactcctgccatcatgacccttggccataatatgatttatctccacactagcagagaccaaccgaacccccttcgaccttgccgaaggggagtccgaactagtctcaggcttcaacatcgaatacgccgcaggccccttcgccctattcttcatagccgaatacataaacattattataataaacaccctcaccactgcaatcttcctaggaacaacatatgacgcactctcccctgaactctacacaacatattttgtcaccaagaccctacttctaacctccctgttcttatgaattcgaacagcatacccccgattccgctacgaccaactcatacacctcctatgaaaaaacttcctaccactcaccctagcattacttatatgatatgtctccatacccattacaatctccagcattccccctcaaacctaagaaatatgtctgataaaagagttactttgatagagtaaataataggagcttaaacccccttatttctaggactatgagaatcgaacccatccctgagaatccaaaattctccgtgccacctatcacaccccatcctaaagtaaggtcagctaaataagctatcgggcccataccccgaaaatgttggttatacccttcccgtactaattaatcccctggcccaacccgtcatctactctaccatctttgcaggcacactcatcacagcgctaagctcgcactgattttttacctgagtaggcctagaaataaacatgctagcttttattccagttctaaccaaaaaaataaaccctcgttccacagaagctgccatcaagtatttcctcacgcaagcaaccgcatccataatccttctaatagctatcctcttcaacaatatactctccggacaatgaaccataaccaatactaccaatcaatactcatcattaataatcataatggctatagcaataaaactaggaatagccccctttcacttctgagtcccagaggttacccaaggcacccctctgacatccggcctgcttcttctcacatgacaaaaactagcccccatctcaatcatataccaaatctctccctcactaaacgtaagccttctcctcactctctcaatcttatccatcatagcaggcagttgaggtggattaaaccaaacccagctacgcaaaatcctagcatactcctcaattacccacataggatgaataatagcagttctaccgtacaaccctaacataaccattcttaatttaactatttatattatcctaactactaccgcattcctactactcaacttaaactccagcaccacgaccctactactatctcgcacctgaaacaagctaacatgactaacacccttaattccatccaccctcctctccctaggaggcctgcccccgctaaccggctttttgcccaaatgggccattatcgaagaattcacaaaaaacaatagcctcatcatccccaccatcatagccaccatcaccctccttaacctctacttctacctacgcctaatctactccacctcaatcacactactccccatatctaacaacgtaaaaataaaatgacagtttgaacatacaaaacccaccccattcctccccacactcatcgcccttaccacgctactcctacctatctccccttttatactaataatcttatagaaatttaggttaaatacagaccaagagccttcaaagccctcagtaagttgcaatacttaatttctgtaacagctaaggactgcaaaaccccactctgcatcaactgaacgcaaatcagccactttaattaagctaagcccttactagaccaatgggacttaaacccacaaacacttagttaacagctaagcaccctaatcaactggcttcaatctacttctcccgccgccgggaaaaaaggcgggagaagccccggcaggtttgaagctgcttcttcgaatttgcaattcaatatgaaaatcacctcggagctggtaaaaagaggcctaacccctgtctttagatttacagtccaatgcttcactcagccattttacctcacccccactgatgttcgccgaccgttgactattctctacaaaccacaaagacattggaacactatacctattattcggcgcatgagctggagtcctaggcacagctctaagcctccttattcgagccgagctgggccagccaggcaaccttctaggtaacgaccacatctacaacgttatcgtcacagcccatgcatttgtaataatcttcttcatagtaatacccatcataatcggaggctttggcaactgactagttcccctaataatcggtgcccccgatatggcgtttccccgcataaacaacataagcttctgactcttacctccctctctcctactcctgctcgcatctgctatagtggaggccggagcaggaacaggttgaacagtctaccctcccttagcagggaactactcccaccctggagcctccgtagacctaaccatcttctccttacacctagcaggtgtctcctctatcttaggggccatcaatttcatcacaacaattatcaatataaaaccccctgccataacccaataccaaacgcccctcttcgtctgatccgtcctaatcacagcagtcctacttctcctatctctcccagtcctagctgctggcatcactatactactaacagaccgcaacctcaacaccaccttcttcgaccccgccggaggaggagaccccattctataccaacacctattctgatttttcggtcaccctgaagtttatattcttatcctaccaggcttcggaataatctcccatattgtaacttactactccggaaaaaaagaaccatttggatacataggtatggtctgagctatgatatcaattggcttcctagggtttatcgtgtgagcacaccatatatttacagtaggaatagacgtagacacacgagcatatttcacctccgctaccataatcatcgctattcccaccggcgtcaaagtatttagctgactcgccacactccacggaagcaatatgaaatgatctgctgcagtgctctgagccctaggattcatctttcttttcaccgtaggtggcctgactggcattgtattagcaaactcatcactagacatcgtactacacgacacgtactacgttgtagcccacttccactatgtcctatcaataggagctgtatttgccatcataggaggcttcattcactgatttcccctattctcaggctacaccctagaccaaacctacgccaaaatccatttcactatcatattcatcggcgtaaatctaactttcttcccacaacactttctcggcctatccggaatgccccgacgttactcggactaccccgatgcatacaccacatgaaacatcctatcatctgtaggctcattcatttctctaacagcagtaatattaataattttcatgatttgagaagccttcgcttcgaagcgaaaagtcctaatagtagaagaaccctccataaacctggagtgactatatggatgccccccaccctaccacacattcgaagaacccgtatacataaaatctagacaaaaaaggaaggaatcgaaccccccaaagctggtttcaagccaaccccatggcctccatgactttttcaaaaaggtattagaaaaaccatttcataactttgtcaaagttaaattataggctaaatcctatataccttaatggcacatgcagcgcaagtaggtctacaagacgctacttcccctatcatagaagagcttatcacctttcatgatcacgccctcataatcattttccttatctgcttcctagtcctgtatgcccttttcctaacactcacaacaaaactaactaatactaacatctcagacgctcaggaaatagaaaccgtctgaactatcctgcccgccatcatcctagtcctcatcgccctcccatccctacgcatcctttacataacagacgaggtcaacgatccctcccttaccatcaaatcaattggccaccaatggtactgaacctacgagtacaccgactacggcggactaatcttcaactcctacatacttcccccattattcctagaaccaggcgacctgcgactccttgacgttgacaatcgagtagtactcccgattgaagcccccattcgtataataattacatcacaagacgtcttgcactcatgagctgtccccacattaggcttaaaaacagatgcaattcccggacgtctaaaccaaaccactttcaccgctacacgaccgggggtatactacggtcaatgctctgaaatctgtggagcaaaccacagtttcatgcccatcgtcctagaattaattcccctaaaaatctttgaaatagggcccgtatttaccctatagcaccccctctaccccctctagagcccactgtaaagctaacttagcattaaccttttaagttaaagattaagagaaccaacacctctttacagtgaaatgccccaactaaatactaccgtatggcccaccataattacccccatactccttacactattcctcatcacccaactaaaaatattaaacacaaactaccacctacctccctcaccaaagcccataaaaataaaaaattataacaaaccctgagaaccaaaatgaacgaaaatctgttcgcttcattcattgcccccacaatcctaggcctacccgccgcagtactgatcattctatttccccctctattgatccccacctccaaatatctcatcaacaaccgactaatcaccacccaacaatgactaatcaaactaacctcaaaacaaatgataaccatacacaacactaaaggacgaacctgatctcttatactagtatccttaatcatttttattgccacaactaacctcctcggactcctgcctcactcatttacaccaaccacccaactatctataaacctagccatggccatccccttatgagcgggcgcagtgattataggctttcgctctaagattaaaaatgccctagcccacttcttaccacaaggcacacctacaccccttatccccatactagttattatcgaaaccatcagcctactcattcaaccaatagccctggccgtacgcctaaccgctaacattactgcaggccacctactcatgcacctaattggaagcgccaccctagcaatatcaaccattaaccttccctctacacttatcatcttcgcaattctaattctactaactatcctagaaatcgctgtcgccttaatccaagcctacgttttcacacttctagtaagcctctacctgcacgacaacacataatgacccaccaatcacatgcctatcatatagtaaaacccagcccatgacccctaacaggggccctctcagccctcctaatgacctccggcctagccatgtgatttcacttccactccataacgctcctcatactaggcctactaaccaacacactaaccatataccaatgatggcgcgatgtaacacgagaaagcacataccaaggccaccacacaccacctgtccaaaaaggccttcgatacgggataatcctatttattacctcagaagtttttttcttcgcaggatttttctgagccttttaccactccagcctagcccctaccccccaattaggagggcactggcccccaacaggcatcaccccgctaaatcccctagaagtcccactcctaaacacatccgtattactcgcatcaggagtatcaatcacctgagctcaccatagtctaatagaaaacaaccgaaaccaaataattcaagcactgcttattacaattttactgggtctctattttaccctcctacaagcctcagagtacttcgagtctcccttcaccatttccgacggcatctacggctcaacattttttgtagccacaggcttccacggacttcacgtcattattggctcaactttcctcactatctgcttcatccgccaactaatatttcactttacatccaaacatcactttggcttcgaagccgccgcctgatactggcattttgtagatgtggtttgactatttctgtatgtctccatctattgatgagggtcttactcttttagtataaatagtaccgttaacttccaattaactagttttgacaacattcaaaaaagagtaataaacttcgccttaattttaataatcaacaccctcctagccttactactaataattattacattttgactaccacaactcaacggctacatagaaaaatccaccccttacgagtgcggcttcgaccctatatcccccgcccgcgtccctttctccataaaattcttcttagtagctattaccttcttattatttgatctagaaattgccctccttttacccctaccatgagccctacaaacaactaacctgccactaatagttatgtcatccctcttattaatcatcatcctagccctaagtctggcctatgagtgactacaaaaaggattagactgaaccgaattggtatatagtttaaacaaaacgaatgatttcgactcattaaattatgataatcatatttaccaaatgcccctcatttacataaatattatactagcatttaccatctcacttctaggaatactagtatatcgctcacacctcatatcctccctactatgcctagaaggaataatactatcgctgttcattatagctactctcataaccctcaacacccactccctcttagccaatattgtgcctattgccatactagtctttgccgcctgcgaagcagcggtgggcctagccctactagtctcaatctccaacacatatggcctagactacgtacataacctaaacctactccaatgctaaaactaatcgtcccaacaattatattactaccactgacatgactttccaaaaaacacataatttgaatcaacacaaccacccacagcctaattattagcatcatccctctactattttttaaccaaatcaacaacaacctatttagctgttccccaaccttttcctccgaccccctaacaacccccctcctaatactaactacctgactcctacccctcacaatcatggcaagccaacgccacttatccagtgaaccactatcacgaaaaaaactctacctctctatactaatctccctacaaatctccttaattataacattcacagccacagaactaatcatattttatatcttcttcgaaaccacacttatccccaccttggctatcatcacccgatgaggcaaccagccagaacgcctgaacgcaggcacatacttcctattctacaccctagtaggctcccttcccctactcatcgcactaatttacactcacaacaccctaggctcactaaacattctactactcactctcactgcccaagaactatcaaactcctgagccaacaacttaatatgactagcttacacaatagcttttatagtaaagatacctctttacggactccacttatgactccctaaagcccatgtcgaagcccccatcgctgggtcaatagtacttgccgcagtactcttaaaactaggcggctatggtataatacgcctcacactcattctcaaccccctgacaaaacacatagcctaccccttccttgtactatccctatgaggcataattataacaagctccatctgcctacgacaaacagacctaaaatcgctcattgcatactcttcaatcagccacatagccctcgtagtaacagccattctcatccaaaccccctgaagcttcaccggcgcagtcattctcataatcgcccacgggcttacatcctcattactattctgcctagcaaactcaaactacgaacgcactcacagtcgcatcataatcctctctcaaggacttcaaactctactcccactaatagctttttgatgacttctagcaagcctcgctaacctcgccttaccccccactattaacctactgggagaactctctgtgctagtaaccacgttctcctgatcaaatatcactctcctacttacaggactcaacatactagtcacagccctatactccctctacatatttaccacaacacaatggggctcactcacccaccacattaacaacataaaaccctcattcacacgagaaaacaccctcatgttcatacacctatcccccattctcctcctatccctcaaccccgacatcattaccgggttttcctcttgtaaatatagtttaaccaaaacatcagattgtgaatctgacaacagaggcttacgaccccttatttaccgagaaagctcacaagaactgctaactcatgcccccatgtctaacaacatggctttctcaacttttaaaggataacagctatccattggtcttaggccccaaaaattttggtgcaactccaaataaaagtaataaccatgcacactactataaccaccctaaccctgacttccctaattccccccatccttaccaccctcgttaaccctaacaaaaaaaactcatacccccattatgtaaaatccattgtcgcatccacctttattatcagtctcttccccacaacaatattcatgtgcctagaccaagaagttattatctcgaactgacactgagccacaacccaaacaacccagctctccctaagcttcaaactagactacttctccataatattcatccctgtagcattgttcgttacatggtccatcatagaattctcactgtgatatataaactcagacccaaacattaatcagttcttcaaatatctactcatcttcctaattaccatactaatcttagttaccgctaacaacctattccaactgttcatcggctgagagggcgtaggaattatatccttcttgctcatcagttgatgatacgcccgagcagatgccaacacagcagccattcaagcaatcctatacaaccgtatcggcgatatcggtttcatcctcgccttagcatgatttatcctacactccaactcatgagacccacaacaaatagcccttctaaacgctaatccaagcctcaccccactactaggcctcctcctagcagcagcaggcaaatcagcccaattaggtctccacccctgactcccctcagccatagaaggccccaccccagtctcagccctactccactcaagcactatagttgtagcaggaatcttcttactcatccgcttccaccccctagcagaaaatagcccactaatccaaactctaacactatgcttaggcgctatcaccactctgttcgcagcagtctgcgcccttacacaaaatgacatcaaaaaaatcgtagccttctccacttcaagtcaactaggactcataatagttacaatcggcatcaaccaaccacacctagcattcctgcacatctgtacccacgccttcttcaaagccatactatttatgtgctccgggtccatcatccacaaccttaacaatgaacaagatattcgaaaaataggaggactactcaaaaccatacctctcacttcaacctccctcaccattggcagcctagcattagcaggaatacctttcctcacaggtttctactccaaagaccacatcatcgaaaccgcaaacatatcatacacaaacgcctgagccctatctattactctcatcgctacctccctgacaagcgcctatagcactcgaataattcttctcaccctaacaggtcaacctcgcttccccacccttactaacattaacgaaaataaccccaccctactaaaccccattaaacgcctggcagccggaagcctattcgcaggatttctcattactaacaacatttcccccgcatcccccttccaaacaacaatccccctctacctaaaactcacagccctcgctgtcactttcctaggacttctaacagccctagacctcaactacctaaccaacaaacttaaaataaaatccccactatgcacattttatttctccaacatactcggattctaccctagcatcacacaccgcacaatcccctatctaggccttcttacgagccaaaacctgcccctactcctcctagacctaacctgactagaaaagctattacctaaaacaatttcacagcaccaaatctccacctccatcatcacctcaacccaaaaaggcataattaaactttacttcctctctttcttcttcccactcatcctaaccctactcctaatcacataacctattcccccgagcaatctcaattacaatatatacaccaacaaacaatgttcaaccagtaactactactaatcaacgcccataatcatacaaagcccccgcaccaataggatcctcccgaatcaaccctgacccctctccttcataaattattcagcttcctacactattaaagtttaccacaaccaccaccccatcatactctttcacccacagtaccaatcctacctccatcgctaaccccactaaaacactcaccaagacctcaacccctgacccccatgcctcaggatactcctcaatagccatcgctgtagtatatccaaagacaaccatcattccccctaaataaattaaaaaaactattaaacccatataacctcccccaaaattcagaataataacacacccgaccacaccgctaacaatcaatgctaaacccccataaataggagaaggcttagaagaaaaccccacaaaccccattactaaacccacactcaacagaaacaaagcatacatcattattctcgcacggactacaaccacgaccaatgatatgaaaaaccatcgttgtatttcaactacaagaacaccaatgaccccaatacgcaaaactaaccccctaataaaattaattaaccactcattcatcgacctccccaccccatccaacatctccgcatgatgaaacttcggctcactccttggcgcctgcctgatcctccaaatcaccacaggactattcctagccatgcactactcaccagacgcctcaaccgccttttcatcaatcgcccacatcactcgagacgtaaattatggctgaatcatccgctaccttcacgccaatggcgcctcaatattctttatctgcctcttcctacacatcgggcgaggcctatattacggatcatttctctactcagaaacctgaaacatcggcattatcctcctgcttgcaactatagcaacagccttcataggctatgtcctcccgtgaggccaaatatcattctgaggggccacagtaattacaaacttactatccgccatcccatacattgggacagacctagttcaatgaatctgaggaggctactcagtagacagtcccaccctcacacgattctttacctttcacttcatcttgcccttcattattgcagccctagcagcactccacctcctattcttgcacgaaacgggatcaaacaaccccctaggaatcacctcccattccgataaaatcaccttccacccttactacacaatcaaagacgccctcggcttacttctcttccttctctccttaatgacattaacactattctcaccagacctcctaagcgacccagacaattataccctagccaaccccttaaacacccctccccacatcaagcccgaatgatatttcctattcgcctacacaattctccgatccgtccctaacaaactaggaggcgtccttgccctattactatccatcctcatcctagcaataatccccatcctccatatatccaaacaacaaagcataatatttcgcccactaagccaatcactttattgactcctagccgcagacctcctcattctaacctgaatcggaggacaaccagtaagctacccttttaccatcattggacaagtagcatccgtactatacttcacaacaatcctaatcctaataccaactatctccctaattgaaaacaaaatactcaaatgggcctgtccttgtagtataaactaatacaccagtcttgtaaaccggaaatgaaaacctttttccaaggacaaatcagagaaaaagtctttaactccaccattagcacccaaagctaagattctaatttaaactattctctgttctttcatggggaagcagatttgggtaccacccaagtattgactcacccatcaacaaccgctatgtatttcgtacattactgccagccaccatgaatattgtacggtaccataaatacttgaccacctgtagtacataaaaacccaatccacatcaaaaccccctccccatgcttacaagcaagtacagcaatcaaccctcaactatcacacatcaactgcaactccaaagccacccctcacccactaggataccaacaaacctacccacccttaacagtacatagtacataaagccatttaccgtacatagcacattacagtcaaatcccttctcgtccccatggatgacccccctcagataggggtcccttgaccaccatcctccgtgaaatcaatatcccgcacaagagtgctactctcctcgctccgggcccataacacttgggggtagctaaagtgaactgtatccgacatctggttcctacttcagggtcataaagcctaaatagcccacacgttccccttaaataagacatcacgatg

SEQ ID NO: 425 - DNA, 16571 bp, Homo sapiens mitochondrial
  3109: "n" refers to a nucleotide at position 3107 of the Cambridge Reference Sequence (CRS, Anderson et al. 1981 Nature 290:457-465), later determined to be absent from the human mtDNA sequence according to the revised CRS (rCRS, Andrews et al. 1999 Nature Genetics 23:147); "n" therefore represents a single nucleotide deletion at a position corresponding to nucleotide 3107 of SEQ ID NO:1 as provided herein.
gatcacaggtctatcaccctattaaccactcacgggagctctccatgcatttggtattttcgtctggggggtgtgcacgcgatagcattgcgagacgctggagccggagcaccctatgtcgcagtatctgtctttgattcctgcctcatcctattatttatcgcacctacgttcaatattacaggcgagcatatctactaaagcgtattaattaattaatgcttgtaggacataataataacaattgaatgtctgcacagccgctttccacacagacatcataacaaaaaatttccaccaaaccccccctcccccccgcttctggccacagcacttaaacacatctctgccaaaccccaaaaacaaagaaccctaacaccagcctaaccagatttcaaattttatcttttggcggtatgcacttttaacagtcaccccccaactaacacattattttcccctcccactcccatactactaatctcatcaatacaacccccgcccatcctacccagcacacacacaccgctgctaaccccataccccgaaccaaccaaaccccaaagacaccccccacagtttatgtagcttacctcctcaaagcaatacactgaaaatgtttagacgggctcacatcaccccataaacaaataggtttggtcctagcctttctattagctcttagtaagattacacatgcaagcatccccattccagtgagttcaccctctaaatcaccacgatcaaaagggacaagcatcaagcacgcagcaatgcagctcaaaacgcttagcctagccacacccccacgggaaacagcagtgattaacctttagcaataaacgaaagtttaactaagctatactaaccccagggttggtcaatttcgtgccagccaccgcggtcacacgattaacccaagtcaatagaagccggcgtaaagagtgttttagatcaccccctccccaataaagctaaaactcacctgagttgtaaaaaactccagttgacacaaaatagactacgaaagtggctttaacatatctgaacacacaatagctaagacccaaactgggattagataccccactatgcttagccctaaacctcaacagttaaatcaacaaaactgctcgccagaacactacgagccacagcttaaaactcaaaggacctggcggtgcttcatatccctctagaggagcctgttctgtaatcgataaaccccgatcaacctcaccaccccttgctcagcctatataccgccatcttcagcaaaccctgatgaaggctacaaagtaagcgcaagtacccacgtaaagacgttaggtcaaggtgtagcccatgaggtggcaagaaatgggctacattttctaccccagaaaactacgatagcccttatgaaacctaagggtcgaaggtggatttagcagtaaactgagagtagagtgcttagttgaacagggccctgaagcgcgtacacaccgcccgtcaccctcctcaagtatacttcaaaggacatttaactaaaacccctacgcatttatatagaggagacaagtcgtaacatggtaagtgtactggaaagtgcacttggacgaaccagagtgtagcttaacacaaagcacccaacttacacttaggagatttcaacttaacttgaccgctctgagctaaacctagccccaaacccactccaccttactaccagacaaccttagccaaaccatttacccaaataaagtataggcgatagaaattgaaacctggcgcaatagatatagtaccgcaagggaaagatgaaaaattataaccaagcataatatagcaaggactaacccctataccttctgcataatgaattaactagaaataactttgcaaggagagccaaagctaagacccccgaaaccagacgagctacctaagaacagctaaaagagcacacccgtctatgtagcaaaatagtgggaagatttataggtagaggcgacaaacctaccgagcctggtgatagctggttgtccaagatagaatcttagttcaactttaaatttgcccacagaaccctctaaatccccttgtaaatttaactgttagtccaaagaggaacagctctttggacactaggaaaaaaccttgtagagagagtaaaaaatttaacacccatagtaggcctaaaagcagccaccaattaagaaagcgttcaagctcaacacccactacctaaaaaatcccaaacatataactgaactcctcacacccaattggaccaatctatcaccctatagaagaactaatgttagtataagtaacatgaaaacattctcctccgcataagcctgcgtcagattaaaacactgaactgacaattaacagcccaatatctacaatcaaccaacaagtcattattaccctcactgtcaacccaacacaggcatgctcataaggaaaggttaaaaaaagtaaaaggaactcggcaaatcttaccccgcctgtttaccaaaaacatcacctctagcatcaccagtattagaggcaccgcctgcccagtgacacatgtttaacggccgcggtaccctaaccgtgcaaaggtagcataatcacttgttccttaaatagggacctgtatgaatggctccacgagggttcagctgtctcttacttttaaccagtgaaattgacctgcccgtgaagaggcgggcatgacacagcaagacgagaagaccctatggagctttaatttattaatgcaaacagtacctaacaaacccacaggtcctaaactaccaaacctgcattaaaaatttcggttggggcgacctcggagcagaacccaacctccgagcagtacatgctaagacttcaccagtcaaagcgaactactatactcaattgatccaataacttgaccaacggaacaagttaccctagggataacagcgcaatcctattctagagtccatatcaacaatagggtttacgacctcgatgttggatcaggacatcccgatggtgcagccgctattaaaggttcgtttgttcaacgattaaagtcctacgtgatctgagttcagaccggagtaatccaggtcggtttctatctacnttcaaattcctccctgtacgaaaggacaagagaaataaggcctacttcacaaagcgccttcccccgtaaatgatatcatctcaacttagtattatacccacacccacccaagaacagggtttgttaagatggcagagcccggtaatcgcataaaacttaaaactttacagtcagaggttcaattcctcttcttaacaacatacccatggccaacctcctactcctcattgtacccattctaatcgcaatggcattcctaatgcttaccgaacgaaaaattctaggctatatacaactacgcaaaggccccaacgttgtaggcccctacgggctactacaacccttcgctgacgccataaaactcttcaccaaagagcccctaaaacccgccacatctgccatcaccctctacatcaccgccccgaccttagctctcaccatcgctcttctactatgaacccccctccccatacccaaccccctggtcaacctcaacctaggcctcctatttattctagccacctctagcctagccgtttactcaatcctctgatcagggtgagcatcaaactcaaactacgccctgatcggcgcactgcgagcagtagcccaaacaatctcatatgaagtcaccctagccatcattctactatcaacattactaataagtggctcctttaacctctccacccttatcacaacacaagaacacctctgattactcctgccatcatgacccttggccataatatgatttatctccacactagcagagaccaaccgaacccccttcgaccttgccgaaggggagtccgaactagtctcaggcttcaacatcgaatacgccgcaggccccttcgccctattcttcatagccgaatacacaaacattattataataaacaccctcaccactacaatcttcctaggaacaacatatgacgcactctcccctgaactctacacaacatattttgtcaccaagaccctacttctaacctccctgttcttatgaattcgaacagcatacccccgattccgctacgaccaactcatacacctcctatgaaaaaacttcctaccactcaccctagcattacttatatgatatgtctccatacccattacaatctccagcattccccctcaaacctaagaaatatgtctgataaaagagttactttgatagagtaaataataggagcttaaacccccttatttctaggactatgagaatcgaacccatccctgagaatccaaaattctccgtgccacctatcacaccccatcctaaagtaaggtcagctaaataagctatcgggcccataccccgaaaatgttggttatacccttcccgtactaattaatcccctggcccaacccgtcatctactctaccatctttgcaggcacactcatcacagcgctaagctcgcactgattttttacctgagtaggcctagaaataaacatgctagcttttattccagttctaaccaaaaaaataaaccctcgttccacagaagctgccatcaagtatttcctcacgcaagcaaccgcatccataatccttctaatagctatcctcttcaacaatatactctccggacaatgaaccataaccaatactaccaatcaatactcatcattaataatcataatggctatagcaataaaactaggaatagccccctttcacttctgagtcccagaggttacccaaggcacccctctgacatccggcctgcttcttctcacatgacaaaaactagcccccatctcaatcatataccaaatctctccctcactaaacgtaagccttctcctcactctctcaatcttatccatcatagcaggcagttgaggtggattaaaccaaacccagctacgcaaaatcttagcatactcctcaattacccacataggatgaataatagcaattctaccgtacaaccctaacataaccattcttaatttaactatttatattatcctaactactaccgcattcctactactcaacttaaactccagcaccacgaccctactactatctcgcacctgaaacaagctaacatgactaacacccttaattccatccaccctcctctccctaggaggcctgcccccgctaaccggctttttgcccaaatgggccattatcgaagaattcacaaaaaacaatagcctcatcatccccaccatcatagccaccatcaccctccttaacctctacttctacctacgcctaatctactccacctcaatcacactactccccatatctaacaacgtaaaaataaaatgacagtttgaacatacaaaacccaccccattcctccccacactcatcacccttaccacgctactcctacctatctccccttttatactaataatcttatagaaatttaggttaaatacagaccaagagccttcaaagccctcagtaagttgcaatacttaatttctgtaacagctaaggactgcaaaaccccactctgcatcaactgaacgcaaatcagccactttaattaagctaagcccttactagaccaatgggacttaaacccacaaacacttagttaacagctaagcaccctaatcaactggcttcaatctacttctcccgccgccgggaaaaaaggcgggagaagccccggcaggtttgaagctgcttcttcgaatttgcaattcaatatgaaaatcacctcggagctggtaaaaagaggcctaacccctgtctttagatttacagtccaatgcttcactcagccattttacctcacccccactgatgttcgccgaccgttgactattctctacaaaccacaaagacattggaacactatacctattattcggcgcatgagctggagtcctaggcacagctctaagcctccttattcgagccgagctgggccagccaggcaaccttctaggtaacgaccacatctacaacgttatcgtcacagcccatgcatttgtaataatcttcttcatagtaatacccatcataatcggaggctttggcaactgactagttcccctaataatcggtgcccccgatatggcgtttccccgcataaacaacataagcttctgactcttacctccctctctcctactcctgctcgcatctgctatagtggaggccggagcaggaacaggttgaacagtctaccctcccttagcagggaactactcccaccctggagcctccgtagacctaaccatcttctccttacacctagcaggtgtctcctctatcttaggggccatcaatttcatcacaacaattatcaatataaaaccccctgccataacccaataccaaacgcccctcttcgtctgatccgtcctaatcacagcagtcctacttctcctatctctcccagtcctagctgctggcatcactatactactaacagaccgcaacctcaacaccaccttcttcgaccccgccggaggaggagaccccattctataccaacacctattctgatttttcggtcaccctgaagtttatattcttatcctaccaggcttcggaataatctcccatattgtaacttactactccggaaaaaaagaaccatttggatacataggtatggtctgagctatgatatcaattggcttcctagggtttatcgtgtgagcacaccatatatttacagtaggaatagacgtagacacacgagcatatttcacctccgctaccataatcatcgctatccccaccggcgtcaaagtatttagctgactcgccacactccacggaagcaatatgaaatgatctgctgcagtgctctgagccctaggattcatctttcttttcaccgtaggtggcctgactggcattgtattagcaaactcatcactagacatcgtactacacgacacgtactacgttgtagctcacttccactatgtcctatcaataggagctgtatttgccatcataggaggcttcattcactgatttcccctattctcaggctacaccctagaccaaacctacgccaaaatccatttcactatcatattcatcggcgtaaatctaactttcttcccacaacactttctcggcctatccggaatgccccgacgttactcggactaccccgatgcatacaccacatgaaacatcctatcatctgtaggctcattcatttctctaacagcagtaatattaataattttcatgatttgagaagccttcgcttcgaagcgaaaagtcctaatagtagaagaaccctccataaacctggagtgactatatggatgccccccaccctaccacacattcgaagaacccgtatacataaaatctagacaaaaaaggaaggaatcgaaccccccaaagctggtttcaagccaaccccatggcctccatgactttttcaaaaaggtattagaaaaaccatttcataactttgtcaaagttaaattataggctaaatcctatatatcttaatggcacatgcagcgcaagtaggtctacaagacgctacttcccctatcatagaagagcttatcacctttcatgatcacgccctcataatcattttccttatctgcttcctagtcctgtatgcccttttcctaacactcacaacaaaactaactaatactaacatctcagacgctcaggaaatagaaaccgtctgaactatcctgcccgccatcatcctagtcctcatcgccctcccatccctacgcatcctttacataacagacgaggtcaacgatccctcccttaccatcaaatcaattggccaccaatggtactgaacctacgagtacaccgactacggcggactaatcttcaactcctacatacttcccccattattcctagaaccaggcgacctgcgactccttgacgttgacaatcgagtagtactcccgattgaagcccccattcgtataataattacatcacaagacgtcttgcactcatgagctgtccccacattaggcttaaaaacagatgcaattcccggacgtctaaaccaaaccactttcaccgctacacgaccgggggtatactacggtcaatgctctgaaatctgtggagcaaaccacagtttcatgcccatcgtcctagaattaattcccctaaaaatctttgaaataggacccgtatttaccctatagcaccccctctaccccctctagagcccactgtaaagctaacttagcattaaccttttaagttaaagattaagagaaccaacacctctttacagtgaaatgccccaactaaatactaccgtatggcccaccataattacccccatactccttacactattcctcatcacccaactaaaaatattaaacacaaactaccacctacctccctcaccaaagcccataaaaataaaaaattataacaaaccctgagaaccaaaatgaacgaaaatctgttcgcttcattcattgcccccacaatcctaggcctacccgccgcagtactgatcattctatttccccctctattgatccccacctccaaatatctcatcaacaaccgactaatcaccacccaacaatgactaatcaaactaacctcaaaacaaatgataaccatacacaacactaaaggacgaacctgatctcttatactagtatccttaatcatttttattgccacaactaacctcctcggactcctgcctcactcatttacaccaaccacccaactatctataaacctagccatggccatccccttatgagcgggcgcagtgattataggctttcgctctaagattaaaaatgccctagcccacttcttaccacaaggcacacctacaccccttatccccatactagttattatcgaaaccatcagcctactcattcaaccaatagccctagccgtacgcctaaccgctaacattactgcaggccacctactcatgcacctaattggaagcgccaccctagcaatatcaaccattaaccttccctctacacttatcatcttcacaattctaattctactgactatcctagaaatcgctgtcgccttaatccaagcctacgttttcacacttctagtaagcctctacctgcacgacaacacataatgacccaccaatcacatgcctatcatatagtaaaacccagcccatgacccctaacaggggccctctcagccctcctaatgacctccggcctagccatgtgatttcacttccactccataacgctcctcatactaggcctactaaccaacacactaaccatataccaatgatggcgcgatgtaacacgagaaagcacataccaaggccaccacacaccacctgtccaaaaaggccttcgatacgggataatcctatttattacctcagaagtttttttcttcgcaggatttttctgagccttttaccactccagcctagcccctaccccccaattaggagggcactggcccccaacaggcatcaccccgctaaatcccctagaagtcccactcctaaacacatccgtattactcgcatcaggagtatcaatcacctgagctcaccatagtctaatagaaaacaaccgaaaccaaataattcaagcactgcttattacaattttactgggtctctattttaccctcctacaagcctcagagtacttcgagtctcccttcaccatttccgacggcatctacggctcaacattttttgtagccacaggcttccacggacttcacgtcattattggctcaactttcctcactatctgcttcatccgccaactaatatttcactttacatccaaacatcactttggcttcgaagccgccgcctgatactggcattttgtagatgtggtttgactatttctgtatgtctccatctattgatgagggtcttactcttttagtataaatagtaccgttaacttccaattaactagttttgacaacattcaaaaaagagtaataaacttcgccttaattttaataatcaacaccctcctagccttactactaataattattacattttgactaccacaactcaacggctacatagaaaaatccaccccttacgagtgcggcttcgaccctatatcccccgcccgcgtccctttctccataaaattcttcttagtagctattaccttcttattatttgatctagaaattgccctccttttacccctaccatgagccctacaaacaactaacctgccactaatagttatgtcatccctcttattaatcatcatcctagccctaagtctggcctatgagtgactacaaaaaggattagactgaaccgaattggtatatagtttaaacaaaacgaatgatttcgactcattaaattatgataatcatatttaccaaatgcccctcatttacataaatattatactagcatttaccatctcacttctaggaatactagtatatcgctcacacctcatatcctccctactatgcctagaaggaataatactatcgctgttcattatagctactctcataaccctcaacacccactccctcttagccaatattgtgcctattgccatactagtctttgccgcctgcgaagcagcggtgggcctagccctactagtctcaatctccaacacatatggcctagactacgtacataacctaaacctactccaatgctaaaactaatcgtcccaacaattatattactaccactgacatgactttccaaaaaacacataatttgaatcaacacaaccacccacagcctaattattagcatcatccctctactattttttaaccaaatcaacaacaacctatttagctgttccccaaccttttcctccgaccccctaacaacccccctcctaatactaactacctgactcctacccctcacaatcatggcaagccaacgccacttatccagtgaaccactatcacgaaaaaaactctacctctctatactaatctccctacaaatctccttaattataacattcacagccacagaactaatcatattttatatcttcttcgaaaccacacttatccccaccttggctatcatcacccgatgaggcaaccagccagaacgcctgaacgcaggcacatacttcctattctacaccctagtaggctcccttcccctactcatcgcactaatttacactcacaacaccctaggctcactaaacattctactactcactctcactgcccaagaactatcaaactcctgagccaacaacttaatatgactagcttacacaatagcttttatagtaaagatacctctttacggactccacttatgactccctaaagcccatgtcgaagcccccatcgctgggtcaatagtacttgccgcagtactcttaaaactaggcggctatggtataatacgcctcacactcattctcaaccccctgacaaaacacatagcctaccccttccttgtactatccctatgaggcataattataacaagctccatctgcctacgacaaacagacctaaaatcgctcattgcatactcttcaatcagccacatagccctcgtagtaacagccattctcatccaaactccctgaagcttcaccggcgcagtcattctcataatcgcccacggacttacatcctcattactattctgcctagcaaactcaaactacgaacgcactcacagtcgcatcataatcctctctcaaggacttcaaactctactcccactaatagctttttgatgacttctagcaagcctcgctaacctcgccttaccccccactattaacctactgggagaactctctgtgctagtaaccacgttctcctgatcaaatatcactctcctacttacgggactcaacatactagtcacagccctatactccctctacatatttaccacaacacaatggggctcactcacccaccacattaacaacataaaaccctcattcacacgagaaaacaccctcatgttcatacacctatcccccattctcctcctatccctcaaccccgacatcattaccgggttttcctcttgtaaatatagtttaaccaaaacatcagattgtgaatctgacaacagaggcttacgaccccttatttaccgagaaagctcacaagaactgctaactcatgcccccatgtctaacaacatggctttctcaacttttaaaggataacagctatccattggtcttaggccccaaaaattttggtgcaactccaaataaaagtaataaccatgcacactactataaccaccctaaccctgacttccctaattccccccatccttaccaccctcgttaaccccaacaaaaaaaactcatacccccattatgtaaaatccattgtcgcatccacctttattatcagtctcttccccacaacaatattcatgtgcctagaccaagaagttattatctcgaactgacactgagccacaacccaaacaacccagctctccctaagcttcaaactagactacttctccataatattcatccctgtagcattgttcgttacatggtccatcatagaattctcactgtgatatataaactcagacccaaacattaatcagttcttcaaatatctactcattttcctaattaccatactaatcttagttaccgctaacaacctattccaactgttcatcggctgagagggcgtaggaattatatccttcttgctcatcagttgatgatacgcccgagcagatgccaacacagcagccattcaagcaatcctatacaaccgtatcggcgatatcggtttcatcctcgccttagcatgatttatcctacactccaactcatgagacccacaacaaatagcccttctaaacgctaatccaagcctcaccccactactaggcctcctcctagcagcagcaggcaaatcagcccaattaggtctccacccctgactcccctcagccatagaaggccccaccccagtctcagccctactccactcaagcactatagttgtagcaggaatcttcttactcatccgcttccaccccctagcagaaaatagcccactaatccaaactctaacactatgcttaggcgctatcaccactctgttcgcagcagtctgcgcccttacacaaaatgacatcaaaaaaatcgtagccttctccacttcaagtcagctaggactcataatagttacaatcggcatcaaccaaccacacctagcattcctgcacatctgtacccacgccttcttcaaagccatactatttatgtgctccgggtccatcatccacaaccttaacaatgaacaagatattcgaaaaataggaggactactcaaaaccatacctctcacttcaacctccctcaccattggcagcctagcattagcaggaatacctttcctcacaggtttctactccaaagaccacatcatcgaaaccgcaaacatatcatacacaaacgcctgagccctatctattactctcatcgctacctccctgacaagcgcctatagcactcgaataattcttctcaccctaacaggtcaacctcgcttccccacccttactaacattaacgaaaataaccccaccctactaaaccccattaaacgcctggcagccggaagcctattcgcaggatttctcattactaacaacatttcccccgcatcccccttccaaacaacaatccccctctacctaaaactcacagccctcgctgtcactttcctaggacttctaacagccctagacctcaactacctaaccaacaaacttaaaataaaatccccactatgcacattttatttctccaacatactcggattctaccctagcatcacacaccgcacaatcccctatctaggccttcttacgagccaaaacctgcccctactcctcctagacctaacctgactagaaaagctattacctaaaacaatttcacagcaccaaatctccacctccatcatcacctcaacccaaaaaggcataattaaactttacttcctctctttcttcttcccactcatcctaaccctactcctaatcacataacctattcccccgagcaatctcaattacaatatatacaccaacaaacaatgttcaaccagtaactactactaatcaacgcccataatcatacaaagcccccgcaccaataggatcctcccgaatcaaccctgacccctctccttcataaattattcagcttcctacactattaaagtttaccacaaccaccaccccatcatactctttcacccacagcaccaatcctacctccatcgctaaccccactaaaacactcaccaagacctcaacccctgacccccatgcctcaggatactcctcaatagccatcgctgtagtatatccaaagacaaccatcattccccctaaataaattaaaaaaactattaaacccatataacctcccccaaaattcagaataataacacacccgaccacaccgctaacaatcaatactaaacccccataaataggagaaggcttagaagaaaaccccacaaaccccattactaaacccacactcaacagaaacaaagcatacatcattattctcgcacggactacaaccacgaccaatgatatgaaaaaccatcgttgtatttcaactacaagaacaccaatgaccccaatacgcaaaattaaccccctaataaaattaattaaccactcattcatcgacctccccaccccatccaacatctccgcatgatgaaacttcggctcactccttggcgcctgcctgatcctccaaatcaccacaggactattcctagccatgcactactcaccagacgcctcaaccgccttttcatcaatcgcccacatcactcgagacgtaaattatggctgaatcatccgctaccttcacgccaatggcgcctcaatattctttatctgcctcttcctacacatcgggcgaggcctatattacggatcatttctctactcagaaacctgaaacatcggcattatcctcctgcttgcaactatagcaacagccttcataggctatgtcctcccgtgaggccaaatatcattctgaggggccacagtaattacaaacttactatccgccatcccatacattgggacagacctagttcaatgaatctgaggaggctactcagtagacagtcccaccctcacacgattctttacctttcacttcatcttgcccttcattattgcagccctagcagcactccacctcctattcttgcacgaaacgggatcaaacaaccccctaggaatcacctcccattccgataaaatcaccttccacccttactacacaatcaaagacgccctcggcttacttctcttccttctctccttaatgacattaacactattctcaccagacctcctaggcgacccagacaattataccctagccaaccccttaaacacccctccccacatcaagcccgaatgatatttcctattcgcctacacaattctccgatccgtccctaacaaactaggaggcgtccttgccctattactatccatcctcatcctagcaataatccccatcctccatatatccaaacaacaaagcataatatttcgcccactaagccaatcactttattgactcctagccgcagacctcctcattctaacctgaatcggaggacaaccagtaagctacccctttaccatcattggacaagtagcatccgtactatacttcacaacaatcctaatcctaataccaactatctccctaattgaaaacaaaatactcaaatgaccctgtccttgtagtataaactaatacaccagtcttgtaaaccggagatgaaaacctttttccaaggacaaatcagagaaaaagtctttaactccaccattagcacccaaagctaagattctaatttaaactattctctgttctttcatggggaagcagatttgggtaccacccaagtattgactcacccatcaacaaccgctatgtatttcgtacattactgccagccaccatgaatattgtacggtaccataaatacttgaccacctgtagtacataaaaacccaatccacatcaaaaccccctccccatgcttacaagcaagtacagcaatcaaccttcaactatcacacatcaactgcaactccaaagccacccctcacccactaggataccaacaaacctacctacccttaacagtacatagtacataaagccatttaccgtacatagcacattacagtcaaatcccttctcgtccccatggatgacccccctcagataggggtcccttgaccaccatcctccgtgaaatcaatatcccgcacaagagtgctactctcctcgctccgggcccataacacttgggggtagctaaagtgaactgtatccgacatctggttcctacttcagggccataaagcctaaatagcccacacgttccccttaaataagacatcacgatg

SEQ ID NO: 426 - DNA, 16575 bp, Homo sapiens mitochondrial
  3113: "n" refers to a nucleotide at position 3107 of the Cambridge Reference Sequence (CRS, Anderson et al. 1981 Nature 290:457-465), later determined to be absent from the human mtDNA sequence according to the revised CRS (rCRS, Andrews et al. 1999 Nature Genetics 23:147); "n" therefore represents a single nucleotide deletion at a position corresponding to nucleotide 3107 of SEQ ID NO:1 as provided herein.
gatcacaggtctatcaccctattaaccactcacgggagctctccatgcatttggtattttcgtctggggggtgtgcacgcgatagcattgcgagacgctggagccggagcaccctatgtcgcagtatctgtctttgattcctgcctcatcccattatttatcgcacctacgttcaatattacaggcgaacatacttaccaaagcgtattaattaattaatgcttgtaggacataataataacaattgaacgtctgcacagccgctttccacacagacatcataacaaaaaatttccaccaaaccccccctcccccccgcttctggccacagcacttaaacacatctctgccaaaccccaaaaacaaagaaccctaacaccagcctaaccagatttcaaattttatcttttggcggtatgcacttttaacagtcaccccccaactaacacattattttcccctcccactcccatactactaatctcatcaatacaacccccgcccatcctacccagcacacacacaccgctgctaaccccataccccgaaccaaccaaaccccaaagacaccccccacccccagtttatgtagcttacctcctcaaagcaatacactgaaaatgtttagacgggctcacatcaccccataaacaaataggtttggtcctagcctttctattagctcttagtaagattacacatgcaagcatccccgttccagtgagttcaccctctaaatcaccacgatcaaaagggacaagcatcaagcacgcagcaatgcagctcaaaacgcttagcctagccacacccccacgggaaacagcagtgattaacctttagcaataaacgaaagtttaactaagctatactaaccccagggttggtcaatttcgtgccagccaccgcggtcacacgattaacccaagtcaatagaagccggcgtaaagagtgttttagatcaccccctccccaataaagctaaaactcacctgagttgtaaaaaactccagttgacacaaaatagactacgaaagtggctttaacatatctgaacacacaatagctaagacccaaactgggattagataccccactatgcttagccctaaacctcaacagttaaatcaacaaaactgctcgccagaacactacgagccacagcttaaaactcaaaggacctggcggtgcttcatatccctctagaggagcctgttctgtaatcgataaaccccgatcaacctcaccacctcttgctcagcctatataccgccatcttcagcaaaccctgatgaaggctacaaagtaagcgcaagtacccacgtaaagacgttaggtcaaggtgtagcccatgaggtggcaagaaatgggctacattttctaccccagaaaactacgatagcccttatgaaacttaagggtcgaaggtggatttagcagtaaactgagagtagagtgcttagttgaacagggccctgaagcgcgtacacaccgcccgtcaccctcctcaagtatacttcaaaggacatttaactaaaacccctacgcatttatatagaggagacaagtcgtaacatggtaagtgtactggaaagtgcacttggacgaaccagagtgtagcttaacacaaagcacccaacttacacttaggagatttcaacttaacttgaccgctctgagctaaacctagccccaaacccactccaccttactaccagacaaccttaaccaaaccatttacccaaataaagtataggcgatagaaattgaaacctggcgcaatagatatagtaccgcaagggaaagatgaaaaattataaccaagcataatatagcaaggactaacccctataccttctgcataatgaattaactagaaataactttgcaaggagagccaaagctaagacccccgaaaccagacgagctacctaagaacagctaaaagagcacacccgtctatgtagcaaaatagtgggaagatttataggtagaggcgacaaacctaccgagcctggtgatagctggttgtccaagatagaatcttagttcaactttaaatttgcccacagaaccctctaaatccccttgtaaatttaactgttagtccaaagaggaacagctctttggacactaggaaaaaaccttgtagagagagtaaaaaatttaacacccatagtaggcctaaaagcagccaccaattaagaaagcgttcaagctcaacacccactacctaaaaaatcccaaacatataactgaactcctcacacccaattggaccaatctatcaccctatagaagaactaatgttagtataagtaacatgaaaacattctcctccgcataagcctgcgtcagattaaaacactgaactgacaattaacagcccaatatctacaatcaaccaacaagtcattattaccctcactgtcaacccaacacaggcatgctcataaggaaaggttaaaaaaagtaaaaggaactcggcaaatcttaccccgcctgtttaccaaaaacatcacctctagcatcaccagtattagaggcaccgcctgcccagtgacacatgtttaacggccgcggtaccctaaccgtgcaaaggtagcataatcacttgttccttaaatagggacctgtatgaatggctccacgagggttcagctgtctcttacttttaaccagtgaaattgacctgcccgtgaagaggcgggcatgacacagcaagacgagaagaccctatggagctttaatttattaatgcaaacagtacctaacaaacccacaggtcctaaactaccaaacctgcattaaaaatttcggttggggcgacctcggagcagaacccaacctccgagcagtacatgctaagacttcaccagtcaaagcgaactactatactcaattgatccaataacttgaccaacggaacaagttaccctagggataacagcgcaatcctattctagagtccatatcaacaatagggtttacgacctcgatgttggatcaggacatcccgatggtgcagccgctattaaaggttcgtttgttcaacgattaaagtcctacgtgatctgagttcagaccggagtaatccaggtcggtttctatctacnttcaaattcctccctgtacgaaaggacaagagaaataaggcctacttcacaaagcgccttcccccgtaaatgatatcatctcaacttagtattatacccacacccacccaagaacagggtttgttaagatggcagagcccggtaatcgcataaaacttaaaactttacagtcagaggttcaattcctcttcttaacaacatacccatggccaacctcctactcctcattgtacccattctaatcgcaatggcattcctaatgcttaccgaacgaaaaattctaggctatatacaactacgcaaaggccccaacgttgtaggcccctacgggctactacaacccttcgctgacgccataaaactcttcaccaaagagcccctaaaacccgccacatctaccatcaccctctacatcaccgccccgaccttagctctcaccatcgctcttctactatgaacccccctccccatacccaaccccctggtcaacctcaacctaggcctcctatttattctagccacctctagcctagccgtttactcaatcctctgatcagggtgagcatcaaactcaaactacgccctgatcggcgcactgcgagcagtagcccaaacaatctcatatgaagtcaccctagccatcattctactatcaacattactaataagtggctcctttaacctctccacccttatcacaacacaagaacacctctgattactcctgccatcatgacccttggccataatatgatttatctccacactagcagagaccaaccgaacccccttcgaccttgccgaaggggagtccgaactagtctcaggcttcaacatcgaatacgccgcaggccccttcgccctattcttcatagccgaatacacaaacattattataataaacaccctcaccactacaatcttcctaggaacaacatatgacgcactctcccctgaactctacacaacatattttgtcaccaagaccctacttctaacctccctgttcttatgaattcgaacagcatacccccgattccgctacgaccaactcatacacctcctatgaaaaaacttcctaccactcaccctagcattacttatatgatatgtctccatacccattacaatctccagcattccccctcaaacctaagaaatatgtctgataaaagagttactttgatagagtaaataataggagcttaaacccccttatttctaggactatgagaatcgaacccatccctgagaatccaaaattctccgtgccacctatcacaccccatcctaaagtaaggtcagctaaataagctatcgggcccataccccgaaaatgttggttatacccttcccgtactaattaatcccctggcccaacccgtcatctactctaccatctttgcaggcacactcatcactgcgctaagctcgcactgattttttacctgagtaggcctagaaataaacatgctagcttttattccagttctaaccaaaaaaataaaccctcgttccacagaagctgccatcaagtatttcctcacgcaagcaaccgcatccataatccttctaatagctatcctcttcaacaatatactctccggacaatgaaccataaccaatactaccaatcaatactcatcattaataatcataatggctatagcaataaaactaggaatagccccctttcacttctgagtcccagaggttacccaaggcacccctctgacatccggcctgcttcttctcacatgacaaaaactagcccccatctcaatcatataccaaatctctccctcactaaacgtaagccttctcctcactctctcaatcttatccatcatagcaggcagttgaggtggattaaaccaaacccagctacgcaaaatcttagcatactcctcaattacccacataggatgaataatagcagttctaccgtacaaccctaacataaccattcttaatttaactatttatattatcctaactactaccgcattcctactactcaacttaaactccagcaccacgaccctactactatctcgcacctgaaacaagctaacatgactaacacccttaattccatccaccctcctctccctaggaggcctgcccccgctaaccggctttttgcccaaatgggccattatcgaagaattcacaaaaaacaatagcctcatcatccccaccatcatagccaccatcaccctccttaacctctacttctacctacgcctaatctactccacctcaatcacactactccccatatctaacaacgtaaaaataaaatgacagtttgaacatacaaaacccaccccattcctccccacactcatcgcccttaccacgctactcctacctatctccccttttatactaataatcttatagaaatttaggttaaatacagaccaagagccttcaaagccctcagtaagttgcaatacttaatttctgtaacagctaaggactgcaaaaccccactctgcatcaactgaacgcaaatcagccactttaattaagctaagcccttactagaccaatgggacttaaacccacaaacacttagttaacagctaagcaccctaatcagctggcttcaatctacttctcccgccgccgggaaaaaaggcgggagaagccccggcaggtttgaagctgcttcttcgaatttgcaattcaatatgaaaatcacctcggagctggtaaaaagaggcctaacccctgtctttagatttacagtccaatgcttcactcagccattttacctcacccccactgatgttcgccgaccgttgactattctctacaaaccacaaagacattggaacactatacctattattcggcacatgagctggagtcctaggcacagctctaagcctccttattcgagccgagctgggccagccaggcaaccttctaggtaacgaccacatctacaacgttatcgtcacagcccatgcatttgtaataatcttcttcatagtaatacccatcataatcggaggctttggcaactgactagttcccctaataatcggtgcccccgatatggcgtttccccgcataaacaacataagcttctgactcttacctccctctctcctactcctgctcgcatctgctatagtggaggccggagcaggaacaggttgaacagtctaccctcccttagcagggaactactcccaccctggagcctccgtagacctaaccatcttctccttacacctagcaggtgtctcctctatcttaggggccatcaatttcatcacaacaattatcaatataaaaccccctgccataacccaataccaaacgcccctcttcgtctgatccgtcctaatcacagcagtcctacttctcctatctctcccagtcctagctgctggcatcactatactactaacagaccgcaacctcaacaccaccttcttcgaccccgccggaggaggagaccccattctataccaacacctattctgatttttcggtcaccctgaagtttatattcttatcctaccaggcttcggaataatctcccatattgtaacttactactccggaaaaaaagaaccatttggatacataggtatggtctgagctatgatatcaattggcttcctagggtttatcgtgtgagcacaccatatatttacagtaggaatagacgtagacacacgagcatatttcacctccgctaccataatcatcgctatccccaccggcgtcaaagtatttagctgactcgccacactccacggaagcaatatgaaatgatctgctgcagtgctctgagccctaggattcatctttcttttcaccgtaggtggcctgactggcattgtattagcaaactcatcactagacatcgtactacacgacacgtactacgttgtagctcacttccactatgtcctatcaataggagctgtatttgccatcataggaggcttcattcactgatttcccctattctcaggctacaccctagaccaaacctacgccaaaatccatttcactatcatattcatcggcgtaaatctaactttcttcccacaacactttctcggcctatccggaatgccccgacgttactcggactaccccgatgcatacaccacatgaaacatcctatcatctgtaggctcattcatttctctaacagcagtaatattaataattttcatgatttgagaagccttcgcttcgaagcgaaaagtcctaatagtagaagaaccctccataaacctggagtgactatatggatgccccccaccctaccacacattcgaagaacccgtatacataaaatctagacaaaaaaggaaggaatcgaaccccccaaagctggtttcaagccaaccccatggcctccatgactttttcaaaaaggtattagaaaaaccatttcataactttgtcaaagttaaattataggctaaatcctatatatcttaatggcacatgcagcgcaagtaggtctacaagacgctacttcccctatcatagaagagcttatcacctttcatgatcacgccctcataatcattttccttatctgcttcctagtcctgtatgcccttttcctaacactcacaacaaaactaactaatactaacatctcagacgctcaggaaatagaaaccgtctgaactatcctgcccgccatcatcctagtcctcatcgccctcccatccctacgcatcctttacataacagacgaggtcaacgatccctcccttaccatcaaatcaattggccaccaatggtactgaacctacgagtacaccgactacggcggactaatcttcaactcctacatacttcccccattattcctagaaccaggcgacctgcgactccttgacgttgacaatcgagtagtactcccgattgaagcccccattcgtataataattacatcacaagacgtcttgcactcatgagctgtccccacattaggcttaaaaacagatgcaattcccggacgtctaaaccaaaccactttcaccgctacacgaccgggggtatactacggtcaatgctctgaaatctgtggagcaaaccacagtttcatgcccatcgtcctagaattaattcccctaaaaatctttgaaataggacccgtatttaccctatagcaccccctctaccccctctagagcccactgtaaagctaacttagcattaaccttttaagttaaagattaagagaaccaacacctctttacagtgaaatgccccaactaaatactaccgtatggcccaccataattacccccatactccttacactattcctcatcacccaactaaaaatattaaacacaaactaccacctacctccctcaccaaagcccataaaaataaaaaattataacaaaccctgagaaccaaaatgaacgaaaatctgttcgcttcattcattgcccccacaatcctaggcctacccgccgcagtactgatcattctatttccccctctattgatccccacctccaaatatctcatcaacaaccgactaatcaccacccaacaatgactaatcaaactaacctcaaaacaaatgataaccatacacaacactaaaggacgaacctgatctcttatactagtatccttaatcatttttattgccacaactaacctcctcggactcctgcctcactcatttacaccaaccacccaactatctataaacctagccatggccatccccttatgagcgggcgcagtgattataggctttcgctctaagattaaaaatgccctagcccacttcttaccacaaggcacacctacaccccttatccccatactagttattatcgaaaccatcagcctactcattcaaccaatagccctggccgtacgcctaaccgctaacattactgcaggccacctactcatgcacctaattggaagcgccaccctagcaatatcaaccattaaccttccctctacacttatcatcttcacaattctaattctactgactatcctagaaatcgctgtcgccttaatccaagcctacgttttcacacttctagtaagcctctacctgcacgacaacacataatgacccaccaatcacatgcctatcatatagtaaaacccagcccatgacccctaacaggggccctctcagccctcctaatgacctccggcctagccatgtgatttcacttccactccataacgctcctcatactaggcctactaaccaacacactaaccatataccaatgatggcgcgatgtaacacgagaaagcacataccaaggccaccacacaccacctgtccaaaaaggccttcgatacgggataatcctatttattacctcagaagtttttttcttcgcaggatttttctgagccttttaccactccagcctagcccctaccccccaattaggagggcactggcccccaacaggcatcaccccgctaaatcccctagaagtcccactcctaaacacatccgtattactcgcatcaggagtatcaatcacctgagctcaccatagtctaatagaaaacaaccgaaaccaaataattcaagcactgcttattacaattttactgggtctctattttaccctcctacaagcctcagagtacttcgagtctcccttcaccatttccgacggcatctacggctcaacattttttgtagccacaggcttccacggacttcacgtcattattggctcaactttcctcactatctgcttcatccgccaactaatatttcactttacatccaaacatcactttggcttcgaagccgccgcctgatactggcattttgtagatgtggtttgactatttctgtatgtctccatctattgatgagggtcttactcttttagtataaatagtaccgttaacttccaattaactagctttgacaacattcaaaaaagagtaataaacttcgccttaattttaataatcaacaccctcctagccttactactaataattattacattttgactaccacaactcaacggctacatagaaaaatccaccccttacgagtgcggcttcgaccctatatcccccgcccgcgtccctttctccataaaattcttcttagtagctatcaccttcttattatttgatctagaaattgccctccttttacccctaccatgagccctacaaacaactaacctgccactaatagttatgtcatccctcttattaatcatcatcctagccctaagtctggcctatgagtgactacaaaaaggattagactgagccgaattggtatatagtttaaacaaaacgaatgatttcgactcattaaattatgataatcatatttaccaaatgcccctcatttacataaatattatactagcatttaccatctcacttctaggaatactagtatatcgctcacacctcatatcctccctactatgcctagaaggaataatactatcgctgttcattatagctactctcataaccctcaacacccactccctcttagccaatattgtgcctattgccatactagtctttgccgcctgcgaagcagcggtgggcctagccctactagtctcaatctccaacacatatggcctagactacgtacataacctaaacctactccaatgctaaaactaatcgtcccaacaattatattactaccactgacatgactttccaaaaaacacataatttgaatcaacacaaccacccacagcctaattattagcatcatccctctactattttttaaccaaatcaacaacaacctatttagctgttccccaaccttttcctccgaccccctaacaacccccctcctaatactaactacctgactcctacccctcacaatcatggcaagccaacgccacttatccagtgaaccactatcacgaaaaaaactctacctctctatactaatctccctacaaatctccttaattataacattcacagccacagaactaatcatattttatatcttcttcgaaaccacacttatccccaccttggctatcatcacccgatgaggcaaccagccagaacgcctgaacgcaggcacatacttcctattctacaccctagtaggctcccttcccctactcatcgcactaatttacactcacaacaccctaggctcactaaacattctactactcactctcactgcccaagaactatcaaactcctgagccaacaacttaatatgactagcttacacaatagcttttatagtaaagatacctctttacggactccacttatgactccctaaagcccatgtcgaagcccccatcgctgggtcaatagtacttgccgcagtactcttaaaactaggcggctatggtataatacgcctcacactcattctcaaccccctgacaaaacacatagcctaccccttccttgtactatccctatgaggcataattataacaagctccatctgcctacgacaaacagacctaaaatcgctcattgcatactcttcaatcagccacatagccctcgtagtaacagccattctcatccaaaccccctgaagcttcaccggcgcagtcattctcataatcgcccacggacttacatcctcattactattctgcctagcaaactcaaactacgaacgcactcacagtcgcatcataatcctctctcaaggacttcaaactctactcccactaatagctttttgatgacttctagcaagcctcgctaacctcgccttaccccccactattaacctactgggagaactctctgtgctagtaaccacgttctcctgatcaaatatcactctcctacttacaggactcaacatactagtcacagccctatactccctctacatatttaccacaacacaatggggctcactcacccaccacattaacaacataaaaccctcattcacacgagaaaacaccctcatgttcatacacctatcccccattctcctcctatccctcaaccccgacatcattaccgggttttcctcttgtaaatatagtttaaccaaaacatcagattgtgaatctgacaacagaggcttacgaccccttatttaccgagaaagctcacaagaactgctaactcatgcccccatgtctaacaacatggctttctcaacttttaaaggataacagctatccattggtcttaggccccaaaaattttggtgcaactccaaataaaagtaataaccatgcacactactataaccaccctaaccctgacttccctaattccccccatccttaccaccctcgttaaccctaacaaaaaaaactcatacccccattatgtaaaatccattgtcgcatccacctttattatcagtctcttccccacaacaatattcatatgcctagaccaagaagttattatctcgaactgacactgagccacaacccaaacaacccagctctccctaagcttcaaactagactacttctccataatattcatccctgtagcattgttcgttacatggtccatcatagaattctcactgtgatatataaactcagacccaaacattaatcagttcttcaaatatctactcattttcctaattaccatactaatcttagttaccgctaacaacctattccaactgttcatcggctgagagggcgtaggaattatatccttcttgctcatcagttgatgatacgcccgagcagatgccaacacagcagccattcaagcaatcctatacaaccgtatcggcgatatcggtttcatcctcgccttagcatgatttatcctacactccaactcatgagacccacaacaaatagcccttctaaacgctaatccaagcctcaccccactactaggcctcctcctagcagcagcaggcaaatcagcccaattaggtctccacccctgactcccctcagccatagaaggccccaccccagtctcagccctactccactcaagcactatagttgtagcaggaatcttcttactcatccgcttccaccccctagcagaaaatagcccactaatccaaactctaacactatgcttaggcgctatcaccactctgttcgcagcagtctgcgcccttacacaaaatgacatcaaaaaaatcgtagccttctccacttcaagtcaactaggactcataatagttacaatcggcatcaaccaaccacacctagcattcctgcacatctgtacccacgccttcttcaaagccatactatttatgtgctccgggtccatcatccacaaccttaacaatgaacaagatattcgaaaaataggaggactactcaaaaccatacctctcacttcaacctccctcaccattggcagcctagcattagcaggaatacctttcctcacaggtttctactccaaagaccacatcatcgaaaccgcaaacatatcatacacaaacgcctgagccctatctattactctcatcgctacctccctgacaagcgcctatagcactcgaataattcttctcaccctaacaggtcaacctcgcttccccacccttactaacattaacgaaaataaccccaccctactaaaccccattaaacgcctggcagccggaagcctattcgcaggatttctcattactaacaacatttcccccgcatcccccttccaaacaacagtccccctctacctaaaactcacagccctcgctgtcactttcctaggacttctaacagccctagacctcaactacctaaccaacaaacttaaaataaaatccccactatgcacattttatttctccaacatactcggattctaccctagcatcacacaccgcacaatcccctatctaggccttcttacgagccaaaacctgcccctactcctcctagacctaacctgactagaaaagctattacctaaaacaatttcacagcaccaaatctccacctccatcatcacctcaacccaaaaaggcataattaaactttacttcctctctttcttcttcccactcatcctaaccctactcctaatcacataacctattcccccgagcaatctcaattacaatatatacaccaacaaacaatgttcaaccagtaactactactaatcaacgcccataatcatacaaagcccccgcaccaataggatcctcccgaatcaaccctgacccctctccttcataaattattcagcttcctacactattaaagtttaccacaaccaccaccccatcatactctttcacccacagcaccaatcctacctccatcgctaaccccactaaaacactcaccaagacctcaacccctgacccccatgcctcaggatactcctcaatagccatcgctgtagtatatccaaagacaaccatcattccccctaaataaattaaaaaaactattaaacccatataacctcccccaaaattcagaataataacacacccaaccacaccgctaacaatcaatactaaacccccataaataggagaaggcttagaagaaaaccccacaaaccccattactaaacccacactcaacagaaacaaagcatacatcattattctcgcacggactacaaccacgaccaatgatatgaaaaaccatcgttgtatttcaactacaagaacaccaatgaccccaatacgcaaaactaaccccctaataaaattaattaaccactcattcatcgacctccccaccccatccaacatctccgcatgatgaaacttcggctcactccttggcgcctgcctgatcctccaaatcaccacaggactattcctagccatgcactactcaccagacgcctcaaccgccttttcatcaatcgcccacatcactcgagacgtaaattatggctgaatcatccgctaccttcacgccaatggcgcctcaatattctttatctgcctcttcctacacatcggacgaggcctatattacggatcatttctctactcagaaacctgaaacatcggcattatcctcctgcttgcaactatagcaacagccttcataggctatgtcctcccgtgaggccaaatatcattctgaggggccacagtaattacaaacttactatccgccatcccatacattgggacagacctagttcaatgaatctgaggaggctactcagtagacagtcccaccctcacacgattctttacctttcacttcatcttgcccttcattattgcagccctagcagcactccacctcctattcttgcacgaaacgggatcaaacaaccccctaggaatcacctcccattccgataaaatcaccttccacccttactacacaatcaaagacgccctcggcttacttctcttccttctctccttaatgacattaacactattctcaccagacctcctaggcgacccagacaattataccctagccaaccccttaaacacccctccccacatcaagcccgaatgatatttcctattcgcctacacaattctccgatccgtccctaacaaactaggaggcgtccttgccctattactatccatcctcatcctagcaataatccccatcctccatatatccaaacaacaaagcataatatttcgcccactaagccaatcactttattgactcctagccgcagacctcctcattctaacctgagtcggaggacaaccagtaagctacccttttaccatcattggacaagtagcatccgtactatacttcacaacaatcctaatcctaataccaactatctccctaattgaaaacaaaatactcaaatgggcctgtccttgtagtataaactaatacaccagtcttgtaagccggagatgaaaacctttttccaaggacaaatcagagaaaaagtctttaactccaccattagcacccaaagctaagattctaatttaaactattctctgttctttcatggggaagcagatttgggtaccacccaagtattgactcacccatcaacaaccgctatgtatttcgtacattactgccagccaccatgaatattgtacagtaccataaatacttgaccacctgtagtacataaaaacccaatccacatcaaaaccccctccccatgcttacaagcaagtacagcaatcaaccttcaactatcacacatcaactgcaactccaaagccacccctcacccactaggataccaacaaacctacccacccttaacagtacatagtacataaagccatttaccgtacatagcacattacagtcaaatcccttctcgtccccatggatgacccccctcagatagggatcccttgaccaccatcctccgtgaaatcaatatcccgcacaagagtgctactctcctcgctccgggcccataacacttgggggtagctaaagtgaactgtatccgacatctggttcctacttcagggccataaagcctaaatagcccacacgttccccttaaataagacatcacgatg

SEQ ID NO: 427 - DNA, 16570 bp, Homo sapiens mitochondrial
  3108: "n" refers to a nucleotide at position 3107 of the Cambridge Reference Sequence (CRS, Anderson et al. 1981 Nature 290:457-465), later determined to be absent from the human mtDNA sequence according to the revised CRS (rCRS, Andrews et al. 1999 Nature Genetics 23:147); "n" therefore represents a single nucleotide deletion at a position corresponding to nucleotide 3107 of SEQ ID NO:1 as provided herein.
gatcacaggtctatcaccctattaaccactcacgggagctctccatgcatttggtattttcgtctggggggtatgcacgcgatagcattgcgagacgctggagccggagcaccctatgtcgcagtatctgtctttgattcctgcctcatcctattatttatcgcacctacgttcaatattacaggcgaacatacctactaaagtgtgttaattaattaatgcttgtaggacataataataacaattgaatgtctgcacagccgctttccacacagacatcataacaaaaaatttccaccaaaccccccctcccccgccttctggccacagcacttaaacacatctctgccaaaccccaaaaacaaagaaccctaacaccagcctaaccagatttcaaattttatcttttggcggtatgcacttttaacagtcaccccccaactaacacattattttcccctcccactcccatactactaatctcatcaatacaacccccgcccatcctacccagcacacacacaccgctgctaaccccataccccgaaccaaccaaaccccaaagacaccccccacagtttatgtagcttacctcctcaaagcaatacactgaaaatgtttagacgggctcacatcaccccataaacaaataggtttggtcctagcctttctattagctcttagtaagattacacatgcaagcatccccgttccagtgagttcaccctctaaatcaccacgatcaaaagggacaagcatcaagcacgcagcaatgcagctcaaaacgcttagcctagccacacccccacgggaaacagcagtgattaacctttagcaataaacgaaagtttaactaagctatactaaccccagggttggtcaatttcgtgccagccaccgcggtcacacgattaacccaagtcaatagaagccggcgtaaagagtgttttagatcaccccctccccaataaagctaaaactcacctgagttgtaaaaaactccagttgacacaaaatagactacgaaagtggctttaacatatctgaacacacaatagctaagacccaaactgggattagataccccactatgcttagccctaaacctcaacagttaaatcaacaaaactgctcgccagaacactacgagccacagcttaaaactcaaaggacctggcggtgcttcatatccctctagaggagcctgttctataatcgataaaccccgatcaacctcaccacctcttgctcagcctatataccgccatcttcagcaaaccctgatgaaggctacaaagtaagcgcaagtacccacgtaaagacgttaggtcaaggtgtagcccatgaggtggcaagaaatgggctacattttctaccccagaaaactacgatagcccttatgaaacttaagggtcgaaggtggatttagcagtaaactgagagtagagtgcttagttgaacagggccctgaagcgcgtacacaccgcccgtcaccctcctcaagtatacttcaaaggacatttaactaaaacccctacgcatttatatagaggagacaagtcgtaacatggtaagtgtactggaaagtgcacttggacgaaccagagtgtagcttaacacaaagcacccaacttacacttaggagatttcaacttaacttgaccgctctgagctaaacctagccccaaacccactccaccttactaccagacaaccttagccaaaccatttacccaaataaagtataggcgatagaaattgaaacctggcgcaatagatatagtaccgcaagggaaagatgaaaaattataaccaagcataatatagcaaggactaacccctataccttctgcataatgaattaactagaaataactttgcaaggagagccaaagctaagacccccgaaaccagacgagctacctaagaacagctaaaagagcacacccgtctatgtagcaaaatagtgggaagatttataggtagaggcgacaaacctaccgagcctggtgatagctggttgtccaagatagaatcttagttcaactttaaatttgcccacagaaccctctaaatccccttgtaaatttaactgttagtccaaagaggaacagctctttggacactaggaaaaaaccttgtagagagagtaaaaaatttaacacccatagtaggcctaaaagcagccaccaattaagaaagcgttcaagctcaacacccactacctaaaaaatcccaaacatataactgaactcctcacacccaattggaccaatctatcaccctatagaagaactaatgttagtataagtaacatgaaaacattctcctccgcataagcctgcgtcagattaaaacactgaactgacaattaacagcccaatatctacaatcaaccaacaagtcattattaccctcactgtcaacccaacacaggcatgctcataaggaaaggttaaaaaaagtaaaaggaactcggcaaatcttaccccgcctgtttaccaaaaacatcacctctagcatcaccagtattagaggcaccgcctgcccagtgacacatgtttaacggccgcggtaccctaaccgtgcaaaggtagcataatcacttgttccttaaatagggacctgtatgaatggctccacgagggttcagctgtctcttacttttaaccagtgaaattgacctgcccgtgaagaggcgggcataacacagcaagacgagaagaccctatggagctttaatttattaatgcaaacagtacctaacaaacccacaggtcctaaactaccaaacctgcattaaaaatttcggttggggcgacctcggagcagaacccaacctccgagcagtacatgctaagacttcaccagtcaaagcgaactactatactcaattgatccaataacttgaccaacggaacaagttaccctagggataacagcgcaatcctattctagagtccatatcaacaatagggtttacgacctcgatgttggatcaggacatcccgatggtgcagccgctattaaaggttcgtttgttcaacgattaaagtcctacgtgatctgagttcagaccggagtaatccaggtcggtttctatctacnttcaaattcctccctgtacgaaaggacaagagaaataaggcctacttcacaaagcgccttcccccgtaaatgatatcatctcaacttagtattatacccacacccacccaagaacagggtttgttaagatggcagagcccggtaatcgcataaaacttaaaactttacagtcagaggttcaattcctcttcttaacaacatacccatggccaacctcctactcctcattgtacccattctaatcgcaatggcattcctaatgcttaccgaacgaaaaattctaggctatatacaactacgcaaaggccccaacgttgtaggcccctacgggctactacaacccttcgctgacgccataaaactcttcaccaaagagcccctaaaacccgccacatctaccatcaccctctacatcaccgccccgaccttagctctcaccatcgctcttctactatgaacccccctccccatacccaaccccctggtcaacctcaacctaggcctcctatttattctagccacctctagcctagccgtttactcaatcctctgatcagggtgagcatcaaactcaaactacgccctgatcggcgcactgcgagcagtagcccaaacaatctcatatgaagtcaccctagccatcattctactatcaacattactaataagtggctcctttaacctctccacccttatcacaacacaagaacacctctgattactcctgccatcatgacccttggccataatatgatttatctccacactagcagagaccaaccgaacccccttcgaccttgccgaaggggagtccgaactagtctcaggcttcaacatcgaatacgccgcaggccccttcgccctattcttcatagccgaatacacaaacattattataataaacaccctcaccactacaatcttcctaggaacaacatatgacgcactctcccctgaactctacacaacatattttgtcaccaagaccctacttctaacctccctgttcttatgaattcgaacagcatacccccgattccgctacgaccaactcatacacctcctatgaaaaaacttcctaccactcaccctagcattacttatatgatatgtctccatacccattacaatctccagcattccccctcaaacctaagaaatatgtctgataaaagagttactttgatagagtaaataataggagcttaaacccccttatttctaggactatgagaatcgaacccatccctgagaatccaaaattctccgtgccacctatcacaccccatcctaaagtaaggtcagctaaataagctatcgggcccataccccgaaaatgttggttatacccttcccgtactaattaatcccctggcccaacccgtcatctactctaccatctttgcaggcacactcatcacagcgctaagctcgcactgattttttacctgagtaggcctagaaataaacatgctagcttttattccagttctaaccaaaaaaataaaccctcgttccacagaagctgccatcaagtatttcctcacgcaagcaaccgcatccataatccttctaatagctatcctcttcaacaatatactctccggacaatgaaccataaccaatactaccaatcaatactcatcattaataatcataatggctatagcaataaaactaggaatagccccctttcacttctgagtcccagaggttacccaaggcacccctctgacatccggcctgcttcttctcacatgacaaaaactagcccccatctcaatcatataccaaatctctccctcactaaacgtaagccttctcctcactctctcaatcttatccatcatagcaggcagttgaggtggattaaaccaaacccagctacgcaaaatcttagcatactcctcaattacccacataggatgaataatagcagttctaccgtacaaccctaacataaccattcttaatttaactatttatattatcctaactactaccgcattcctactactcaacttaaactccagcaccacgaccctactactatctcgcacctgaaacaagctaacatgactaacacccttaattccatccaccctcctctccctaggaggcctgcccccgctaaccggctttttgcccaaatgggccattatcgaagaattcacaaaaaacaatagcctcatcatccccaccatcatagccaccatcaccctccttaacctctacttctacctacgcctaatctactccacctcaatcacactactccccatatctaacaacgtaaaaataaaatgacagtttgaacatacaaaacccaccccattcctccccacactcatcgcccttaccacgctactcctacctatctccccttttatactaataatcttatagaaatttaggttaaatacagaccaagagccttcaaagccctcagtaagttgcaatacttaatttctgtaacagctaaggactgcaaaaccccactctgcatcaactgaacgcaaatcagccactttaattaagctaagcccttactagaccaatgggacttaaacccacaaacacttagttaacagctaagcaccctaatcaactggcttcaatctacttctcccgccgccgggaaaaaaggcgggagaagccccggcaggtttgaagctgcttcttcgaatttgcaattcaatatgaaaatcacctcggagctggtaaaaagaggcctaacccctgtctttagatttacagtccaatgcttcactcagccattttacctcacccccactgatgttcgccgaccgttgactattctctacaaaccacaaagacattggaacactatacctattattcggcgcatgagctggagtcctaggcacagctctaagcctccttattcgagccgagctgggccagccaggcaaccttctaggtaacgaccacatctacaacgttatcgtcacagcccatgcatttgtaataatcttcttcatagtaatacccatcataatcggaggctttggcaactgactagttcccctaataatcggtgcccccgatatggcgtttccccgcataaacaacataagcttctgactcttacctccctctctcctactcctgctcgcatctgctatagtggagaccggagcaggaacaggttgaacagtctaccctcccttagcagggaactactcccaccctggagcctccgtagacctaaccatcttctccttacacctagcaggtgtctcctctatcttaggggccatcaatttcatcacaacaattatcaatataaaaccccctgccataacccaataccaaacgcccctcttcgtctgatccgtcctaatcacagcagtcctacttctcctatctctcccagtcctagctgctggcatcactatactactaacagaccgcaacctcaacaccaccttcttcgaccccgccggaggaggagaccccattctataccaacacctattctgatttttcggtcaccctgaagtttatattcttatcctaccaggcttcggaataatctcccatattgtaacttactactccggaaaaaaagaaccatttggatacataggtatggtctgagctatgatatcaattggcttcctagggtttatcgtgtgagcacaccacatatttacagtaggaatagacgtagacacacgagcatatttcacctccgctaccataatcatcgctatccccaccggcgtcaaagtatttagctgactcgccacactccacggaagcaatatgaaatgatctgctgcagtgctctgagccctaggattcatctttcttttcaccgtaggtggcctgactggcattgtattagcaaactcatcactagacatcgtactacacgacacgtactacgttgtagcccacttccactatgtcctatcaataggagctgtatttgccatcataggaggcttcattcactgatttcccctattctcaggctacaccctagaccaaacctacgccaaaatccatttcactatcatattcatcggcgtaaatctaactttcttcccacaacactttctcggcctatccggaatgccccgacgttactcggactaccccgatgcatacaccacatgaaacatcctatcatctgtaggctcattcatttctctaacagcagtaatattaataattttcatgatttgagaagccttcgcttcgaagcgaaaagtcctaatagtagaagaaccctccataaacctggagtgactatatggatgccccccaccctaccacacattcgaagaacccgtatacataaaatctaaacaaaaaaggaaggaatcgaaccccccaaagctggtttcaagccaaccccatggcctccatgactttttcaaaaaggtattagaaaaaccatttcataactttgtcaaagttaaattataggctaaatcctatatatcttaatggcacatgcagcgcaagtaggtctacaagacgctacttcccctatcatagaagagcttatcacctttcatgatcacgccctcataatcattttccttatctgcttcctagtcctgtatgcccttttcctaacactcacaacaaaactaactaatactaacatctcagacgctcaggaaatagaaaccgtctgaactatcctgcccgccatcatcctagtcctcatcgccctcccatccctacgcatcctttacataacagacgaggtcaacgatccctcccttaccatcaaatcaattggccaccaatggtactgaacctacgagtacaccgactacggcggactaatcttcaactcctacatacttcccccattattcctagaaccaggcgacctgcgactccttgacgttgacaatcgagtagtactcccgattgaagcccccattcgtataataattacatcacaagacgtcttgcactcatgagctgtccccacattaggcttaaaaacagatgcaattcccggacgtctaaaccaaaccactttcaccgctacacgaccgggggtatactacggtcaatgctctgaaatctgtggagcaaaccacagtttcatgcccatcgtcctagaattaattcccctaaaaatctttgaaatagggcccgtatttaccctatagcaccccctctaccccctctagagcccactgtaaagctaacttagcattaaccttttaagttaaagattaagagaaccaacacctctttacagtgaaatgccccaactaaatactaccgtatggcccaccataattacccccatactccttacactattcctcatcacccaactaaaaatattaaacacaaactaccacctacctccctcaccaaagcccataaaaataaaaaattataacaaaccctgagaaccaaaatgaacgaaaatctgttcgcttcattcattgcccccacaatcctaggcctacccgccgcagtactgatcattctatttccccctctattgatccccacctccaaatatctcatcaacaaccgactaatcaccacccaacaatgactaatcaaactaacctcaaaacaaatgataaccatacacaacactaaaggacgaacctgatctcttatactagtatccttaatcatttttattgccacaactaacctcctcggactcctgcctcactcatttacaccaaccacccaactatctataaacctagccatggccatccccttatgagcgggcgcagtgattataggctttcgctctaagattaaaaatgccctagcccacttcttaccacaaggcacacctacaccccttatccccatactagttattatcgaaaccatcagcctactcattcaaccaatagccctggccgtacgcctaaccgctaacattactgcaggccacctactcatgcacctaattggaagcgccaccctagcaatatcaaccattaaccttccctctacacttatcatcttcacaattctaattctactgactatcctagaaatcgctgtcgccttaatccaagcctacgttttcacacttctagtaagcctctacctgcacgacaacacataatgacccaccaatcacatgcctatcatatagtaaaacccagcccatgacccctaacaggggccctctcagccctcctaatgacctccggcctagccatgtgatttcacttccactccataacgctcctcatactaggcctactaaccaacacactaaccatataccaatgatggcgcgatgtaacacgagaaagcacataccaaggccaccacacaccacctgtccaaaaaggccttcgatacgggataatcctatttattacctcagaagtttttttcttcgcaggatttttctgagccttttaccactccagcctagcccctaccccccaattaggagggcactggcccccaacaggcatcaccccgctaaatcccctagaagtcccactcctaaacacatccgtattactcgcatcaggagtatcaatcacctgagctcaccatagtctaatagaaaacaaccgaaaccaaataattcaagcactgcttattacaattttactgggtctctattttaccctcctacaagcctcagagtacttcgagtctcccttcaccatttccgacggcatctacggctcaacattttttgtagccacaggcttccacggacttcacgtcattattggctcaactttcctcactatctgcttcatccgccaactaatatttcactttacatccaaacatcactttggcttcgaagccgccgcctgatactggcattttgtagatgtggtttgactatttctgtatgtctccatctattgatgagggtcttactcttttagtataaatagtaccgttaacttccaattaactagttttgacaacattcaaaaaagagtaataaacttcgccttaattttaataatcaacaccctcctagccttactactaataattattacattttgactaccacaactcaacggctacatagaaaaatccaccccttacgagtgcggcttcgaccctatatcccccgcccgcgtccctttctccataaaattcttcttagtagctattaccttcttattatttgatctagaaattgccctccttttacccctaccatgagccctacaaacaactaacctgccactaatagttatgtcatccctcttattaatcatcatcctagccctaagtctggcctatgagtgactacaaaaaggattagactgaaccgaattggtatatagtttaaacaaaacgaatgatttcgactcattaaattatgataatcatatttaccaaatgcccctcatttacataaatattatactagcatttaccatctcacttctaggaatactagtatatcgctcacacctcatatcctccctactatgcctagaaggaataatactatcgctgttcattatagctactctcataaccctcaacacccactccctcttagccaatattgtgcctattgccatactagtctttgccgcctgcgaagcagcggtgggcctagccctactagtctcaatctccaacacatatggcctagactacgtacataacctaaacctactccaatgctaaaactaatcgtcccaacaattatattactaccactgacatgactttccaaaaaacacataatttgaatcaacacaaccacccacagcctaattattagcatcatccctctactattttttaaccaaatcaacaacaacctatttagctgttccccaaccttttcctccgaccccctaacaacccccctcctaatactaactacctgactcctacccctcacaatcatggcaagccaacgccacttatccagtgaaccactatcacgaaaaaaactctacctctctatactaatctccctacaaatctccttaattataacattcacagccacagaactaatcatattttatatcttcttcgaaaccacacttatccccaccttggctatcatcacccgatgaggcaaccagccagaacgcctgaacgcaggcacatacttcctattctacaccctagtaggctcccttcccctactcatcgcactaatttacactcacaacaccctaggctcactaaacattctactactcactctcactgcccaagaactatcaaactcctgagccaacaacttaatatgactagcttacacaatagcttttatagtaaagatacctctttacggactccacttatgactccctaaagcccatgtcgaagcccccatcgctgggtcaatagtacttgccgcagtactcttaaaactaggcggctatggtataatacgcctcacactcattctcaaccccctgacaaaacacatagcctaccccttccttgtactatccctatgaggcataattataacaagctccatctgcctacgacaaacagacctaaaatcgctcattgcatactcttcaatcagccacatagccctcgtagtaacagccattctcatccaaaccccctgaagcttcaccggcgcagtcattctcataatcgcccacgggcttacatcctcattactattctgcctagcaaactcaaactacgaacgcactcacagtcgcatcataatcctctctcaaggacttcaaactctactcccactaatagctttttgatgacttctagcaagcctcgctaacctcgccttaccccccactattaacctactgggagaactctctgtgctagtaaccacgttctcctgatcaaatatcactctcctacttacaggactcaacatactagtcacagccctatactccctctacatatttaccacaacacaatggggctcactcacccaccacattaacaacataaaaccctcattcacacgagaaaacaccctcatgttcatacacctatcccccattctcctcctatccctcaaccccgacatcattaccgggttttcctcttgtaaatatagtttaaccaaaacatcagattgtgaatctgacaacagaggcttacgaccccttatttaccgagaaagctcacaagaactgctaactcatgcccccatgtctaacaacatggctttctcaacttttaaaggataacagctatccattggtcttaggccccaaaaattttggtgcaactccaaataaaagtaataaccatgcacactactataaccaccctaaccctgacttccctaattccccccatccttaccaccctcgttaaccctaacaaaaaaaactcatacccccattatgtaaaatccattgtcgcatccacctttattatcagtctcttccccacaacaatattcatgtgcctagaccaagaagttattatctcgaactgacactgagccacaacccaaacaacccagctctccctaagcttcaaactagactacttctccataatattcatccctgtagcattgttcgttacatggtccatcatagaattctcactgtgatatataaactcagacccaaacattaatcagttcttcaaatatctactcatcttcctaattaccatactaatcttagttaccgctaacaacctattccaactgttcatcggctgagagggcgtaggaattatatccttcttgctcatcagttgatgatacgcccgagcagatgccaacacagcagccattcaagcaatcctatacaaccgtatcggcgatatcggtttcatcctcgccttagcatgatttatcctacactccaactcatgagacccacaacaaatagcccttctaaacgctaacccaagcctcaccccactactaggcctcctcctagcagcagcaggcaaatcagcccaattaggtctccacccctgactcccctcagccatagaaggccccaccccagtctcagccctactccactcaagcactatagttgtagcaggaatcttcttactcatccgcttccaccccctagcagaaaatagcccactaatccaaactctaacactatgcttaggcgctatcaccactctgttcgcagcagtctgcgcccttacacaaaatgacatcaaaaaaatcgtagccttctccacttcaagtcaactaggactcataatagttacaatcggcatcaaccaaccacacctagcattcctgcacatctgtacccacgccttcttcaaagccatactatttatgtgctccgggtccatcatccacaaccttaacaatgaacaagatattcgaaaaataggaggactactcaaaaccatacctctcacttcaacctccctcaccattggcagcctagcattagcaggaatacctttcctcacaggtttctactccaaagaccacatcatcgaaaccgcaaacatatcatacacaaacgcctgagccctatctattactctcatcgctacctccctgacaagcgcctatagcactcgaataattcttctcaccctaacaggtcaacctcgcttccccacccttactaacattaacgaaaataaccccaccctactaaaccccattaaacgcctggcagccggaagcctattcgcaggatttctcattactaacaacatttcccccgcatcccccttccaaacaacaatccccctctacctaaaactcacagccctcgctgtcactttcctaggacttctaacagccctagacctcaactacctaaccaacaaacttaaaataaaatccccactatgcacattttatttctccaacatactcggattctaccctagcatcacacaccgcacaatcccctatctaggccttcttacgagccaaaacctgcccctactcctcctagacctaacctgactagaaaagctattacctaaaacaatttcacagcaccaaatctccacctccatcatcacctcaacccaaaaaggcataattaaactttacttcctctctttcttcttcccactcatcctaaccctactcctaatcacataacctattcccccgagcaatctcaattacaatatatacaccaacaaacaatgttcaaccagtaactactactaatcaacgcccataatcatacaaagcccccgcaccaataggatcctcccgaatcaaccctgacccctctccttcataaattattcaacttcctacactattaaagtttaccacaaccaccaccccatcatactctttcacccacagcaccaatcctacctccatcgctaaccccactaaaacactcaccaagacctcaacccctgacccccatgcctcaggatactcctcaatagccatcgctgtagtatatccaaagacaaccaccattccccctaaataaattaaaaaaactattaaacccatataacctcccccaaaattcagaataataacacacccgaccacaccgctaacaatcaatactaaacccccataaataggagaaggcttagaagaaaaccccacaaaccccattactaaacccacactcaacagaaacaaagcatacatcattattctcgcacggactacaaccacgaccaatgatatgaaaaaccatcgttgtatttcaactacaagaacaccaatgaccccaatacgcaaaactaaccccctaataaaattaattaaccactcattcatcgacctccccaccccatccaacatctccgcatgatgaaacttcggctcactccttggcgcctgcctgatcctccaaatcaccacaggactattcctagccatgcactactcaccagacgcctcaaccgccttttcatcaatcgcccacatcactcgagacgtaaattatggctgaatcatccgctaccttcacgccaatggcgcctcaatattctttatctgcctcttcctacacatcgggcgaggcctatattacggatcatttctctactcagaaacctgaaacatcggcattatcctcctgcttgcaactatagcaacagccttcataggctatgtcctcccgtgaggccaaatatcattctgaggggccacagtaattacaaacttactatccgccatcccatacattgggacagacctagttcaatgaatctgaggaggctactcagtagacagtcccaccctcacacgattctttacctttcacttcatcttgcccttcattattgcagccctagcagcactccacctcctattcttgcacgaaacgggatcaaacaaccccctaggaatcacctcccattccgataaaatcaccttccacccttactacacaatcaaagacgccctcggcttacttctcttccttctctccttaatgacattaacactattctcaccagacctcctaggcgacccagacaattataccctagccaaccccttaaacacccctccccacatcaagcccgaatgatatttcctattcgcctacacaattctccgatccgtccctaacaaactaggaggcgtccttgccctattactatccatcctcatcctagcaataatccccatcctccatatatccaaacaacaaagcataatatttcgcccactaagccaatcactttattgactcctagccgcagacctcctcattctaacctgaatcggaggacaaccagtaagctacccttttaccatcattggacaagtagcatccgtactatacttcacaacaatcctaatcctaataccaactatctccctaattgaaaacaaaatactcaaatgggcctgtccttgtagtataaactaatacaccagtcttgtaaaccggagatgaaaacctttttccaaggacaaatcagagaaaaagtctttaactccaccattagcacccaaagctaagattctaatttaaactattctctgttctttcatggggaagcagatttgggtaccacccaagtattgactcacccatcaacaaccgctatgtatttcgtacattactgccagccaccatgaatattgtacggtaccataaatacttgaccacctgtagtacataaaaacccaatccatatcaaaaccccctccccatgcttacaagcaagtacagcaatcaaccctcaactatcacacatcaactgcaactccaaagccacccctcacccactaggataccaacaaacctacccacccttaacagtacatagtacataaagccatttaccgtacatagcacattacagtcaaatcccttctcgtccccatggatgacccccctcagataggggtcccttgaccaccatcctccgtgaaatcaatatcccgcacaagagtgctactctcctcgctccgggcccataacacttgggggtagctaaagtgaactgtatccgacatctggttcctacttcagggtcataaagcctaaatagcccacacgttccccttaaataagacatcacgatg

SEQ ID NO: 428 - DNA, 16568 bp, Homo sapiens mitochondrial
  3106: "n" refers to a nucleotide at position 3107 of the Cambridge Reference Sequence (CRS, Anderson et al. 1981 Nature 290:457-465), later determined to be absent from the human mtDNA sequence according to the revised CRS (rCRS, Andrews et al. 1999 Nature Genetics 23:147); "n" therefore represents a single nucleotide deletion at a position corresponding to nucleotide 3107 of SEQ ID NO:1 as provided herein.
gatcacaggtctatcaccctattaaccactcacgggagctctccatgcatttggtattttcgtctggggggtgtgcacgcgatagcattgcgagacgctggagccggagcaccctatgtcgcagtatctgtctttgattcctgcctcatcctattatttatcgcacctacgttcaatattacaggtgaacatacttactaaagtgtgttaattaattaatgcttgtaggacataataataacaattgaatgtctgcacagccgctttccacacagacatcataacaaaaaatttccaccaaaccccccctcccccgccttctggccacagcacttaaacacatctctgccaaaccccaaaaacaaagaaccctaacaccagcctaaccagatttcaaattttatcttttggcggtatgcacttttaacagtcaccccccaactaacacattattttcccctcccactcccatactactaatctcatcaacacaacccccgcccatcctacccaacacacacaccgctgctaaccccataccccgaaccaaccaaaccccaaagacaccccccacagtttatgtagcttaccccctcaaagcaatacactgaaaatgtttagacgggctcacatcaccccataaacaaataggtttggtcctagcctttctattagctcttagtaagattacacatgcaagcatccccgttccagtgagttcaccctctaaatcaccacgatcaaaagggacaagcatcaagcacgcagcaatgcagctcaaaacgcttagcctagccacacccccacgggaaacagcagtgattaacctttagcaataaacgaaagtttaactaagctatactaaccccagggttggtcaatttcgtgccagccaccgcggtcacacgattaacccaagtcaatagaagccggcgtaaagagtgttttagatcaccccctccccaataaagctaaaactcacctgagttgtaaaaaactccagttgacacaaaatagactacgaaagtggctttaacatatctgaacacacaatagctaagacccaaactgggattagataccccactatgcttagccctaaacctcaacagttaaatcaacaaaactgctcgccagaacactacgagccacagcttaaaactcaaaggacctggcggtgcttcatatccctctagaggagcctgttctgtaatcgataaaccccgatcaacctcaccacctcttgctcagcctatataccgccatcttcagcaaaccctgatgaaggctacaaagtaagcgcaagtacccacgtaaagacgttaggtcaaggtgtagcccatgaggtggcaagaaatgggctacattttctaccccagaaaactacgatagcccttatgaaacttaagggtcgaaggtggatttagcagtaaactgagagtagagtgcttagttgaacagggccctgaagcgcgtacacaccgcccgtcaccctcctcaagtatacttcaaaggacatttaactaaaacccctacgcatttatatagaggagacaagtcgtaacatggtaagtgtactggaaagtgcacttggacgaaccagagtgtagcttaacacaaagcacccaacttacacttaggagatttcaacttaacttgaccgctctgagctaaacctagccccaaacccactccaccttactaccagacaaccttagccaaaccatttacccaaataaagtataggcgatagaaattgaaacctggcgcaatagatatagtaccgcaagggaaagatgaaaaattataaccaagcataatatagcaaggactaacccctataccttctgcataatgaattaactagaaataactttgcaaggagagccaaagctaagacccccgaaaccagacgagctacctaagaacagctaaaagagcacacccgtctatgtagcaaaatagtgggaagatttataggtagaggcgacaaacctaccgagcctggtgatagctggttgtccaagatagaatcttagttcaactttaaatttgcccacagaaccctctaaatccccttgtaaatttaattgttagtccaaagaggaacagctctttggacactaggaaaaaaccttgtagagagagtaaaaaatttaacacccatagtaggcctaaaagcagccaccaattaagaaagcgttcaagctcaacacccactacctaaaaaatcccaaacatataactgaactcctcacacccaattggaccaatctatcaccctatagaagaactaatgttagtataagtaacatgaaaacattctcctccgcataagcctgcgtcagattaaaacactgaactgacaattaacagcccaatatctacaatcaaccaacaagtcattattaccctcactgtcaacccaacacaggcatgctcataaggaaaggttaaaaaaagtaaaaggaactcggcaaatcttaccccgcctgtttaccaaaaacatcacctctagcatcaccagtattagaggcaccgcctgcccagtgacacatgtttaacggccgcggtaccctaaccgtgcaaaggtagcataatcacttgttccttaaatagggacctgtatgaatggctccacgagggttcagctgtctcttacttttaaccagtgaaattgacctgcccgtgaagaggcgggcatgacacagcaagacgagaagaccctatggagctttaatttattaatgcaaacagtacctaacaaacccacaggtcctaaactaccaaacctgcattaaaaatttcggttggggcgacctcggagcagaacccaacctccgagcagtacatgctaagacttcaccagtcaaagcgaactactatactcaattgatccaataacttgaccaacggaacaagttaccctagggataacagcgcaatcctattctagagtccatatcaacaatagggtttacgacctcgatgttggatcaggacatcccaatggtgcagccgctattaaaggttcgtttgttcaacgattaaagtcctacgtgatctgagttcagaccggagtaatccaggtcggtttctatctacnttcaaattcctccctgtacgaaaggacaagagaaataaggcctacttcacaaagcgccttcccccgtaaatgatatcatctcaacttagtattatacccacacccacccaagaacagggtttgttaagatggcagagcccggtaatcgcataaaacttaaaactttacagtcagaggttcaattcctcttcttaacaacatacccatggccaacctcctactcctcattgtacccattctaatcgcaatggcattcctaatgcttaccgaacgaaaaattctaggctatatacaactacgcaaaggccccaacgttgtaggcccctacgggctactacaacccttcgctgacgccataaaactcttcaccaaagagcccctaaaacccgccacatctaccatcaccctctacatcaccgccccgaccttagctctcaccatcgctcttctactatgaacccccctccccatacccaaccccctggtcaacctcaacctaggcctcctatttattctagccacctctagcctagccgtttactcaatcctctgatcagggtgagcatcaaactcaaactacgccctgatcggcgcactgcgagcagtagcccaaacaatctcatatgaagtcaccctagccatcattctactatcaacattactaataagtggctcctttaacctctccacccttatcacaacacaagaacacctctgattactcctgccatcatgacccttggccataatatgatttatctccacactagcagagaccaaccgaacccccttcgaccttgccgaaggggagtccgaactagtctcaggcttcaacatcgaatacgccgcaggccccttcgccctattcttcatagccgaatacacaaacattattataataaacaccctcaccactacaatcttcctaggaacaacatatgacgcactctcccctgaactctacacaacatattttgtcaccaagaccctacttctaacctccctgttcttatgaattcgaacagcatacccccgattccgctacgaccaactcatacacctcctatgaaaaaacttcctaccactcaccctagcattacttatatgatatgtctccatacccattacaatctccagcattccccctcaaacctaagaaatatgtctgataaaagagttactttgatagagtaaataataggagcttaaacccccttatttctaggactatgagaatcgaacccatccctgagaatccaaaattctccgtgccacctatcacaccccatcctaaagtaaggtcagctaaataagctatcgggcccataccccgaaaatgttggttatacccttcccgtactaattaatcccctggcccaacccgtcatctactctaccatctttgcaggcacactcatcacagcgctaagctcgcactgattttttacctgagtaggcctagaaataaacatgctagcttttattccagttctaaccaaaaaaataaaccctcgttccacagaagctgccatcaagtatttcctcacgcaagcaaccgcatccataatccttctaatagctatcctcttcaacaatatactctccggacaatgaaccataaccaatactaccaatcaatactcatcattaataatcataatggctatagcaataaaactaggaatagccccctttcacttctgagtcccagaggttacccaaggcacccctctgacatccggcctgcttcttctcacatgacaaaaactagcccctatctcaatcatataccaaatctctccctcactaaacgtaagccttctcctcactctctcaatcttatccatcatagcaggcagttgaggtggattaaaccaaacccagctacgcaaaatcttagcatactcctcaattacccacataggatgaataatagcagttctaccgtacaaccctaacataaccattcttaatttaactatttatattatcctaactactaccgcattcctactactcaacttaaactccagcaccacgaccctactactatctcgcacctgaaacaagataacatgactaacacccttaattccatccaccctcctctccctaggaggcctgcccccgctaaccggctttttgcccaaatgggccattatcgaagaattcacaaaaaacaatagcctcatcatccccaccatcatagccaccatcaccctccttaacctctacttctacctacgcctaatctactccacctcaatcacactactccccatatctaacaacgtaaaaataaaatgacagtttgaacatacaaaacccaccccattcctccccacactcatcgcccttaccacgctactcctacctatctccccttttatactaataatcttatagaaatttaggttaaatacagaccaagagccttcaaagccctcagtaagttgcaatacttaatttctgtaacagctaaggactgcaaaaccccactctgcatcaactgaacgcaaatcagccactttaattaagctaagcccttactagaccaatgggacttaaacccacaaacacttagttaacagctaagcaccctaatcaactggcttcaatctacttctcccgccgccgggaaaaaaggcgggagaagccccggcaggtttgaagctgcttcttcgaatttgcaattcaatatgaaaatcacctcggagctggtaaaaagaggcctaacccctgtctttagatttacagtccaatgcttcactcagccattttacctcacccccactgatgttcgccgaccgttgactattctctacaaaccacaaagacattggaacactatacctattattcggcgcatgagctggagtcctaggcacagctctaagcctccttattcgagccgagctgggccagccaggcaaccttctaggtaacgaccacatctacaacgttatcgtcacagcccatgcatttgtaataatcttcttcatagtaatacccatcataatcggaggctttggcaactgactagttcccctaataatcggtgcccccgatatggcgtttccccgcataaacaacataagcttctgactcttacctccctctctcctactcctgctcgcatctgctatagtggaggccggagcaggaacaggttgaacagtctaccctcccttagcagggaactactcccaccctggagcctccgtagacctaaccatcttctccttacacctagcaggtgtctcctctatcttaggggccatcaatttcatcacaacaattatcaatataaaaccccctgccataacccaataccaaacgcccctcttcgtctgatccgtcctaatcacagcagtcctacttctcctatctctcccagtcctagctgctggcatcactatactactaacagaccgcaacctcaacaccaccttcttcgaccccgccggaggaggagaccccattctataccaacacctattctgatttttcggtcaccctgaagtttatattcttatcctaccaggcttcggaataatctcccatattgtaacttactactccggaaaaaaagaaccatttggatacataggtatggtctgagctatgatatcaattggcttcctagggtttatcgtgtgagcacaccatatatttacagtaggaatagacgtagacacacgagcatatttcacctccgctaccataatcatcgctatccccaccggcgtcaaagtatttagctgactcgccacactccacggaagcaatatgaaatgatctgctgcagtgctctgagccctaggattcatctttcttttcaccgtaggtggcctgactggcattgtattagcaaactcatcactagacatcgtactacacgacacgtactacgttgtagctcacttccactatgtcctatcaataggagctgtatttgccatcataggaggcttcattcactgatttcccctattctcaggctacaccctagaccaaacctacgccaaaatccatttcactatcatattcatcggcgtaaatctaactttcttcccacaacactttctcggcctatccggaatgccccgacgttactcggactaccccgatgcatacaccacatgaaacatcctatcatctgtaggctcattcatttctctaacagcagtaatattaataattttcatgatttgagaagccttcgcttcgaagcgaaaagtcctaatagtagaagaaccctccataaacctggagtgactatatggatgccccccaccctaccacacattcgaagaacccgtatacataaaatctagacaaaaaaggaaggaatcgaaccccccaaagctggtttcaagccaaccccatggcctccatgactttttcaaaaaggtattagaaaaaccatttcataactttgtcaaagttaaattataggctaaatcctatatatcttaatggcacatgcagcgcaagtaggtctacaagacgctacttcccctatcatagaagagcttatcacctttcatgatcacgccctcataatcattttccttatctgcttcctagtcctgtatgcccttttcctaacactcacaacaaaactaactaatactaacatctcagacgctcaggaaatagaaaccgtctgaactatcctgcccgccatcatcctagtcctcatcgccctcccatccctacgcatcctttacataacagacgaggtcaacgatccctcccttaccatcaaatcaattggccaccaatggtactgaacctacgagtacaccgactacggcggactaatcttcaactcctacatacttcccccattattcctagaaccaggcgacctgcgactccttgacgttgacaatcgagtagtactcccgattgaagcccccattcgtataataattacatcacaagacgtcttgcactcatgagctgtccccacattaggcttaaaaacagatgcaattcccggacgtctaaaccaaaccactttcaccgctacacgaccgggggtatactacggtcaatgctctgaaatctgtggagcaaaccacagtttcatgcccatcgtcctagaattaattcccctaaaaatctttgaaatagggcccgtatttaccctatagcaccccctctaccccctctagagcccactgtaaagctaacttagcattaaccttttaagttaaagattaagagaaccaacacctctttacagtgaaatgccccaactaaatactaccgtatggcccaccataattacccccatattccttacactattcctcatcacccaactaaaaatattaaacacaaactaccacctacctccctcaccaaagcccataaaaataaaaaattataacaaaccctgagaaccaaaatgaacgaaaatctgttcgcttcattcattgcccccacaatcctaggcctacccgccgcagtactgatcattctatttccccctctattgatccccacctccaaatatctcatcaacaaccgactaatcaccacccaacaatgactaatcaaactaacctcaaaacaaatgatagccatacacaacactaaaggacgaacctgatctcttatactagtatccttaatcatttttattgccacaactaacctcctcggactcctgcctcactcatttacaccaaccacccaactatctataaacctagccatggccatccccttatgagcgggcgcagtgattataggctttcgctctaagattaaaaatgccctagcccacttcttaccacaaggcacacctacaccccttatccccatactagttattatcgaaaccatcagcctactcattcaaccaatagccctggccgtacgcctaaccgctaacattactgcaggccacctactcatgcacctaattggaagcgccaccctagcaatatcaaccattaaccttccctctacacttatcatcttcacaattctaattctactgactatcctagaaatcgctgtcgccttaatccaagcctacgttttcacacttctagtaagcctctacctgcacgacaacacataatgacccaccaatcacatgcctatcatatagtaaaacccagcccatgacccctaacaggggccctctcagccctcctaatgacctccggcctagccatgtgatttcacttccactccataacgctcctcatactaggcctactaaccaacacactaaccatataccaatgatggcgcgatgtaacacgagaaagcacataccaaggccaccacacaccacctgtccaaaaaggccttcgatacgggataatcctatttattacctcagaagtttttttcttcgcaggatttttctgagccttttaccactccagcctagcccctaccccccaactaggagggcactggcccccaacaggcatcaccccgctaaatcccctagaagtcccactcctaaacacatccgtattactcgcatcaggagtatcaatcacctgagctcaccatagtctaatagaaaacaaccgaaaccaaataattcaagcactgcttattacaattttactgggtctctattttaccctcctacaagcctcagagtacttcgagtctcccttcaccatttccgacggcatctacggctcaacattttttgtagccacaggcttccacggacttcacgtcattattggctcaactttcctcactatctgcttcatccgccaactaatatttcactttacatccaaacatcactttggcttcgaagccgccgcctgatactggcattttgtagatgtggtttgactatttctgtatgtctccatctattgatgagggtcttactcttttagtataaatagtaccgttaacttccaattaactagttttgacaacattcaaaaaagagtaataaacttcgccttaattttaataatcaacaccctcctagccttactactaataattattacattttgactaccacaactcaacggctacatagaaaaatccaccccttacgagtgcggcttcgaccctatatcccccgcccgcgtccctttctccataaaattcttcttagtagctattaccttcttattatttgatctagaaattgccctccttttacccctaccatgagccctacaaacaactaacctgccactaatagttatgtcatccctcttattaatcatcatcctagccctaagtctggcctatgagtgactacaaaaaggattagactgagctgaattggtatatagtttaaacaaaacgaatgatttcgactcattaaattatgataatcatatttaccaaatgcccctcatttacataaatattatactagcatttaccatctcacttctaggaatactagtatatcgctcacacctcatatcctccctactatgcctagaaggaataatactatcgctgttcattatagctactctcataaccctcaacacccactccctcttagccaatattgtgcctattgccatactagtctttgccgcctgcgaagcagcggtgggcctagccctactagtctcaatctccaacacatatggcctagactacgtacataacctaaacctactccaatgctaaaactaatcgtcccaacaattatattactaccactgacatgactttccaaaaaacacataatttgaatcaacacaaccacccacagcctaattattagcatcatccccctactattttttaaccaaatcaacaacaacctatttagctgttccccaaccttttcctccgaccccctaacaacccccctcctaatactaactacctgactcctacccctcacaatcatggcaagccaacgccacttatccagtgaaccactatcacgaaaaaaactctacctctctatactaatctccctacaaatctccttaattataacattcacagccacagaactaatcatattttatatcttcttcgaaaccacacttatccccaccttggctatcatcacccgatgaggcaaccagccagaacgcctgaacgcaggcacatacttcctattctacaccctagtaggctcccttcccctactcatcgcactaatttacactcacaacaccctaggctcactaaacattctactactcactctcactgcccaagaactatcaaactcctgagccaacaacttaatatgactagcttacacaatagcttttatagtaaagatacctctttacggactccacttatgactccctaaagcccatgtcgaagcccccatcgctgggtcaatagtacttgccgcagtactcttaaaactaggcggctatggtataatacgcctcacactcattctcaaccccctgacaaaacacatagcctaccccttccttgtactatccctatgaggcataattataacaagctccatctgcctacgacaaacagacctaaaatcgctcattgcatactcttcaatcagccacatagccctcgtagtaacagccattctcatccaaaccccctgaagcttcaccggcgcagtcattctcataatcgcccacggacttacatcctcattactattctgcctagcaaactcaaactacgaacgcactcacagtcgcatcataatcctctctcaaggacttcaaactctactcccactaatagctttttgatgacttctagcaagcctcgctaacctcgccttaccccccactattaacctactgggagaactctctgtgctagtaaccacgttctcctgatcaaatatcactctcctacttacaggactcaacatactagtcacagccctatactccctctacatatttaccacaacacaatggggctcactcacccaccacattaacaacataaaaccctcattcacacgagaaaacaccctcatgttcatacacctatcccccattctcctcctatccctcaaccccgacatcattaccgggttttcctcttgtaaatatagtttaaccaaaacatcagactgtgaatctgacaacagaggcttacgaccccttatttaccgagaaagctcacaagaactgctaactcatgcccccatgtctaacaacatggctttctcaacttttaaaggataacagctatccattggtcttaggccccaaaaattttggtgcaactccaaataaaagtaataaccatgcacactactataaccaccctaaccctgacttccctaattccccccatccttaccaccctcgttaaccctaacaaaaaaaactcatacccccattatgtaaaatccattgtcgcatccacctttattatcagtctcttccccacaacaatattcatgtgcctagaccaagaagttattatctcgaactgacactgagccacaacccaaacaacccagctctccctaagcttcaaactagactacttctccataatattcatccctgtagcattgttcgttacatggtccatcatagaattctcactgtgatatataaactcagacccaaacattaatcagttcttcaaatatctactcattttcctaattaccatactaatcttagttaccgctaacaacctattccaactgttcatcggctgagagggcgtaggaattatatccttcttgctcatcagttgatgatacgcccgagcagatgccaacacagcagccattcaagcaatcctatacaaccgtatcggcgatatcggtttcatcctcgccttagcatgatttatcctacactccaactcatgagacccacaacaaatagcccttctaaacgctaatccaagcctcaccccactactaggcctcctcctagcagcagcaggcaaatcagcccaattaggtctccacccctgactcccctcagccatagaaggccccaccccagtctcagccctactccactcaagcactatagttgtagcaggaatcttcttactcatccgcttccaccccctagcagaaaatagcccactaatccaaactctaacactatgcttaggcgctatcaccactctgttcgcagcagtctgcgcccttacacaaaatgacatcaaaaaaatcgtagccttctccacttcaagtcaactaggactcataatagttacaatcggcatcaaccaaccacacctagcattcctgcacatctgtacccacgccttcttcaaagccatactatttatgtgctccgggtccatcatccacaaccttaacaatgaacaagatattcgaaaaataggaggactactcaaaaccatacctctcacttcaacctccctcaccattggcagcctagcattagcaggaatacctttcctcacaggtttctactccaaagaccacatcatcgaaaccgcaaacatatcatacacaaacgcctgagccctatctattactctcatcgctacctccctgacaagcgcctatagcactcgaataattcttctcaccctaacaggtcaacctcgcttccccacccttactaacattaacgaaaataaccccaccctactaaaccccattaaacgcctggcagccggaagcctattcgcaggatttctcattactaacaacatttcccccgcatcccccttccaaacaacaatccccctctacctaaaactcacagccctcgctgtcactttcctaggacttctaacagccctagacctcaactacctaaccaacaaacttaaaataaaatccccactatgcacattttatttctccaacatactcggattctaccctagcatcacacaccgcacaatcccctatctaggccttcttacgagccaaaacctgcccctactcctcctagacctaacctgactagaaaagctattacctaaaacaatttcacagcaccaaatctccacctccatcatcacctcaacccaaaaaggcataattaaactttacttcctctctttcttcttcccactcatcctaaccctactcctaatcacataacctattcccccgagcaatctcaattacaatatatacaccaacaaacaatgttcaaccagtaactactactaatcaacgcccataatcatacaaagcccccgcaccaataggatcctcccgaatcaaccccgacccctctccttcataaattattcagcttcctacactattaaagtttaccacaaccaccaccccatcatactctttcacccacagcaccaatcctacctccatcgctaaccccactaaaacactcaccaagacctcaacccctgacccccatgcctcaggatactcctcaatagccatcgctgtagtatatccaaagacaaccatcattccccctaaataaattaaaaaaactattaaacccatataacctcccccaaaattcagaataataacacacccgaccacaccgctaacaatcaatactaaacccccataaataggagaaggcttagaagaaaaccccacaaaccccattactaaacccacactcaacagaaacaaagcatatatcattattctcgcacggactacaaccacgaccaatgatatgaaaaaccatcgttgtatttcaactacaagaacaccaatgaccccaatacgcaaaattaaccccctaataaaactaattaaccactcattcatcgacctccccaccccatccaacatctccgcatgatgaaacttcggctcactccttggcgcctgcctgatcctccaaatcaccacaggactattcctagccatgcactactcaccagacgcctcaaccgccttttcatcaatcgcccacatcactcgagacgtaaattatggctgaatcatccgctaccttcacgccaatggcgcctcaatattctttatctgcctcttcctacacatcggacgaggcctatattacggatcatttctctactcagaaacctgaaacatcggcattatcctcctgcttgcaactatagcaacagccttcataggctatgtcctcccgtgaggccaaatatcattctgaggggccacagtaattacaaacttactatccgccatcccatacattgggacagacctagttcaatgaatctgaggaggctactcagtagacagtcccaccctcacacgattctttacctttcacttcatcttacccttcattattgcagccctagcagcactccacctcctattcttgcacgaaacgggatcaaacaaccccctaggaatcacctcccattccgataaaatcaccttccacccttactacacaatcaaagacgccctcggcttacttctcttccttctctccttaatgacattaacactattctcaccagacctcctaggcgacccagacaattataccctagccaaccccttaaacacccctccccacatcaagcccgaatgatatttcctattcgcctacacaattctccgatccgtccctaacaaactaggaggcgtccttgccctattactatccatcctcatcctagcaataatccccatcctccatatatccaaacaacaaagcataatatttcgcccactaagccaatcactttattgactcctagccgcagacctcctcattctaacctgaatcggaggacaaccagtaagctacccttttaccatcattggacaagtagcatccgtactatacttcacaacaatcctaatcctaataccaactatctccctaattgaaaacaaaatactcaaatgggcctgtccttgtagtataaactaatacaccagtcttgtaaaccggagatgaaaacctttttccaaggacaaatcagagaaaaagtctttaactccaccattagcacccaaagctaagattctaatttaaactattctctgttctttcatggggaagcagatttgggtaccacccaagtattgactcacccatcaacaaccgctatgtatttcgtacattactgccagccaccatgaatattgtacggtaccataaatacttgaccacctgtagtacataaaaacccaatccacatcaaaaccccctccccatgcttacaagcaagtacagcaatcaaccttcaactatcacacatcaactgcaactccaaagccacccctcacccactaggataccaacaaacctacccacccttaacagtacatagtacataaagccattcaccgtacatagcacattacagtcaaatcccttctcgcccccatggatgacccccctcagataggggtcccttgaccaccatcctccgtgaaatcaatatcccgcacaagagtgctactctcctcgctccgggcccataacacttgggggtagctaaagtgaactgtatccgacatctggttcctacttcagggtcataaagcctaaatagcccacacgttccccttaaataagacatcacgatg

SEQ ID NO: 429 - DNA, 16570 bp, Homo sapiens mitochondrial
  3108: "n" refers to a nucleotide at position 3107 of the Cambridge Reference Sequence (CRS, Anderson et al. 1981 Nature 290:457-465), later determined to be absent from the human mtDNA sequence according to the revised CRS (rCRS, Andrews et al. 1999 Nature Genetics 23:147); "n" therefore represents a single nucleotide deletion at a position corresponding to nucleotide 3107 of SEQ ID NO:1 as provided herein.
gatcacaggtctatcaccctattaaccactcacgggagctctccatgcatttggtattttcgtctggggggtgtgcacgcgatagcattgcgagacgctggagccggagcaccctatgtcgcagtatctgtctttgattcctgcctcatcctattatttatcgcacctacgttcaatattacaggcgaacatacctactaaagtgtgttaattaattaatgcttacaggacataataataacaattgaatgtctgcacagccgctttccacacagacatcataacaaaaaatttccaccaaaccccccctcccccgccttctggccacagcacttaaacacatctctgccaaaccccaaaaacaaagaaccctaacaccagcctaaccagatttcaaattttatcttttggcggtatgcacttttaacagtcaccccccaactaacacattattttcccctcccactcccatactactaatctcatcaatacaacccccgcccatcctacccagcacacacacaccgctgctaaccccataccccgaaccaaccaaaccccaaagacaccccccacagtttatgtagcttacctcctcaaagcaatacactgaaaatgtttagacgggctcacatcaccccataaacaaataggtttggtcctagcctttctattagctcttagtaagattacacatgcaagcatccccgttccagtgagttcaccctctaaatcaccacgatcaaaagggacaagcatcaagcacgcagcaatgcagctcaaaacgcttagcctagccacacccccacgggaaacagcagtgattaacctttagcaataaacgaaagtttaactaagctatactaaccccagggttggtcaatttcgtgccagccaccgcggtcacacgattaacccaagtcaatagaagccggcgtaaagagtgttttagatcaccccctccccaataaagctaaaactcacctgagttgtaaaaaactccagttgacacaaaatagactacgaaagtggctttaacatatctgaacacacaatagctaagacccaaactgggattagataccccactatgcttagccctaaacctcaacagttaaatcaacaaaactgctcgccagaacactacgagccacagcttaaaactcaaaggacctggcggtgcttcatatccctctagaggagcctgttctgtaatcgataaaccccgatcaacctcaccacctcttgctcagcctatataccgccatcttcagcaaaccctgatgaaggctacaaagtaagcgcaagtacccacgtaaagacgttaggtcaaggtgtagcccatgaggtggcaagaaatgggctacattttctaccccagaaaactacgatagcccttatgaaacttaagggtcgaaggtggatttagcagtaaactgagagtagagtgcttagttgaacagggccctgaagcgcgtacacaccgcccgtcaccctcctcaagtatacttcaaaggacatttaactaaaacccctacgcatttatatagaggagacaagtcgtaacatggtaagtgtactggaaagtgcacttggacgaaccagagtgtagcttaacacaaagcacccaacttacacttaggagatttcaacttaacttgaccgctctgagctaaacctagccccaaacccactccaccttactaccagacaaccttaaccaaaccatttacccaaataaagtataggcgatagaaattgaaacctggcgcaatagatatagtaccgcaagggaaagatgaaaaattataaccaagcataatatagcaaggactaacccctataccttctgcataatgaattaactagaaataactttgcaaggagagccaaagctaagacccccgaaaccagacgagctacctaagaacagctaaaagagcacacccgtctatgtagcaaaatagtgggaagatttataggtagaggcgacaaacctaccgagcctggtgatagctggttgtccaagatagaatcttagttcaactttaaatttgcccacagaaccctctaaatccccttgtaaatttaactgttagtccaaagaggaacagctctttggacactaggaaaaaaccttgtagagagagtaaaaaatttaacacccatagtaggcctaaaagcagccaccaattaagaaagcgttcaagctcaacacccactacctaaaaaatcccaaacatataactgaactcctcacacccaattggaccaatctatcaccctatagaagaactaatgttagtataagtaacatgaaaacattctcctccgcataagcctgcgtcagattaaaacactgaactgacaattaacagcccaatatctacaatcaaccaacaagtcattattaccctcactgtcaacccaacacaggcatgctcataaggaaaggttaaaaaaagtaaaaggaactcggcaaatcttaccccgcctgtttaccaaaaacatcacctctagcatcaccagtattagaggcaccgcctgcccagtgacacatgtttaacggccgcggtaccctaaccgtgcaaaggtagcataatcacttgttccttaaatagggacctgtatgaatggctccacgagggttcagctgtctcttacttttaaccagtgaaattgacctgcccgtgaagaggcgggcatgacacagcaagacgagaagaccctatggagctttaatttattaatgcaaacagtacctaacaaacccacaggtcctaaactaccaaacctgcattaaaaatttcggttggggcgacctcggagcagaacccaacctccgagcagtacatgctaagacttcaccagtcaaagcgaactactatactcaattgatccaataacttgaccaacggaacaagttaccctagggataacagcgcaatcctattctagagtccatatcaacaatagggtttacgacctcgatgttggatcaggacatcccgatggtgcagccgctattaaaggttcgtttgttcaacgattaaagtcctacgtgatctgagttcagaccggagtaatccaggtcggtttctatctacnttcaaattcctccctgtacgaaaggacaagagaaataaggcctacttcacaaagcgccttcccccgtaaatgatatcatctcaacttagtattatacccacacccacccaagaacagggtttgttaagatggcagagcccggtaatcgcataaaacttaaaactttacagtcagaggttcaattcctcttcttaacaacatacccatggccaacctcctactcctcattgtacccattctaatcgcaatggcattcctaatgcttaccgaacgaaaaattctaggctatatacaactacgcaaaggccccaacgttgtaggcccctacgggctactacaacccttcgctgacgccataaaactcttcaccaaagagcccctaaaacccgccacatctaccatcaccctctacatcaccgccccgaccttagctctcaccatcgctcttctactatgaacccccctccccatacccaaccccctggtcaacctcaacctaggcctcctatttattctagccacctctagcctagccgtttactcaatcctctgatcagggtgagcatcaaactcaaactacgccctgatcggcgcactgcgagcagtagcccaaacaatctcatatgaagtcaccctagccatcattctactatcaacattactaataagtggctcctttaacctctccacccttatcacaacacaagaacacctctgattactcctgccatcatgacccttggccataatatgatttatctccacactagcagagaccaaccgaacccccttcgaccttgccgaaggggagtccgaactagtctcaggcttcaacatcgaatacgccgcaggccccttcgccctattcttcatagccgaatacacaaacattattataataaacaccctcaccactacaatcttcctaggaacaacatatgacgcactctcccctgaactctacacaacatattttgtcaccaagaccctacttctaacctccctgttcttatgaattcgaacagcatacccccgattccgctacgaccaactcatacacctcctatgaaaaaacttcctaccactcaccctagcattacttatatgatatgtctccatacccattacaatctccagcattccccctcaaacctaagaaatatgtctgataaaagagttactttgatagagtaaataataggagcttaaacccccttatttctaggactatgagaatcgaacccatccctgagaatccaaaattctccgtgccacctatcacaccccatcctaaagtaaggtcagctaaataagctatcgggcccataccccgaaaatgttggttatacccttcccgtactaattaatcccctggcccaacccgtcatctactctaccatctttgcaggcacactcatcacagcgctaagctcgcactgattttttacctgagtaggcctagaaataaacatgctagcttttattccagttctaaccaaaaaaataaaccctcgttccacagaagctgccatcaagtatttcctcacgcaagcaaccgcatccataatccttctaatagctatcctcttcaacaatatactctccggacaatgaaccataaccaatactaccaatcaatactcatcattaataatcataatggctatagcaataaaactaggaatagccccctttcacttctgagtcccagaggttacccaaggcacccctctgacatccggcctgcttcttctcacatgacaaaaactagcccccatctcaatcatataccaaatctctccctcactaaacgtaagccttctcctcactctctcaatcttatccatcatagcaggcagttgaggtggattaaaccaaacccagctacgcaaaatcttagcatactcctcaattacccacataggatgaataatagcagttctaccgtacaaccctaacataaccattcttaatttaactatttatattatcctaactactaccgcattcctactactcaacttaaactccagcaccacgaccctactactatctcgcacctgaaacaagctaacatgactaacacccttaattccatccaccctcctctccctaggaggcctgcccccgctaaccggctttttgcccaaatgggccattatcgaagaattcacaaaaaacaatagcctcatcatccccaccatcatagccaccatcaccctccttaacctctacttctacctacgcctaatctactccacctcaatcacactactccccatatctaacaacgtaaaaataaaatgacagtttgaacatacaaaacccaccccattcctccccacactcatcgcccttaccacgctactcctacctatctccccttttatactaataatcttatagaaatttaggttaaatacagaccaagagccttcaaagccctcagtaagttgcaatacttaatttctgtaacagctaaggactgcaaaaccccactctgcatcaactgaacgcaaatcagccactttaattaagctaagcccttactagaccaatgggacttaaacccacaaacacttagttaacagctaagcaccctaatcaactggcttcaatctacttctcccgccgccgggaaaaaaggcgggagaagccccggcaggtttgaagctgcttcttcgaatttgcaattcaatatgaaaatcacctcggagctggtaaaaagaggcctaacccctgtctttagatttacagtccaatgcttcactcagccattttacctcacccccactgatgttcgccgaccgttgactattctctacaaaccacaaagacattggaacactatacctattattcggcgcatgagctggagtcctaggcacagctctaagcctccttattcgagccgagctgggccagccaggcaaccttctaggtaacgaccacatctacaacgttatcgtcacagcccatgcatttgtaataatcttcttcatagtaatacccatcataatcggaggctttggcaactgactagttcccctaataatcggtgcccccgatatggcgtttccccgcataaacaacataagcttctgactcttacccccctctctcctactcctgctcgcatctgctatagtggaggccggagcaggaacaggttgaacagtctaccctcccttagcagggaactactcccaccctggagcctccgtagacctaaccatcttctccttacacctagcaggtgtctcttctatcttaggggccatcaatttcatcacaacaattatcaatataaaaccccctgccataacccaataccaaacgcccctcttcgtctgatccgtcctaatcacagcagtcctacttctcctatctctcccagtcctagctgctggcatcactatactactaacagaccgcaacctcaacaccaccttcttcgaccccgccggaggaggagaccccattctataccaacacctattctgatttttcggtcaccctgaagtttatattcttatcctaccaggcttcggaataatctcccatattgtaacttactactccggaaaaaaagaaccatttggatacataggtatggtctgagctatgatatcaattggcttcctagggtttatcgtgtgagcacaccatatatttacagtaggaatagacgtagacacacgagcatatttcacctccgctaccataatcatcgctatccccaccggcgtcaaagtatttagctgactcgccacactccacggaagcaatatgaaatgatctgctgcagtgctctgagccctaggattcatctttcttttcaccgtaggtggcctgactggcattgtattagcaaactcatcactagacatcgtactacacgacacgtactacgttgtagctcacttccactatgtcctatcaataggagctgtatttgccatcataggaggcttcattcactgatttcccctattctcaggctacaccctagaccaaacctacgccaaaatccatttcactatcatattcatcggcgtaaatctaactttcttcccacaacactttctcggcctatccggaatgccccgacgttactcggactaccccgatgcatacaccacatgaaacatcctatcatctgtaggctcattcatttctctaacagcagtaatattaataattttcatgatttgagaagccttcgcttcgaagcgaaaagtcctaatagtagaagaaccctccataaacctggagtgactatatggatgccccccaccctaccacacattcgaagaacccgtatacataaaatctagacaaaaaaggaaggaatcgaaccccccaaagctggtttcaagccaaccccatggcctccatgactttttcaaaaaggtattagaaaaaccatttcataactttgtcaaagttaaattataggctaaatcctatatatcttaatggcacatgcagcgcaagtaggtctacaagacgctacttcccctatcatagaagagcttatcacctttcatgatcacgccctcataatcattttccttatctgcttcctagtcctgtatgcccttttcctaacactcacaacaaaactaactaatactaacatctcagacgctcaggaaatagaaaccgtctgaactatcctgcccgccatcatcctagtcctcatcgccctcccatccctacgcatcctttacataacagacgaggtcaacgatccctcccttaccatcaaatcaattggccaccaatggtactgaacctacgagtacaccgactacggcggactaatcttcaactcctacatacttcccccattattcctagaaccaggcgacctgcgactccttgacgttgacaatcgagtagtactcccgattgaagcccccattcgtataataattacatcacaagacgtcttgcactcatgagctgtccccacattaggcttaaaaacagatgcaattcccggacgtctaaaccaaaccactttcaccgctacacgaccgggggtatactacggtcaatgctctgaaatctgtggagcaaaccacagtttcatgcccatcgtcctagaattaattcccctaaaaatctttgaaatagggcccgtatttaccctatagcaccccctctaccccctctagagcccactgtaaagctaacttagcattaaccttttaagttaaagattaagagaaccaacacctctttacagtgaaatgccccaactaaatactaccgtatggtccaccataattacccccatactccttacactattcctcatcacccaactaaaaatattaaacacaaactaccacctacctccctcaccaaagcccataaaaataaaaaattataacaaaccctgagaaccaaaatgaacgaaaatctgttcgcttcattcattgcccccacaatcctaggcctacccgccgcagtactgatcattctatttccccctctattgatccccacctccaaatatctcatcaacaaccgactaatcaccacccaacaatgactaatcaaactaacctcaaaacaaatgataaccatacacaacactaaaggacgaacctgatctcttatactagtatccttaatcatttttattgccacaactaacctcctcggactcctgcctcactcatttacaccaaccacccaactatctataaacctagccatggccatccccttatgagcgggcgcagtgattataggctttcgctctaagattaaaaatgccctagcccacttcttaccacaaggcacacctacaccccttatccccatactagttattatcgaaaccatcagcctactcattcaaccaatagccctggccgtacgcctaaccgctaacattactgcaggccacctactcatgcacctaattggaagcgccaccctagcaatatcaaccattaaccttccctctacacttatcatcttcacaattctaattctactgactatcctagaaatcgctgtcgccttaatccaagcctacgttttcacacttctagtaagcctctacctgcacgacaacacataatgacccaccaatcacatgcctatcatatagtaaaacccagcccatgacccctaacaggggccctctcagccctcctaatgacctccggcctagccatgtgatttcacttccactccataacgctcctcatactaggcctactaaccaacacactaaccatataccaatgatggcgcgatgtaacacgagaaagcacataccaaggccaccacacaccacctgtccaaaaaggccttcgatacgggataatcctatttattacctcagaagtttttttcttcgcaggatttttctgagccttttaccactccagcctagcccctaccccccaattaggagggcactggcccccaacaggcatcaccccgctaaatcccctagaagtcccactcctaaacacatccgtattactcgcatcaggagtatcaatcacctgagctcaccatagtctaatagaaaacaaccgaaaccaaataattcaagcactgcttattacaattttactgggtctctattttaccctcctacaagcctcagagtacttcgagtctcccttcaccatttccgacggcatctacggctcaacattttttgtagccacaggcttccacggacttcacgtcattattggctcaactttcctcactatctgcttcatccgccaactaatatttcactttacatccaaacatcactttggcttcgaagccgccgcctgatactggcattttgtagatgtggtttgactatttctgtatgtctccatctattgatgagggtcttactcttttagtataaatagtaccgttaacttccaattaactagttttgacaacattcaaaaaagagtaataaacttcgccttaattttaataatcaacaccctcctagccttactactaataattattacattttgactaccacaactcaacggctacatagaaaaatccaccccttacgagtgcggcttcgaccctatatcccccgcccgcgtccctttctccataaaattcttcttagtagctattaccttcttattatttgatctagaaattgccctccttttacccctaccatgagccctacaaacaactaacctgccactaatagttatgtcatccctcttattaatcatcatcctagccctaagtctggcctatgagtgactacaaaaaggattagactgaaccgaattggtatatagtttaaacaaaacgaatgatttcgactcattaaattatgataatcatatttaccaaatgcccctcatttacataaatattatactagcatttaccatctcacttctaggaatactagtatatcgctcacacctcatatcctccctactatgcctagaaggaataatactatcgctgttcattatagctactctcataaccctcaacacccactccctcttagccaatattgtgcctattgccatactagtctttgccgcctgcgaagcagcggtgggcctagccctactagtctcaatctccaacacatatggcctagactacgtacataacctaaacctactccaatgctaaaactaatcgtcccaacaattatattactaccactgacatgactttccaaaaaacacataatttgaatcaacacaaccacccacagcctaattattagcatcatccctctactattttttaaccaaatcaacaacaacctatttagctgttccccaaccttttcctccgaccccctaacaacccccctcctaatactaactacctgactcctacccctcacaatcatggcaagccaacgccacttatccagtgaaccactatcacgaaaaaaactctacctctctatactaatctccctacaaatctccttaattataacattcacagccacagaactaatcatattttatatcttcttcgaaaccacacttatccccaccttggctatcatcacccgatgaggcaaccagccagaacgcctgaacgcaggcacatacttcctattctacaccctagtaggctcccttcccctactcatcgcactaatttacactcacaacaccctaggctcactaaacattctactactcactctcactgcccaagaactatcaaactcctgagccaacaacttaatatgactagcttacacaatagcttttatagtaaagatacctctttacggactccacttatgactccctaaagcccatgtcgaagcccccatcgctgggtcaatagtacttgccgcagtactcttaaaactaggcggctatggtataatacgcctcacactcattctcaaccccctgacaaaacacatagcctaccccttccttgtactatccctatgaggcataattataacaagctccatctgcctacgacaaacagacctaaaatcgctcattgcatactcttcaatcagccacatagccctcgtagtaacagccattctcatccaaaccccctgaagcttcaccggcgcagtcattctcataatcgcccacggacttacatcctcattactattctgcctagcaaactcaaactacgaacgcactcacagtcgcatcataatcctctctcaaggacttcaaactctactcccactaatagctttttgatgacttctagcaagcctcgctaacctcgccttaccccccactattaacctactgggagaactctctgtgctagtaaccacgttctcctgatcaaatatcactctcctacttacaggactcaacatactagtcacagccctatactccctctacatatttaccacaacacaatggggctcactcacccaccacattaacaacataaaaccctcattcacacgagaaaacaccctcatgttcatacacctatcccccattctcctcctatccctcaaccccgacatcattaccgggttttcctcttgtaaatatagtttaaccaaaacatcagattgtgaatctgacaacagaggcttacgaccccttatttaccgagaaagctcacaagaactgctaactcatgcccccatgtctaacaacatggctttctcaacttttaaaggataacagctatccattggtcttaggccccaaaaattttggtgcaactccaaataaaagtaataaccatgcacactactataaccaccctaaccctgacttccctaattccccccatccttaccaccctcgttaaccctaacaaaaaaaactcatacccccattatgtaaaatccattgtcgcatccacctttattatcagtctcttccccacaacaatattcatgtgcctagaccaagaagttattatctcgaactgacactgagccacaacccaaacaacccagctctccctaagcttcaaactagactacttctccataatattcatccctgtagcattgttcgttacatggtccatcatagaattctcactgtgatatataaactcagacccaaacattaatcagttcttcaaatatctactcattttcctaattaccatactaatcttagttaccgctaacaacctattccaactgttcatcggctgagagggcgtaggaattatatccttcttgctcatcagttgatgatacgcccgagcagatgccaacacagcagccattcaagcaatcctatacaaccgtatcggcgatatcggtttcatcctcgccttagcatgatttatcctacactccaactcatgagacccacaacaaatagcccttctaaacgctaatccaagcctcaccccactactaggcctcctcctagcagcagcaggcaaatcagcccaattaggtctccacccctgactcccctcagccatagaaggccccaccccagtctcagccctactccactcaagcactatagttgtagcaggaatcttcttactcatccgcttccaccccctagcagaaaatagcccactaatccaaactctaacactatgcttaggcgctatcaccactctgttcgcagcagtctgcgcccttacacaaaatgacatcaaaaaaatcgtagccttctccacttcaagtcaactaggactcataatagttacaatcggcatcaaccaaccacacctagcattcctgcacatctgtacccacgccttcttcaaagccatactatttatgtgctccgggtccatcatccacaaccttaacaatgaacaagatattcgaaaaataggaggactactcaaaaccatacctctcacttcaacctccctcaccattggcagcctagcattagcaggaatacctttcctcacaggtttctactccaaagaccacatcatcgaaaccgcaaacatatcatacacaaacgcctgagccctatctattactctcatcgctacctccctgacaagcgcctatagcactcgaataattcttctcaccctaacaggtcaacctcgcttccccacccttactaacattaacgaaaataaccccaccctactaaaccccattaaacgcctgacagccggaagcctattcgcaggatttctcattactaacaacatttcccccgcatcccccttccaaacaacaatccccctctacctaaaactcacagccctcgctgtcactttcctaggacttctaacagccctagacctcaactacctaaccaacaaacttaaaataaaatccccactatgcacattttatttctccaacatactcggattctaccctagcatcacacaccgcacaatcccctatctaggccttcttgcgagccaaaacctgcccctactcctcctagacctaacctgactagaaaagctattacctaaaacaatttcacagcaccaaatctccacctccatcatcacctcaacccaaaaaggcataattaaactttacttcctctctttcttcttcccactcatcctaaccctactcctaatcacataacctattcccccgagcaatctcaattacaatatatacaccaacaaacaatgttcaaccagtaactactactaatcaacgcccataatcatacaaagcccccgcaccaataggatcctcccgaatcaaccctgacccctctccttcataaattattcagcttcctacactattaaagtttaccacaaccaccaccccatcatactctttcacccacagcaccaatcctacctccatcgctaaccccactaaaacactcaccaagacctcaacccctgacccccatgcctcaggatactcctcaatagccatcgctgtagtatacccaaagacaaccatcattccccctaaataaattaaaaaaactattaaacccatataacctcccccaaaattcagaataataacacacccgaccacaccgctaacaatcaatactaaacccccataaataggagaaggcttagaagaaaaccccacaaaccccattactaaacccacactcaacagaaacaaagcatacatcattattctcgcacggactacaaccacgaccaatgatatgaaaaaccatcgttgtatttcaactacaagaacaccaatgaccccaatacgcaaaattaaccccctaataaaattaattaaccactcattcatcgacctccccaccccatccaacatctccgcatgatgaaacttcggctcactccttggcgcctgcctgatcctccaaatcaccacaggactattcctagccatgcactactcaccagacgcctcaaccgccttttcatcaatcgcccacatcactcgagacgtaaattatggctgaatcatccgctaccttcacgccaatggcgcctcaatattctttatctgcctcttcctacacatcgggcgaggcctatattacggatcatttctctactcagaaacctgaaacatcggcattatcctcctgcttgcaactatagcaacagccttcataggctatgtcctcccgtgaggccaaatatcattctgaggggccacagtaattacaaacttactatccgccatcccatacattgggacagacctagttcaatgaatctgaggaggctactcagtagacagtcccaccctcacacgattctttacctttcacttcatcttgcccttcattattgcagccctagcagcactccacctcctattcttgcacgaaacgggatcaaacaaccccctaggaatcacctcccattccgataaaatcaccttccacccttactacacaatcaaagacgccctcggcttacttctcttccttctctccttaatgacattaacactattctcaccagacctcctaggcgacccagacaattataccctagccaaccccttaaacacccctccccacatcaagcccgaatgatatttcctattcgcctacacaattctccgatccgtccctaacaaactaggaggcgtccttgccctattactatccatcctcatcctagcaataatccccatcctccatatatccaaacaacaaagcataatatttcgcccactaagccaatcactttattgactcctagccgcagacctcctcattctaacctgaatcggaggacaaccagtaagctacccttttaccatcattggacaagtagcatccgtactatacttcacaacaatcctaatcctaataccaactatctccctaattgaaaacaaaatactcaaatgggcctgtccttgtagtataaactaatacaccagtcttgtaaaccagagatgaaaacctttttccaaggacaaatcagagaaaaagtctttaactccaccattagcacccaaagctaagattctaatttaaactattctctgttctttcatggggaagcagatttgggtaccacccaagtattgactcacccatcaacaaccgctatgtatttcgtacattactgccagccaccatgaatattgtacggtaccataaatacttgaccacctgtagtacataaaaacccaatccacatcaaaaccccccccccatgcttacaagcaagtacagcaatcaaccttcaactatcacacatcaactgcaactccaaagccacccctcacccactaggatatcaacaaacctacccacccttaacagtacatagtacataaagccatttaccgtacatagcacattacagtcaaatcccttctcgtccccatggatgacccccctcagataggggtcccttgaccaccatcctccgtgaaatcaatatcccgcacaagagtgctactctcctcgctccgggcccataacacttgggggtagctaaagtgaactgtatccgacatctggttcctacttcagggccataaagcctaaatagcccacacgttccccttaaataagacatcacgatg

SEQ ID NO: 430 - DNA, 16574 bp, Homo sapiens mitochondrial
  3112: "n" refers to a nucleotide at position 3107 of the Cambridge Reference Sequence (CRS, Anderson et al. 1981 Nature 290:457-465), later determined to be absent from the human mtDNA sequence according to the revised CRS (rCRS, Andrews et al. 1999 Nature Genetics 23:147); "n" therefore represents a single nucleotide deletion at a position corresponding to nucleotide 3107 of SEQ ID NO:1 as provided herein.
gatcacaggtctatcaccctattaaccactcacgggagctctccatgcatttggtattttcgtctggggggtgtgcacgcgatagcattgcgagacgctggagccggagcaccctatgtcgcagtatctgtctttgattcctgcctcatcctattatttatcgcacctacgttcaatattacaggcgaacatacctactaaagtgtgttaattaattaatgcttgtaggacataataataacaattgaatgtctgcacagccgctttccacacagacatcataacaaaaaatttccaccaaaccccccctcccccgccttctggccacagcacttaaacacatctctgccaaaccccaaaaacaaagaaccctaacaccagcctaaccagatttcaaattttatcttttggcggtatgcacttttaacagtcaccccccaactaacacattattttcccctcccactcccatactactaatctcatcaatacaaccctcgcccatcctacccagcacacacacaccacacgctgctaaccccataccccgaaccaaccaaaccccaaagacaccccccacagtttatgtagcttacctcctcaaagcaatacactgaaaatgtttagacgggctcacatcaccccataaacaaataggtttggtcctagcctttctattagctcttagtaagattacacatgcaagcatccccgttccagtgagttcaccctctaaatcaccacgatcaaaagggacaagcatcaagcacgcagcaatgcagctcaaaacgcttagcctagccacacccccacgggaaacagcagtgattaacctttagcaataaacgaaagtttaactaagctatactaaccccagggttggtcaatttcgtgccagccaccgcggtcacacgattaacccaagtcaatagaagccggcgtaaagagtgttttagatcaccccctccccaataaagctaaaactcacctgagttgtaaaaaactccagttgacacaaaatagactacgaaagtggctttaacatatctgaacacacaatagctaagacccaaactgggattagataccccactatgcttagccctaaacctcaacagttaaatcaacaaaactgctcgccagaacactacgagccacagcttaaaactcaaaggacctggcggtgcttcatacccctctagaggagcctgttctgtaatcgataaaccccgatcaacctcaccacctcttgctcagcctatataccgccatcttcagcaaaccctgatgaaggctacaaagtaagcgcaagtacccacgtaaagacgttaggtcaaggtgtagcccatgaggtggcaagaaatgggctacattttctaccccagaaaactacgatagcccttatgaaacttaagggtcgaaggtggatttagcagtaaactgagagtagagtgcttagttgaacagggccctgaagcgcgtacacaccgcccgtcaccctcctcaagtatacttcaaaggacatttaactaaaacccctacgcatttatatagaggagacaagtcgtaacatggtaagtgtactggaaagtgcacttggacgaaccagagtgtagcttaacacaaagcacccaacttacacttaggagatttcaacttaacttgaccgctctgagctaaacctagccccaaacccactccaccttactaccagacaaccttagccaaaccatttacccaaataaagtataggcgatagaaattgaaacctggcgcaatagatatagtaccgcaagggaaagatgaaaaattataaccaagcataatatagcaaggactaacccctataccttctgcataatgaattaactagaaataactttgcaaggagagccaaagctaagacccccgaaaccagacgagctacctaagaacagctaaaagagcacacccgtctatgtagcaaaatagtgggaagatttataggtagaggcgacaaacctaccgagcctggtgatagctggttgtccaagatagaatcttagttcaactttaaatttgcccacagaaccctctaaatccccttgtaaatttaactgttagtccaaagaggaacagctctttggacactaggaaaaaaccttgtagagagagtaaaaaatttaacacccatagtaggcctaaaagcagccaccaattaagaaagcgttcaagctcaacacccactacctaaaaaatcccaaacatataactgaactcctcacacccaattggaccaatctatcaccctatagaagaactaatgttagtataagtaacatgaaaacattctcctccgcataagcctgcgtcagattaaaacactgaactgacaattaacagcccaatatctacaatcaaccaacaagtcattattaccctcactgtcaacccaacacaggcatgctcataaggaaaggttaaaaaaagtaaaaggaactcggcaaatcttaccccgcctgtttaccaaaaacatcacctctagcatcaccagtattagaggcaccgcctgcccagtgacacatgtttaacggccgcggtaccctaaccgtgcaaaggtagcataatcacttgttccttaaatagggacctgtatgaatggctccacgagggttcagctgtctcttacttttaaccagtgaaattgacctgcccgtgaagaggcgggcatgacacagcaagacgagaagaccctatggagctttaatttattaatgcaaacagtacctaacaaacccacaggtcctaaactaccaaacctgcattaaaaatttcggttggggcgacctcggagcagaacccaacctccgagcagtacatgctaagacttcaccagtcaaagcgaactactatactcaattgatccaataacttgaccaacggaacaagttaccctagggataacagcgcaatcctattctagagtccatatcaacaatagggtttacgacctcgatgttggatcaggacatcccgatggtgcagccgctattaaaggttcgtttgttcaacgattaaagtcctacgtgatctgagttcagaccggagtaatccaggtcggtttctatctacnttcaaattcctccctgtacgaaaggacaagagaaataaggcctacttcacaaagcgccttcccccgtaaatgatatcatctcaacttagtattatacccacacccacccaagaacagggtttgttaagatggcagagcccggtaatcgcataaaacttaaaactttacagtcagaggttcaattcctcttcttaacaacatacccatggccaacctcctactcctcattgtacccattctaatcgcaatggcattcctaatgcttaccgaacgaaaaattctaggctatatacaactacgcaaaggccccaacgttgtaggcccctacgggctactacaacccttcgctgacgccataaaactcttcaccaaggagcccctaaaacccgccacatctaccatcaccctctacatcaccgccccgaccttagctctcaccatcgctcttctactatgaacccccctccccatacccaaccccctggtcaacctcaacctaggcctcctatttattctagccacctctagcctagccgtttactcaatcctctgatcagggtgagcatcaaactcaaactacgccctgatcggcgcactgcgagcagtagcccaaacaatctcatatgaagtcaccctagccatcattctactatcaacattactaataagtggctcctttaacctctccacccttatcacaacacaagaacacctctgattactcctgccatcatgacccttggccataatatgatttatctccacactagcagagaccaaccgaacccccttcgaccttgccgaaggggagtccgaactagtctcaggcttcaacatcgaatacgccgcaggccccttcgccctattcttcatagccgaatacacaaacattattataataaacaccctcaccactacaatcttcctaggaacaacatatgacgcactctcccctgaactctacacaacatattttgtcaccaagaccctacttctaacctccctgttcttatgaattcgaacagcatacccccgattccgctacgaccaactcatacacctcctatgaaaaaacttcctaccactcaccctagcattacttatatgatatgtctccatacccattacaatctccagcattccccctcaaacctaagaaatatgtctgataaaagagttactttgatagagtaaataataggagcttaaacccccttatttctaggactatgagaatcgaacccatccctgagaatccaaaattctccgtgccacctatcacaccccatcctaaagtaaggtcagctaaataagctatcgggcccataccccgaaaatgttggttatacccttcccgtactaattaatcccctggcccaacccgtcatctactctaccatctttgcaggcacactcatcacagcgctaagctcgcactgattttttacctgagtaggcctagaaataaacatgctagcttttattccagttctaaccaaaaaaataaaccctcgttccacagaagctgccatcaagtatttcctcacgcaagcaaccgcatccataatccttctaatagctatcctcttcaacaatatactctccggacaatgaaccataaccaatactaccaatcaatactcatcattaataatcataatggctatagcaataaaactaggaatagccccctttcacttctgagtcccagaggttacccaaggcacccctctgacatccggcctgcttcttctcacatgacaaaaactagcccccatctcaatcatataccaaatctctccctcactaaacgtaagccttctcctcactctctcaatcttatccatcatagcaggcagttgaggtggattaaaccaaacccagctacgcaaaatcttagcatactcctcaattacccacataggatgaataatagcagttctaccgtacaaccctaacataaccattcttaatttaactatttatattatcctaactactaccgcattcctactactcaacttaaactccagcaccacgaccctactactatctcgcacctgaaacaagctaacatgactaacacccttaattccatccaccctcctctccctaggaggcctgcccccgctaaccggctttttgcccaaatgggccattatcgaagaattcacaaaaaacaatagcctcatcatccccaccatcatagccaccatcaccctccttaacctctacttctacctacgcctaatctactccacctcaatcacactactccccatatctaacaacgtaaaaataaaatgacagtttgaacatacaaaacccaccccattcctccccacactcatcgcccttaccacgctactcctacctatctccccttttatactaataatcttatagaaatttaggttaaatacagaccaagagccttcaaagccctcagtaagttgcaatacttaatttctgtaacagctaaggactgcaaaaccccactctgcatcaactgaacgcaaatcagccactttaattaagctaagcccttactagaccaatgggacttaaacccacaaacacttagttaacagctaagcaccctaatcaactggcttcaatctacttctcccgccgccgggaaaaaaggcgggagaagccccggcaggtttgaagctgcttcttcgaatttgcaattcaatatgaaaatcacctcggagctggtaaaaagaggcctaacccctgtctttagatttacagtccaatgcttcactcagccattttacctcacccccactgatgttcgccgaccgttgactattctctacaaaccacaaagacattggaacactatacctattattcggcgcatgagctggagtcctaggcacagctctaagcctccttattcgagccgagctgggccagccaggcaaccttctaggtaacgaccacatctacaacgttatcgtcacagcccatgcatttgtaataatcttcttcatagtaatacccatcataatcggaggctttggcaactgactagttcccctaataatcggtgcccccgatatggcgtttccccgcataaacaacataagcttctgactcttacctccctctctcctactcctgctcgcatctgctatagtggaggccggagcaggaacaggttgaacagtctaccctcccttagcagggaactactcccaccctggagcctccgtagacctaaccatcttctccttacacctagcaggtgtctcctctatcttaggggccatcaatttcatcacaacaattatcaatataaaaccccctgccataacccaataccaaacgcccctcttcgtctgatccgtcctaatcacagcagtcctacttctcctatctctcccagtcctagctgctggcatcactatactactaacagaccgcaacctcaacaccaccttcttcgaccccgccggaggaggagaccccattctataccaacacctattctgatttttcggtcaccctgaagtttatattcttatcctaccaggcttcggaataatctcccatattgtaacttactactccggaaaaaaagaaccatttggatacataggtatggtctgagctatgatatcaattggcttcctagggtttatcgtgtgagcacaccatatatttacagtaggaatagacgtagacacacgagcatatttcacctccgccaccataatcatcgctatccccaccggcgtcaaagtatttagctgactcgccacactccacggaagcaatatgaaatgatctgctgcagtgctctgagccctaggattcatctttcttttcaccgtaggtggcctgactggcattgtattagcaaactcatcactagacatcgtactacacgacacgtactacgttgtagctcacttccactatgtcctatcaataggagctgtatttgccatcataggaggcttcattcactgatttcccctattctcaggctacaccctagaccaaacctacgccaaaatccatttcactatcatattcatcggcgtaaatctaactttcttcccacaacactttctcggcctatccggaatgccccgacgttactcggactaccccgatgcatacaccacatgaaacatcctatcatctgtaggctcattcatttctctaacagcagtaatattaataattttcatgatttgagaagccttcgcttcgaagcgaaaagtcctaatagtagaagaaccctccataaacctggagtgactatatggatgccccccaccctaccacacattcgaagaacccgtatacataaaatctagacaaaaaaggaaggaatcgaaccccccaaagctggtttcaagccaaccccatggcctccatgactttttcaaaaaggtattagaaaaaccatttcataactttgtcaaagttaaattataggctaaatcctatatatcttaatggcacatgcagcgcaagtaggtctacaagacgctacttcccctatcatagaagagcttatcacctttcatgatcacgccctcataatcattttccttatctgcttcctagtcctgtatgcccttttcctaacactcacaacaaaactaactaatactaacatctcagacgctcaggaaatagaaaccgtctgaactatcctgcccgccatcatcctagtcctcatcgccctcccatccctacgcatcctttacataacagacgaggtcaacgatccctcccttaccatcaaatcaattggccaccaatggtactgaacctacgagtacaccgactacggcggactaatcttcaactcctacatacttcccccattattcctagaaccaggcgacctgcgactccttgacgttgacaatcgagtagtactcccgattgaagcccccattcgtataataattacatcacaagacgtcttgcactcatgagctgtccccacattaggcttaaaaacagatgcaattcccggacgtctaaaccaaaccactttcaccgctacacgaccgggggtatactacggtcaatgctctgaaatctgtggagcaaaccacagtttcatgcccatcgtcctagaattaattcccctaaaaatctttgaaatagggcccgtatttaccctatagcaccccctctaccccctctagagcccactgtaaagctaacttagcattaaccttttaagttaaagattaagagaaccaacacctctttacagtgaaatgccccaactaaatactaccgtatggcccaccataattacccccatactccttacactattcctcatcacccaactaaaaatattaaacacaaactaccacctacctccctcaccaaagcccataaaaataaaaaattataacaaaccctgagaaccaaaatgaacgaaaatctgttcgcttcattcattgcccccacaatcctaggcctacccgccgcagtactgatcattctatttccccctctattgatccccacctccaaatatctcatcaacaaccgactaatcaccacccaacaatgactaatcaaactaacctcaaaacaaatgataaccatacacaacactaaaggacgaacctgatctcttatactagtatccttaatcatttttattgccacaactaacctcctcggactcctgcctcactcatttacaccaaccacccaactatctataaacctagccatggccatccccttatgagcgggcgcagtgattataggctttcgctctaagattaaaaatgccctagcccacttcttaccacaaggcacacctacaccccttatccccatactagttattatcgaaaccatcagcctactcattcaaccaatagccctggccgtacgcctaaccgctaacattactgcaggccacctactcatgcacctaattggaagcaccaccctagcaatatcaaccattaaccttccctctacacttatcatcttcacaattctaattctactgactatcctagaaatcgctgtcgccttaatccaagcctacgttttcacacttctagtaagcctctacctgcacgacaacacataatgacccaccaatcacatgcctatcatatagtaaaacccagcccatgacccctaacaggggccctctcagccctcctaatgacctccggcctagccatgtgatttcacttccactccataacgctcctcatactaggcctactaaccaacacactaaccatataccaatgatggcgcgatgtaacacgagaaagcacataccaaggccaccacacaccacctgtccaaaaaggccttcgatacgggataatcctatttattacctcagaagtttttttcttcgcaggatttttctgagccttttaccactccagcctagcccctaccccccaattaggagggcactggcccccaacaggcatcaccccgctaaatcccctagaagtcccactcctaaacacatccgtattactcgcatcaggagtatcaatcacctgagctcaccatagtctaatagaaaacaaccgaaaccaaataattcaagcactgctcattacaattttactgggtctctattttaccctcctacaagcctcagagtacttcgagtctcccttcaccatttccgacggcatctacggctcaacattttttgtagccacaggcttccacggacttcacgtcattattggctcaactttcctcactatctgcttcatccgccaactaatatttcactttacatccaaacatcactttggcttcgaagccgccgcctgatactggcattttgtagatgtggtttgactatttctgtatgtctccatctattgatgagggtcttactcttttagtataaatagtaccgttaacttccaattaactagttttgacaacattcaaaaaagagtaataaacttcgccttaattttaataatcaacaccctcctagccttactactaataattattacattttgactaccacaactcaacagctacatagaaaaatccaccccttacgagtgcggcttcgaccctatatcccccgcccgcgtccctttctccataaaattcttcttagtagctattaccttcttattatttgatctagaaattgccctccttttacccctaccatgagccctacaaacaactaacctgccactaatagttatgtcatccctcttattaatcatcatcctagccctaagtctggcctatgagtgactacaaaaaggattagactgagccgaattggtatatagtttaaacaaaacgaatgatttcgactcattaaattatgataatcatatttaccaaatgcccctcatttacataaatattatactagcatttaccatctcacttctaggaatactagtatatcgctcacacctcatgtcctccctactatgcctagaaggaataatactatcgctgttcattatagctactctcataaccctcaacacccactccctcttagccaatattgtgcctattgccatactagtctttgccgcctgcgaagcagcggtgggcctagccctactagtctcaatctccaacacatatggcctagactacgtacataacctaaacctactccaatgctaaaactaatcgtcccaacaattatattactaccactgacatgactttccaaaaaacacataatttgaatcaacacaaccacccacagcctaattattagcatcatccctctactattttttaaccaaatcaacaacaacctatttagctgttccccaaccttttcctccgaccccctaacaacccccctcctaatactaactacctgactcctacccctcacaatcatggcaagccaacgccacttatccagtgaaccactatcacgaaaaaaactctacctctctatactaatctccctacaaatctccttaattataacattcacagccacagaactaatcatattttatatcttcttcgaaaccacacttatccccaccttggctatcatcacccgatgaggcaaccagccagaacgcctgaacgcaggcacatacttcctattctacaccctagtaggctcccttcccctactcatcgcactaatttacactcacaacaccctaggctcactaaacattctactactcaccctcactgcccaagaactatcaaactcctgagccaacaacttaatatgactagcttacacaatagcttttatagtaaagatacctctttacggactccacttatgactccctaaagcccatgtcgaagcccccatcgctgggtcaatagtacttgccgcagtactcttgaaactaggcggctatggtataatacgcctcacactcattctcaaccccctgacaaaacacatagcctaccccttccttgtactatccctatgaggcataattataacaagctccatctgcctacgacaaacagacctaaaatcgctcattgcatactcttcaatcagccacatagccctcgtagtaacagccattctcatccaaaccccctgaagcttcaccggcgcagtcattctcataatcgcccacggacttacatcctcattactattctgcctagcaaactcaaactacgaacgcactcacagtcgcatcataatcctctctcaaggacttcaaactctactcccactaatagctttttgatgacttctagcaagcctcgctaacctcgccttaccccccactattaacctactgggagaactctctgtgctagtaaccacgttctcctgatcaaatatcactctcctacttacaggactcaacatactagtcacagccctatactccctctacatatttaccacaacacaatggggctcactcacccaccacattaacaacataaaaccctcattcacacgagaaaacaccctcatgttcatacacctatcccccattctcctcctatccctcaaccccgacatcattaccgggttttcctcttgtaaatatagtttaaccaaaacatcagattgtgaatctgacaacagaggcttacgaccccttatttaccgagaaagctcacaagaactgctaactcatgcccccatgtctaacaacatggctttctcaacttttaaaggataacagctatccattggtcttaggccccaagaattttggtgcaactccaaataaaagtaataaccatgcacactactataaccaccctaaccctaacttccctaattccccccatccttaccaccctcgttaaccctaacaaaaaaaactcatacccccattatgtaaaatccattgtcgcatccacctttattatcagtctcttccccacaacaatattcatgtgcctagaccaagaagttattatctcgaactgacactgagccacaacccaaacaacccagctctccctaagcttcaaactagactacttctccataatattcatccctgtagcattgttcgttacatggtccatcatagaattctcactgtgatatataaactcagacccaaacattaatcagttcttcaaatatctactcatcttcctaattaccatactaatcttagttaccgctaacaacctattccaactgttcatcggctgagagggcgtaggaattatatccttcttgctcatcagttgatgatacgcccgagcagatgccaacacagcagccattcaagcaatcctatacaaccgtatcggcgatatcggtttcatcctcgccttagcatgatttatcctacactccaactcatgagacccacaacaaatagcccttctaaacgctaatccaagcctcaccccactactaggcctcctcctagcagcagcaggcaaatcagcccaattaggtctccacccctgactcccctcagccatagaaggccccaccccagtctcagccctactccactcaagcactatagttgtagcaggaatcttcttactcatccgcttccaccccctagcagaaaatagcccactaatccaaactctaacactatgcttaggcgctatcaccactctgttcgcagcagtctgcgcccttacacaaaatgacatcaaaaaaatcgtagccttctccacttcaagtcaactaggactcataatagttacaatcggcatcaaccaaccacacctagcattcctgcacatctgtacccacgccttcttcaaagccatactatttatgtgctccgggtccatcatccacaaccttaacaatgaacaagatattcgaaaaataggaggactactcaaaaccatacctctcacttcaacctccctcaccattggcagcctagcattagcaggaatacctttcctcacaggtttctactccaaagaccacatcatcgaaaccgcaaacatatcatacacaaacgcctgagccctatctattactctcatcgctacctccctgacaagcgcctatagcactcgaataattcttctcaccctaacaggtcaacctcgcttccccacccttactaacattaacgaaaataaccccaccctactaaaccccattaaacgcctggcagccggaagcctattcgcaggatttctcattactaacaacatttcccccgcatcccccttccaaacaacaatccccctctacctaaaactcacagccctcgctgtcactttcctaggacttctaacagccctagacctcaactacctaaccaacaaacttaaaataaaatccccactatgcacattttatttctccaacatactcggattctaccctagcatcacacaccgcacaatcccctatctaggccttcttacgagccaaaacctgcccctactcctcctagacctaacctgactagaaaagctattacctaaaacaatttcacagcaccaaatctccacctccatcatcacctcaacccaaaaaggcataattaaactttacttcctctctttcttcttcccactcatcctaaccctactcctaatcacataacctattcccccgagcaatttcaattacaatatatacaccaacaaacaatgttcaaccagtaactactactaatcaacgcccataatcatacaaagcccccgcaccaataggatcctcccgaatcaaccctgacccctctccttcataaattattcagcttcctacactattaaagtttaccacaaccaccaccccatcatactctttcacccacagcaccaatcctacctccatcgctaaccccactaaaacactcaccaagacctcaacccctgacccccatgcctcaggatactcctcaatagccatcgctgtagtatatccaaagacaaccatcattccccctaaataaattaaaaaaactattaaacccatataacctcccccaaaattcagaataataacacacccgaccacaccgctaacaatcaatactaaacccccataaataggagaaggcttagaagaaaaccccacaaaccccattactaaacccacactcaacagaaacaaagcatacatcattattctcgcacggactacaaccacgaccaatgatatgaaaaaccatcgttgtatttcaactacaagaacaccaatgaccccaatacgcaaaattaaccccctaataaaattaattaaccactcactcatcgacctccccaccccatccaacatctccgcatgatgaaacttcggctcactccttggcgcctgcctgatcctccaaatcaccacaggactattcctagccatgcactactcaccagacgcctcaaccgccttttcatcaatcgcccacatcactcgagacgtaaattatggctgaatcatccgctaccttcacgccaatggcgcctcaatattctttatctgcctcttcctacacatcgggcgaggcctatattacggatcatttctctactcagaaacctgaaacatcggcattatcctcctgcttgcaactatagcaacagccttcataggctatgtcctcccgtgaggccaaatatcattctgaggggccacagtaattacaaacttactatccgccatcccatacattgggacagacctagttcaatgaatctgaggaggctactcagtagacagtcccaccctcacacgattctttacctttcacttcatcttgcccttcattattgcagccctagcagcactccacctcctattcttgcacgaaacgggatcaaacaaccccctaggaatcacctcccattccgataaaatcaccttccacccttactacacaatcaaagacgccctcggcttacttctcttccttctctccttaatgacattaacactattctcaccagacctcctaggcgacccagacaattataccctagccaaccccttaaacacccctccccacatcaagcccgaatgatatttcctattcgcctacacaattctccgatccgtccctaacaaactaggaggcgtccttgccctattactatccatcctcatcctagcaataatccccatcctccatatatccaaacaacaaagcataatatttcgcccactaagccaatcactttattgactcctagccgcagacctcctcattctaacctgaatcggaggacaaccagtaagctacccttttaccatcattggacaagtagcatccgtactatacttcacaacaatcctaatcctaataccaactatctccctaattgaaaacaaaatactcaaatgggcctgtccttgtagtataaactaatacaccagtcttgtaaaccggagatgaaaacctttttccaaggacaaatcagagaaaaagtctttaactccaccattagcacccaaagctaagattctaatttaaactattctctgttctttcatggggaagcagatttgggtaccacccaagtattgactcacccatcaacaaccgctatgtatctcgtacattactgccagccaccatgaatattgtacggtaccataaatacttgaccacctgtagtacataaaaacccaatccacatcaaaaccccctccccatgcttacaagcaagtacagcaatcaacccccaactatcacacatcaactgcaactccaaagccacccctcacccactaggataccaacaaacctacccacccttaacagtacatagcacataaagccatttaccgtacatagcacattacagtcaaatcccttctcgtccccatggatgacccccctcagataggggtcccttgaccaccatcctccgtgaaatcaatatcccgcacaagagtgctactctcctcgctccgggcccataacacttgggggtagctaaagtgaactgtatccgacatctggttcctacttcagggccataaagcctaaatagcccacacgttccccttaaataagacatcacgatg

SEQ ID NO: 431 - DNA, 16571 bp, Homo sapiens mitochondrial
  3109: "n" refers to a nucleotide at position 3107 of the Cambridge Reference Sequence (CRS, Anderson et al. 1981 Nature 290:457-465), later determined to be absent from the human mtDNA sequence according to the revised CRS (rCRS, Andrews et al. 1999 Nature Genetics 23:147); "n" therefore represents a single nucleotide deletion at a position corresponding to nucleotide 3107 of SEQ ID NO:1 as provided herein.
gatcacaggtctatcaccctattaaccactcacgggagctctccatgcatttggtattttcgtctggggggtgtgcacgcgatagcattgcgagacgctggagccggagcaccctatgtcgcagtatctgtctttgattcctgccccatcccattatttatcgcacctacgttcaatattacaggcgaacatacttactaaagtgtgttaattaattaatgcttgtaggacataataataacaattgaatgtctgcacagccgctttccacacagacaccataacaaaaaatttccaccaaaccccccctcccccccgcttctggccacagcacttaaacacatctctgccaaaccccaaaaacaaagaaccctaacaccagcctaaccagatttcaaattttatcttttggcggtatgcacttttaacagtcaccccccaactaacacattattttcccctcccactcccatactactaatctcatcaatacaacccccgcccatcctacccagcacacacacaccgctgctaaccccataccccgaaccaaccaaaccccaaagacaccccccacagtttatgtagcttacctcctcaaagcaatacactgaaaatgtttagacgggctcacatcaccccataaacaaataggtttggtcctagcctttctattagctcttagtaagattacacatgcaagcatccccattccagtgagttcaccctctaaatcaccacgatcaaaagggacaagcatcaagcacgcagcaatgcagctcaaaacgcttagcctagccacacccccacgggaaacagcagtgattaacctttagcaataaacgaaagtttaactaagctatactaaccccagggttggtcaatttcgtgccagccaccgcggtcacacgattaacccaagtcaatagaagccggcgtaaagagtgttttagatcaccccctccccaataaagctaaaactcacctgagttgtaaaaaactccagttgacacaaaatagactacgaaagtggctttaacatatctgaacacacaatagctaagacccaaactgggattagataccccactatgcttagccctaaacctcaacagttaaatcaacaaaactgctcgccagaacactacgagccacagcttaaaactcaaaggacctggcggtgcttcatatccctctagaggagcctgttctgtaatcgataaaccccgatcaacctcaccacctcttgctcagcctatataccgccatcttcagcaaaccctgatgaaggctacaaagtaagcgcaagtacccacgtaaagacgttaggtcaaggtgtagcccatgaggtggcaagaaatgggctacattttctaccccagaaaactacgatagcccttatgaaacttaagggtcgaaggtggatttagcagtaaactgagagtagagtgcttagttgaacagggccctgaagcgcgtacacaccgcccgtcaccctcctcaagtatacttcaaaggacatttaactaaaacccctacgcatttatatagaggagacaagtcgtaacatggtaagtgtactggaaagtgcacttggacgaaccagagtgtagcttaacacaaagcacccaacttacacttaggagatttcaacttaacttgaccgctctgagctaaacctagccccaaacccactccaccttactaccagacaaccttagccaaaccatttacccaaataaagtataggcgatagaaattgaaacctggcgcaatagatatagtaccgcaagggaaagatgaaaaattataaccaagcataatatagcaaggactaacccctataccttctgcataatgaattaactagaaataactttgcaaggagaaccaaagctaagacccccgaaaccagacgagctacctaagaacagctaaaagagcacacccgtctatgtagcaaaatagtgggaagatttataggtagaggcgacaaacctaccgagcctggtgatagctggttgtccaagatagaatcttagttcaactttaaatttgcccacagaaccctctaaatccccttgtaaatttaactgttagtccaaagaggaacagctctttggacactaggaaaaaaccttgtagagagagtaaaaaatttaacacccatagtaggcctaaaagcagccaccaattaagaaagcgttcaagctcaacacccactacctaaaaaatcccaaacatataactgaactcctcacacccaattggaccaatctatcaccctatagaagaactaatgttagtataagtaacatgaaaacattctcctccgcataagcctgcgtcagattaaaacactgaactgacaattaacagcccaatatctacaatcaaccaacaagtcattattaccctcactgtcaacccaacacaggcatgctcataaggaaaggttaaaaaaagtaaaaggaactcggcaaatcttaccccgcctgtttaccaaaaacatcacctctagcatcaccagtattagaggcaccgcctgcccagtgacacatgtttaacggccgcggtaccctaaccgtgcaaaggtagcataatcacttgttccttaaatagggacctgtatgaatggctccacgagggttcagctgtctcttacttttaaccagtgaaattgacctgcccgtgaagaggcgggcatgacacagcaagacgagaagaccctatggagctttaatttattaatgcaaacagtacctaacaaacccacaggtcctaaactaccaaacctgcattaaaaatttcggttggggcgacctcggagcagaacccaacctccgagcagtacatgctaagacttcaccagtcaaagcgaactactatactcaattgatccaataacttgaccaacggaacaagttaccctagggataacagcgcaatcctattctagagtccatatcaacaatagggtttacgacctcgatgttggatcaggacatcccgatggtgcagccgctattaaaggttcgtttgttcaacgattaaagtcctacgtgatctgagttcagaccggagtaatccaggtcggtttctatctacnttcaaattcctccctgtacgaaaggacaagagaaataaggcctacttcacaaagcgccttcccccgtaaatgatatcatctcaacttagtattatacccacacccacccaagaacagggtttgttaagatggcagagcccggtaatcgcataaaacttaaaactttacagtcagaggttcaattcctcttcttaacaacatacccatggccaacctcctactcctcattgtacccattctaatcgcaatggcattcctaatgcttaccgaacgaaaaattctaggctatatacaactacgcaaaggccccaacgttgtaggcccctacgggctactacaacccttcgctgacgccataaaactcttcaccaaagagcccctaaaacccgccacatctaccatcaccctctacatcaccgccccgaccttagctctcaccatcgctcttctactatgaacccccctccccatacccaaccccctggtcaacctcaacctaggcctcctatttattctagccacctctagcctagccgtttactcaatcctctgatcagggtgagcatcaaactcaaactacgccctgatcggcgcactgcgagcagtagcccaaacaatctcatatgaagtcaccctagccatcattctactatcaacattactaataagtggctcctttaacctctccacccttatcacaacacaagaacacctctgattactcctgccatcatgacccttggccataatatgatttatctccacactagcagagaccaaccgaacccccttcgaccttgccgaaggggagtccgaactagtctcaggcttcaacatcgaatacgccgcaggccccttcgccctattcttcatagccgaatacacaaacattattataataaacaccctcaccactacaatcttcctaggaacaacatatgacgcactctcccctgaactctacacaacatattttgtcaccaagaccctacttctaacctccctgttcttatgaattcgaacagcatacccccgattccgctacgaccaactcatacacctcctatgaaaaaacttcctaccactcaccctagcattacttatatgacatgtctccatacccattacaatctccagcattccccctcaaacctaagaaatatgtctgataaaagagttactttgatagagtaaataataggagcttaaacccccttatttctaggactatgagaatcgaacccatccctgagaatccaaaattctccgtgccacctatcacaccccatcctaaagtaaggtcagctaaataagctatcgggcccataccccgaaaatgttggttatacccttcccgtactaattaatcccctggcccaacccgtcatctactctaccatctttgcaggcacactcatcacagcgctaagctcgcactgattttttacctgagtaggcctagaaataaacatgctagcttttattccagttctaaccaaaaaaataaaccctcgttccacagaagctgccatcaagtatttcctcacgcaagcaaccgcatccataatccttctaatagctatcctcttcaacaatatactctccggacaatgaaccataaccaatactaccaatcaatactcatcattaataatcataatggctatagcaataaaactaggaatagccccctttcacttctgagtcccagaggttacccaaggcacccctctgacatccggcctgcttcttctcacatgacaaaaactagcccccatctcaatcatataccaaatctctccctcactagacgtaagccttctcctcactctctcaatcttatccatcatagcaggcagttgaggtggattaaaccaaacccagctacgcaaaatcttagcatactcctcaattacccacataggatgaataatagcagttctaccgtacaaccctaacataaccattcttaatttaactatttatattatcctaactactaccgcattcctactactcaacttaaactccagcaccacgaccctactactatctcgcacctgaaacaagctaacatgattaacacccttaattccatccaccctcctctccctaggaggcctgcccccgctaaccggctttttgcccaaatgggccattatcgaagaattcacaaaaaacaatagcctcatcatccccaccatcatagccaccatcaccctccttaacctctacttctacctacgcctaatctactccacctcaatcacactactccccatatctaacaacgtaaaaataaaatgacagtttgaacatacaaaacccaccccattcctccccacactcatcgcccttaccacgctactcctacctatctccccttttatactaataatcttatagaaatttaggttaaatacagaccaagagccttcaaagccctcagtaagttgcaatacttaatttctgtaacagctaaggactgcaaaaccccactctgcatcaactgaacgcaaatcagccactttaattaagctaagcccttactagaccaatgggacttaaacccacaaacacttagttaacagctaagcaccctaatcaactggcttcaatctacttctcccgccgccgggaaaaaaggcgggagaagccccggcaggtttgaagctgcttcttcgaatttgcaattcaatatgaaaatcacctcggagctggtaaaaagaggcctaacccctgtctttagatttacagtccaatgcttcactcagccattttacctcacccccactgatgttcgccgaccgttgactattctctacaaaccacaaagacattggaacactatacctattattcggcgcatgagctggagtcctaggcacagctctaagcctccttattcgagccgagctgggccagccaggcaaccttctaggtaacgaccacatctacaacgttatcgtcacagcccatgcatttgtaataatcttcttcatagtaatacccatcataatcggaggctttggcaactgactagttcccctaataatcggtgcccccgatatggcgtttccccgcataaacaacataagcttctgactcttacctccctctctcctactcctgctcgcatctgctatagtggagaccggagcaggaacaggttgaacagtctaccctcccttagcagggaactactcccaccctggagcctccgtagacctaaccatcttctccttacacctagcaggtgtctcctctatcttaggggccatcaatttcatcacaacaattatcaatataaaaccccctgccataacccaataccaaacgcccctcttcgtctgatccgtcctaatcacagcagtcctacttctcctatctctcccagtcctagctgctggcatcactatactactaacagaccgcaacctcaacaccaccttcttcgaccccgccggaggaggagaccccattctataccaacacctattctgatttttcggtcaccctgaagtttatattcttatcctaccaggcttcggaataatctcccatattgtaacttactactccggaaaaaaagaaccatttggatacataggtatggtctgagctatgatatcaattggcttcctagggtttatcgtgtgagcacaccatatatttacagtaggaatagacgtagacacacgagcatatttcacctccgctaccataatcatcgctatccccaccggcgtcaaagtatttagctgactcgccacactccacggaagcaatatgaaatgatctgctgcagtgctctgagccctaggattcatctttcttttcaccgtaggtggcctgactggcattgtattagcaaactcatcactagacatcgtactacacgacacgtactacgttgtagctcacttccactatgtcctatcaataggagctgtatttgccatcataggaggcttcattcactgatttcccctattctcaggctacaccctagaccaaacctacgccaaaatccatttcactatcatattcatcggcgtaaatctaactttcttcccacaacactttctcggcctatccggaatgccccgacgttactcggactaccccgatgcatacaccacatgaaacatcctatcatctgtaggctcattcatttctctaacagcagtaatattaataattttcatgatttgagaagccttcgcttcgaagcgaaaagtcctaatagtagaagaaccctccataaacctggagtgactatatggatgccccccaccctaccacacattcgaagaacccgtatacataaaatctagacaaaaaaggaaggaatcgaaccccccaaagctggtttcaagccaaccccatggcctccatgactttttcaaaaaggtattagaaaaaccatttcataactttgtcaaagttaaattataggctaaatcctatatatcttaatggcacatgcagcgcaagtaggtctacaagacgctacttcccctatcatagaagagcttatcacctttcatgatcacgccctcataatcattttccttatctgcttcctagtcctgtatgcccttttcctaacactcacaacaaaactaactaatactaacatctcagacgctcaggaaatagaaaccgtctgaactatcctgcccgccatcatcctagtcctcatcgccctcccatccctacgcatcctttacataacagacgaggtcaacgatccctcccttactatcaaatcaattggccaccaatggtactgaacctacgagtacaccgactacggcggactaatcttcaactcctacatacttcccccattattcctagaaccaggcgacctgcgactccttgacgttgacaatcgagtagtactcccgattgaagcccccattcgtataataattacatcacaagacgtcttgcactcatgagctgtccccacattaggcttaaaaacagatgcaattcccggacgtctaaaccaaaccactttcaccgctacacgaccgggggtatactacggtcaatgctctgaaatctgtggagcaaaccacagtttcatgcccatcgtcctagaattaattcccctaaaaatctttgaaatagggcccgtatttaccctatagcaccccctctaccccctctagagcccactgtaaagctaacttagcattaaccttttaagttaaagattaagagaaccaacacctctttacagtgaaatgccccaactaaatactaccgtatggcccaccataattacccccatactccttacactattcctcatcacccaactaaaaatattaaacacaaactaccacctacctccctcaccaaagcccataaaaataaaaaattataacaaaccctgagaaccaaaatgaacgaaaatctgttcgcttcattcattgcccccacaatcctaggcctacccgccgcagtactgatcattctatttccccctctattgatccccacctccaaatatctcatcaacaaccgactaatcaccacccaacaatgactaatcaaactaacctcaaaacaaataataaccatacacaacactaaaggacgaacctgatctcttatactagtatccttaatcatttttattgccacaactaacctcctcggactcctgcctcactcatttacaccaaccacccaactatctataaacctagccatggccatccccttatgagcgggcgcagtgattataggctttcgctctaagattaaaaatgccctagcccacttcttaccacaaggcacacctacaccccttatccccatactagttattatcgaaaccatcagcctactcattcaaccaatagccctggccgtacgcctaaccgctaacattactgcaggccacctactcatgcacctaattggaagcgccaccctagcaatatcaaccattaaccttccctctacacttatcatcttcacaattctaattctactgactatcctagaaatcgctgtcgccttaatccaagcctacgttttcacacttctagtaagcctctacctgcacgacaacacataatgacccaccaatcacatgcctatcatatagtaaaacccagcccatgacccctaacaggggccctctcagccctcctaatgacctccggcctagccatgtgatttcacttccactccataacgctcctcatactaggcctactaaccaacacactaaccatataccaatgatggcgcgatgtaacacgagaaagcacataccaaggccaccacacaccacctgtccaaaaaggccttcgatacgggataatcctatttattacctcagaagtttttttcttcgcaggatttttctgagccttttaccactccagcctagcccctaccccccaattaggagggcactggcccccaacaggcatcaccccgctaaatcccctagaagtcccactcctaaacacatccgtattactcgcatcaggagtatcaatcacctgagctcaccatagtctaatagaaaacaaccgaaaccaaataattcaagcactgcttattacaattttactgggtctctattttaccctcctacaagcctcagagtacttcgagtctcccttcaccatttccgacggcatctacggctcaacattttttgtagccacaggcttccacggacttcacgtcattattggctcaactttcctcactatctgcttcatccgccaactaatatttcactttacatccaaacatcactttggcttcgaagccgccgcctgatactggcattttgtagatgtggtttgactatttctgtatgtctccatctattgatgagggtcttactcttttagtataaatagtaccgttaacttccaattaactagttttgacaacattcaaaaaagagtaataaacttcgccttaattttaataatcaacaccctcctagccttactactaataattattacattttgactaccacaactcaacggctacatagaaaaatccaccccttacgagtgcggcttcgaccctatatcccccgcccgcgtccctttctccataaaattcttcttagtagctattaccttcttattatttgatctagaaattgccctccttttacccctaccatgagccctacaaacaactaacctgccactaatagttatgtcatccctcttattaatcatcatcctagccctaagtctggcctatgagtgactacaaaaaggattagactgaaccgaattggtatatagtttaaacaaaacgaatgatttcgactcattaaattatgataatcatatctaccaaatgcccctcatttacataaatattatactagcatttaccatctcacttctaggaatactagtatatcgctcacacctcatatcctccctactatgcctagaaggaataatactatcgctgttcattatagctactctcataaccctcaacacccactccctcttagccaatattgtgcctattgccatactagtctttgccgcctgcgaagcagcggtgggcctagccctactagtctcaatctccaacacatatggcctagactacgtacataacctaaacctactccaatgctaaaactaatcgtcccaacaattatattactaccactgacatgactttccaaaaaacatataatttgaatcaacacaaccacccacagcctaattattagcatcatccctctactattttttaaccaaatcaacaacaacctatttagctgttccccaaccttttcctccgaccccctaacaacccccctcctaatactaactacctgactcctacccctcacaatcatggcaagccaacgccacttatccagtgaaccactatcacgaaaaaaactctacctctctatactaatctccctacaaatctccttaattataacattcacagccacagaactaatcatattttatatcttcttcgaaaccacacttatccccaccttggctatcatcacccgatgaggcaaccagccagaacgcctgaacgcaggcacatacttcctattctacaccctagtaggctcccttcccctactcatcgcactgatttacactcacaacaccctaggctcactaaacattctactactcactctcactgcccaagaactatcaaactcctgagccaacaacttaatatgactagcttacacaatagcttttatagtaaagatacctctttacggactccacttatgactccctaaagcccatgtcgaagcccccatcgctgggtcaatagtacttgccgcagtactcttaaaactaggcggctatggtataatacgcctcacactcattctcaaccccctgacaaaacacatagcctaccccttccttgtactatccctatgaggcataattataacaagctccatctgcctacgacaaacagacctaaaatcgctcattgcatactcttcaatcagccacatagccctcgtagtaacagccattctcatccaaaccccctgaagcttcaccggcgcagtcattctcataatcgcccacggacttacatcctcattactattctgcctagcaaactcaaactacgaacgcactcacagtcgcatcataatcctctctcaaggacttcaaactctgctcccactaatagctttttgatgacttctagcaagcctcgctaacctcgccttaccccccactattaacctactgggagaactctctgtgctagtaaccacattctcctgatcaaatatcactctcctacttacaggactcaacatactagtcacagccctatactccctctacatatttaccacaacacaatggggctcactcacccaccacattaacaacataaaaccctcattcacacgagaaaacaccctcatgttcatacacctatcccccattctcctcctatccctcaaccccgacatcattaccgggttttcctcttgtaaatatagtttaaccaaaacatcagattgtgaatctgacaacagaggcttacgaccccttatttaccgagaaagctcacaagaactgctaactcatgcccccatgtctaacaacatggctttctcaacttttaaaggataacagctatccattggtcttaggccccaaaaattttggtgcaactccaaataaaagtaataaccatgcacactactataaccaccctaaccctgacttccctaattccccccatccttaccaccctcgttaaccctaacaaaaaaaactcatacccccattatgtaaaatccattgtcgcatccacctttattatcagtctcttccccacaacaatattcatgtgcctagaccaagaagttattatctcgaactgacactgagccacaacccaaacaacccagctctccctaagcttcaaactagactacttctccataatattcatccctgtagcattgttcgttacatggtccatcatagaattctcactgtgatatataaactcagacccaaacattaatcagttcttcaaatatctactcatcttcctaattaccatactaatcttagttaccgctaacaacctattccaactgttcatcggctgagagggcgtaggaattatatccttcttgctcatcagttgatgatacgcccgagcagatgccaacacagcagccattcaagcaatcctatacaaccgtatcggcgatatcggtttcatcctcgccttagcatgatttatcctacactccaactcatgagacccacaacaaatagcccttctaaacgctaatccaagcctcaccccactactaggcctcctcctagcagcagcaggcaaatcagcccaattaggtctccacccctgactcccctcagccatagaaggccccaccccagtctcagccctactccactcaagcactatagttgtagcaggaatcttcttactcatccgcttccaccccctagcagaaaatagcccactaatccaaactctaacactatgcttaggcgctatcaccactctgttcgcagcagtctgcgcccttacacaaaatgacatcaaaaaaatcgtagccttctccacttcaagtcaactaggactcataatagttacaatcggcatcaaccaaccacacctagcattcctgcacatctgtacccacgccttcttcaaagccatactatttatgtgctccggatccatcatccacaaccttaacaatgaacaagatattcgaaaaataggaggactactcaaaaccatacctctcacttcaacctccctcaccattggcagcctagcattagcaggaatacctttcctcacaggtttctactccaaagaccacatcatcgaaaccgcaaacatatcatacacaaacgcctgagccctatctattactctcatcgctacctccctgacaagcgcctatagcactcgaataattcttctcaccctaacaggtcaacctcgcttccccacccttactaacattaacgaaaataaccccaccctactaaaccccattaaacgcctggcagccggaagcctattcgcaggatttctcattactaacaacatttcccccgcatcccccttccaaacaacaatccccctctacctaaaactcacagccctcgctgtcactttcctaggacttctaacagccctagacctcaactacctaaccaacaaacttaaaataaaatccccactatgcacattttatttctccaacatactcggattctaccctagcatcacacaccgcacaatcccctatctaggccttcttacgagccaaaacctgcccctactcctcctagacctaacctgactagaaaagctattacctaaaacaatttcacagcaccaaatctccacctccatcatcacctcaacccaaaaaggcataattaaactttacttcctctctttcttcttcccactcatcctaaccctactcctaatcacataacctattcccccgagcaatctcaattacaatatatacaccaacaaacaatgttcaaccagtaactactactaatcaacgcccatagtcatacaaagcccccgcaccaataggatcctcccgaatcaaccctgacccctctccttcataaattattcagcttcctacactattaaagtttaccacaaccaccaccccatcatactctttcacccacagcaccaatcctacctccatcgctaaccccactaaaacactcaccaagacctcaacccctgacccccatgcctcaggatactcctcaatagccatcgctgtagtatatccaaagacaaccatcattccccctaaataaattaaaaaaactattaaacccatataacctcccccaaaattcagaataataacacacccgaccacaccgctaacaatcaatactaaacccccataaataggagaaggcttagaagaaaaccccacaaaccccattactaaacccacactcaacagaaacaaagcatacatcattattctcgcacggactacaaccacgaccaatgatatgaaaaaccatcgttgtatttcaactacaagaacaccaatgaccccaatacgcaaaattaaccccctaataaaattaattaaccactcattcatcgacctccccaccccatccaacatctccgcatgatgaaacttcggctcactccttggcgcctgcctgatcctccaaatcaccacaggactattcctagccatacactactcaccagacgcctcaaccgccttttcatcaatcgcccacatcactcgagacgtaaattatggctgaatcatccgctaccttcacgccaatggcgcctcaatattctttatctgcctcttcctacacatcgggcgaggcctatattacggatcatttctctactcagaaacctgaaacatcggcattatcctcctgcttgcaactatagcaacagccttcataggctatgtcctcccgtgaggccaaatatcattctgaggggccacagtaattacaaacttactatccgccatcccatacattgggacagacctagttcaatgaatctgaggaggctactcagtagacagtcccaccctcacacgattctttacctttcacttcatcttgcccttcattattgcagccctagcagcactccacctcctattcttgcacgaaacgggatcaaacaaccccctaggaatcacctcccattccgataaaatcaccttccacccttactacacaatcaaagacgccctcggcttacttctcttcattctctccttaatgacattaacactattctcaccagacctcctaggcgacccagacaattataccctagccaaccccttaaacacccctccccacatcaagcccgaatgatatttcctattcgcctacacaattctccgatccgtccctaacaagctaggaggcgtccttgccctattactatccatcctcatcctagcaataatccccatcctccatatatccaaacaacaaagcataatatttcgcccactaagccaatcactttattgactcctagccgcagacctcctcattctaacctgaatcggaggacaaccagtaagctacccttttaccatcattggacaagtagcatccgtactatacttcacaacaatcctaatcctaataccaactatctccctaattgaaaacaaaatactcaaatgggcctgtccttgtagtataaactaatacaccagtcttgtaaaccgaagatgaaaacctttttccaaggacaaatcagagaaaaagtctttaactccaccattagcacccaaagctaagattctaatttaaactattctctgttctttcatggggaagcagatttgggtaccacccaagtattgactcacccatcaacaaccgctatgtatttcgtacattactgccagccaccatgaatattgcacggtaccataaatacttgaccacctgtagtacataaaaacccaatccacatcaaaaccccctccccatgcttacaagcaagtacagcaatcaaccctcaactatcacacatcaactgcaactccaaagccacccctcacccactaggataccaacaaacctacctatccttaacagtacatagtacataaagccatttaccgtacatagcacattacagtcaaatcccttctcgtccccatggatgacccccctcagataggggtcccttgaccaccatcctccgtgaaatcaatatcccgcacaagagtgctactctcctcgctccgggcccataacacttgggggtagctaaagtgaactgtatccgacatctggttcctacttcagggccataaagcctaaatagcccacacgttccccttaaataagacatcacgatg

SEQ ID NO: 432 - DNA, 16571 bp, Homo sapiens mitochondrial
  3109: "n" refers to a nucleotide at position 3107 of the Cambridge Reference Sequence (CRS, Anderson et al. 1981 Nature 290:457-465), later determined to be absent from the human mtDNA sequence according to the revised CRS (rCRS, Andrews et al. 1999 Nature Genetics 23:147); "n" therefore represents a single nucleotide deletion at a position corresponding to nucleotide 3107 of SEQ ID NO:1 as provided herein.
gatcacaggtctatcaccctattaaccactcacgggagctctccatgcatttggtattttcgtctggggggtgtgcacgcgatagcattgcgagacgctggagccggagcaccctatgtcgcagtatctgtctttgattcctgcctcatcctattatttatcgcacctacgttcaatattacaggcgaacatacttactaaagtgtgttaattaattaatgcttgtaggacataataataacaattgaatgtctgcacagccgctttccacacagacatcataacaaaaaatttccaccaaaccccccctcccccccgcttctggccacagcacttaaacacatctctgccaaaccccaaaaacaaagaaccctaacaccagcctaaccagatttcaaattttatcttttggcggtatgcacttttaacagtcaccccccaactaacacattattttcccctcccactcccatactactaatctcatcaatacaacccccgcccatcctacccagcacacacacaccgctgctaaccccataccccgaaccaaccaaaccccaaagacaccccccacagtttatgtagcttacctcctcaaagcaatacactgaaaatgtttagacgggctcacatcaccccataaacaaataggtttggtcctagcctttctattagctcttagtaagattacacatgcaagcatccccattccagtgagttcaccctctaaatcaccacgatcaaaagggacaagcatcaagcacgcagcaatgcagctcaaaacgcttagcctagccacacccccacgggaaacagcagtgattaacctttagcaataaacgaaagtttaactaagctatactaaccccagggttggtcaatttcgtgccagccaccgcggtcacacgattaacccaagtcaatagaagccggcgtaaagagtgttttagatcaccccctccccaataaagctaaaactcacctgagttgtaaaaaactccagttgacacaaaatagactacgaaagtggctttaacatatctgaacacacaatagctaagacccaaactgggattagataccccactatgcttagccctaaacctcaacagttaaatcaacaaaactgctcgccagaacactacgagccacagcttaaaactcaaaggacctggcggtgcttcatatccctctagaggagcctgttctgtaatcgataaaccccgatcaacctcaccacctcttgctcagcctatataccgccatcttcagcaaaccctgatgaaggctacaaagtaagcgcaagtacccacgtaaagacgttaggtcaaggtgtagcccatgaggtggcaagaaatgggctacattttctaccccagaaaactacgatagcccttatgaaacttaagggtcgaaggtggatttagcagtaaactgagagtagagtgcttagttgaacagggccctgaagcgcgtacacaccgcccgtcaccctcctcaagtatacttcaaaggacatttaactaaaacccctacgcatttatatagaggagacaagtcgtaacatggtaagtgtactggaaagtgcacttggacgaaccagagtgtagcttaacacaaagcacccaacttacacttaggagatttcaacttaacttgaccgctctgagctaaacctagccccaaacccactccaccttactaccagacaaccttagccaaaccatttacccaaataaagtataggcgatagaaattgaaacctggcgcaatagatatagtaccgcaagggaaagatgaaaaattataaccaagcataatatagcaaggactaacccctataccttctgcataatgaattaactagaaataactttgcaaggagaaccaaagctaagacccccgaaaccagacgagctacctaagaacagctaaaagagcacacccgtctatgtagcaaaatagtgggaagatttataggtagaggcgacaaacctaccgagcctggtgatagctggttgtccaagatagaatcttagttcaactttaaatttgcccacagaaccctctaaatccccttgtaaatttaactgttagtccaaagaggaacagctctttggacactaggaaaaaaccttgcagagagagtaaaaaatttaacacccatagtaggcctaaaagcagccaccaattaagaaagcgttcaagctcaacacccactacctaaaaaatcccaaacatataactgaactcctcacacccaattggaccaatctatcaccctatagaagaactaatgttagtataagtaacatgaaaacattctcctccgcataagcctgcgtcagattaaaacactgaactgacaattaacagcccaatatctacaatcaaccaacaagtcattattaccctcactgtcaacccaacacaggcatgctcataaggaaaggttaaaaaaagtaaaaggaactcggcaaatcttaccccgcctgtttaccaaaaacatcacctctagcatcaccagtattagaggcaccgcctgcccagtgacacatgtttaacggccgcggtaccctaaccgtgcaaaggtagcataatcacttgttccttaaatagggacctgtatgaatggctccacgagggttcagctgtctcttacttttaaccagtgaaattgacctgcccgtgaagaggcgggcatgacacagcaagacgagaagaccctatggagctttaatttattaatgcaaacagtacctaacaaacccacaggtcctaaactaccaaacctgcattaaaaatttcggttggggcgacctcggagcagaacccaacctccgagcagtacatgctaagacttcaccagtcaaagcgaactactatactcaattgatccaataacttgaccaacggaacaagttaccctagggataacagcgcaatcctattctagagtccatatcaacaatagggtttacgacctcgatgttggatcaggacatcccgatggtgcagccgctattaaaggttcgtttgttcaacgattaaagtcctacgtgatctgagttcagaccggagtaatccaggtcggtttctatctacnttcaaattcctccctgtacgaaaggacaagagaaataaggcctacttcacaaagcgccttcccccgtaaatgatatcatctcaacttagtattatacccacacccacccaagaacagggtttgttaagatggcagagcccggtaatcgcataaaacttaaaactttacagtcagaggttcaattcctcttcttaacaacatacccatggccaacctcctactcctcattgtacccattctaatcgcaatggcattcctaatgcttaccgaacgaaaaattctaggctatatacaactacgcaaaggccccaacgttgtaggcccctacgggctactacaacccttcgctgacgccataaaactcttcaccaaagagcccctaaaacccgccacatctaccatcaccctctacatcaccgccccgaccttagctctcaccatcgctcttctactatgaacccccctccccatacccaaccccctggtcaacctcaacctaggcctcctatttattctagccacctctagcctagccgtttactcaatcctctgatcagggtgagcatcaaactcaaactacgccctgatcggcgcactgcgagcagtagcccaaacaatctcatatgaagtcaccctagccatcattctactatcaacattactaataagtggctcctttaacctctccacccttatcacaacacaagaacacctctgattactcctgccatcatgacccttggccataatatgatttatctccacactagcagagaccaaccgaacccccttcgaccttgccgaaggggagtccgaactagtctcaggcttcaacatcgaatacgccgcaggccccttcgccctattcttcatagccgaatacacaaacattattataataaacaccctcaccactacaatcttcctaggaacaacatatgacgcactctcccctgaactctacacaacatattttgtcaccaagaccctacttctaacctccctgttcttatgaattcgaacagcatacccccgattccgctacgaccaactcatacacctcctatgaaaaaacttcctaccactcaccctagcattacttatatgacatgtctccatacccattacaatctccagcattccccctcaaacctaagaaatatgtctgataaaagagttactttgatagagtaaataataggagcttaaacccccttatttctaggactatgagaatcgaacccatccctgagaatccaaaattctccgtgccacctatcacaccccatcctaaagtaaggtcagctaaataagctatcgggcccataccccgaaaatgttggttatacccttcccgtactaattaatcccctggcccaacccgtcatctactctaccatctttgcaggcacactcatcacagcgctaagctcgcactgattttttacctgagtaggcctagaaataaacatgctagcttttattccagttctaaccaaaaaaataaaccctcgttccacagaagctgccatcaagtatttcctcacgcaagcaaccgcatccataatccttctaatagctatcctcttcaacaatatactctccggacaatgaaccataaccaatactaccaatcaatactcatcattaataatcataatggctatagcaataaaactaggaatagccccctttcacttctgagtcccagaggttacccaaggcacccctctgacatccggcctgcttcttctcacatgacaaaaactagcccccatctcaatcatataccaaatctctccctcactagacgtaagccttctcctcactctctcaatcttatccatcatagcaggcagttgaggtggattaaaccaaacccagctacgcaaaatcttagcatactcctcaattacccacataggatgaataatagcagttctaccgtacaaccctaacataaccattcttaatttaactatttatattatcctaactactaccgcattcctactactcaacttaaactccagcaccacgaccctactactatctcgcacctgaaacaagctaacatgactaacacccttaattccatccaccctcctctccctaggaggcctgcccccgctaaccggctttttgcccaaatgggccattatcgaagaattcacaaaaaacaatagcctcatcatccccaccatcatagccaccatcaccctccttaacctctacttctacctacgcctaatctactccacctcaatcacactactccccatatctaacaacgtaaaaataaaatgacagtttgaacatacaaaacccaccccattcctccccacactcatcgcccttaccacgctactcctacctatctccccttttatactaataatcttatagaaatttaggttaaatacagaccaagagccttcaaagccctcagtaagttgcaatacttaatttctgtaacagctaaggactgcaaaaccccactctgcatcaactgaacgcaaatcagccactttaattaagctaagcccttactagaccaatgggacttaaacccacaaacacttagttaacagctaagcaccctaatcaactggcttcaatctacttctcccgccgccgggaaaaaaggcgggagaagccccggcaggtttgaagctgcttcttcgaatttgcaattcaatatgaaaatcacctcggagctggtaaaaagaggcctaacccctgtctttagatttacagtccaatgcttcactcagccattttacctcacccccactgatgttcgccgaccgttgactattctctacaaaccacaaagacattggaacactatacctattattcggcgcatgagctggagtcctaggcacagctctaagcctccttattcgagccgagctgggccagccaggcaaccttctaggtaacgaccacatctacaacgttatcgtcacagcccatgcatttgtaataatcttcttcatagtaatacccatcataatcggaggctttggcaactgactagttcccctaataatcggtgcccccgatatggcgtttccccgcataaacaacataagcttctgactcttacctccctctctcctactcctgctcgcatctgctatagtggaggccggagcaggaacaggttgaacagtctaccctcccttagcagggaactactcccaccctggagcctccgtagacctaaccatcttctccttacacctagcaggtgtctcctctatcttaggggccatcaatttcatcacaacaattatcaatataaaaccccctgccataacccaataccaaacgcccctcttcgtctgatccgtcctaatcacagcagtcctacttctcctatctctcccagtcctagctgctggcatcactatactactaacagaccgcaacctcaacaccaccttcttcgaccccgccggaggaggagaccccattctataccaacacctattctgatttttcggtcaccctgaagtttatattcttatcctaccaggcttcggaataatctcccatattgtaacttactactccggaaaaaaagaaccatttgggtacataggtatggtctgagctatgatatcaattggcttcctagggtttatcgtgtgagcacaccatatatttacagtaggaatagacgtagacacacgagcatatttcacctccgctaccataatcatcgctatccccaccggcgtcaaagtatttagctgactcgccacactccacggaagcaatatgaaatgatctgctgcagtgctctgagccctaggattcatctttcttttcaccgtaggtggcctgactggcattgtattagcaaactcatcactagacatcgtactacacgacacgtactacgttgtagctcacttccactatgtcctatcaataggagctgtatttgccatcataggaggcttcattcactgatttcccctattctcaggctacaccctagaccaaacctacgccaaaatccatttcactatcatattcatcggcgtaaatctaactttcttcccacaacactttctcggcctatccggaatgccccgacgttactcggactaccccgatgcatacaccacatgaaacatcctatcatctgtaggctcattcatttctctaacagcagtaatattaataattttcatgatttgagaagccttcgcttcgaagcgaaaagtcctaatagtagaagaaccctccataaacctggagtgactatatggatgccccccaccctaccacacattcgaagaacccgtatacataaaatctagacaaaaaaggaaggaatcgaaccccccaaagctggtttcaagccaaccccatggcctccatgactttttcaaaaaggtattagaaaaaccatttcataactttgtcaaagttaaattataggctaaatcctatatatcttaatggcacatgcagcgcaagtaggtctacaagacgctacttcccctatcatagaagagcttatcacctttcatgatcacgccctcataatcattttccttatctgcttcctagtcctgtatgcccttttcctaacactcacaacaaaactaactaatactaacatctcagacgctcaggaaatagaaaccgtctgaactatcctgcccgccatcatcctagtcctcatcgccctcccatccctacgcatcctttacataacagacgaggtcaacgatccctcccttaccatcaaatcaattggccaccaatggtactgaacctacgagtacaccgactacggcggactaatcttcaactcctacatacttcccccattattcctagaaccaggcgacctgcgactccttgacgttgacaatcgagtagtactcccgattgaagcccccattcgtataataattacatcacaagacgtcttgcactcatgagctgtccccacattaggcttaaaaacagatgcaattcccggacgtctaaaccaaaccactttcaccgctacacgaccaggggtatactacggtcaatgctctgaaatctgtggagcaaaccacagtttcatgcccatcgtcctagaattaattcccctaaaaatctttgaaatagggcccgtatttaccctatagcaccccctctaccccctctagagcccactgtaaagctaacttagcattaaccttttaagttaaagattaagagaaccaacacctctttacagtgaaatgccccaactaaatactaccgtatggcccaccataattacccccatactccttacactattcctcatcacccaactaaaaatattaaacacaaactaccacctacctccctcaccaaagcccataaaaataaaaaattataacaaaccctgagaaccaaaatgaacgaaaatctgttcgcttcattcattgcccccacaatcctaggcctacccgccgcagtactgatcattctatttccccctctattgatccccacctccaaatatctcatcaacaaccgactaatcaccacccaacaatgactaatcaaactaacctcaaaacaaataataaccatacacaacactaaaggacgaacctgatctcttatactagtatccttaatcatttttattgccacaactaacctcctcggactcctgcctcactcatttacaccaaccacccaactatctataaacctagccatggccatccccttatgagcgggcgcagtgattataggctttcgctctaagattaaaaatgccctagcccacttcttaccacaaggcacacctacaccccttatccccatactagttattatcgaaaccatcagcctactcattcaaccaatagccctggccgtacgcctaaccgctaacattactgcaggccacctactcatgcacctaattggaagcgccaccctagcaatatcaaccattaaccttccctctacacttatcatcttcacaattctaatcctactgactatcctagaaatcgctgtcgccttaatccaagcctacgttttcacacttctagtaagcctctacctgcacgacaacacataatgacccaccaatcacatgcctatcatatagtaaaacccagcccatgacccctaacaggggccctctcagccctcctaatgacctccggcctagccatgtgatttcacttccactccataacgctcctcatactaggcctactaaccaacacactaaccatataccaatgatggcgcgatgtaacacgagaaagcacataccaaggccaccacacaccacctgtccaaaaaggccttcgatacgggataatcctatttattacctcagaagtttttttcttcgcaggatttttctgagccttttaccactccagcctagcccctaccccccaattaggagggcactggcccccaacaggcatcaccccgctaaatcccctagaagtcccactcctaaacacatccgtattactcgcatcaggagtatcaatcacctgagctcaccatagtctaatagaaaacaaccgaaaccaaataattcaagcactgcttattacaattttactgggtctctattttaccctcctacaagcctcagagtacttcgagtctcccttcaccatttccgacggcatctacggctcaacattttttgtagccacaggcttccacggacttcacgtcattattggctcaactttcctcactatctgcttcatccgccaactaatatttcactttacatccaaacatcactttggcttcgaagccgccgcctgatactggcattttgtagatgtggtttgactatttctgtatgtctccatctattgatgagggtcttactcttttagtataaatagtaccgttaacttccaattaactagttttgacaacattcaaaaaagagtaataaacttcgccttaattttaataatcaacaccctcctagccttactactaataattattacattttgactaccacaactcaacggctacatagaaaaatccaccccttacgagtgcggcttcgaccctatatcccccgcccgcgtccctttctccataaaattcttcttagtagctattaccttcttattatttgatctagaaattgccctccttttacccctaccatgagccctacaaacaactaacctgccactaatagttatgtcatccctcttattaatcatcatcctagccctaagtctggcctatgagtgactacaaaaaggattagactgaaccgaattggtatatagtttaaacaaaacgaatgatttcgactcattaaattatgataatcatatctaccaaatgcccctcatttacataaatattatactagcatttaccatctcacttctaggaatactagtatatcgctcacacctcatatcctccctactatgcctagaaggaataatactatcgctgttcattatagctactctcataaccctcaacacccactccctcttagccaatattgtgcctattgccatactagtctttgccgcctgcgaagcagcggtgggcctagccctactagtctcaatctccaacacatatggcctagactacgtacataacctaaacctactccaatgctaaaactaatcgtcccaacaattatattactaccactgacatgactttccaaaaaacacataatttgaatcaacacaaccacccacagcctaattattagcatcatccctctactattttttaaccaaatcaacaacaacctatttagctgttccccaaccttttcctccgaccccctaacaacccccctcctaatactaactacctgactcctacccctcacaatcatggcaagccaacgccacttatccagtgaaccactatcacgaaaaaaactctacctctctatactaatctccctacaaatctccttaattataacattcacagccacagaactaatcatattttatatcttcttcgaaaccacacttatccccaccttggctatcatcacccgatgaggcaaccagccagaacgcctgaacgcaggcacatacttcctattctacaccctagtaggctcccttcccctactcatcgcactgatttacactcacaacaccctaggctcactaaacattctactactcactctcactgcccaagaactatcaaactcctgagccaacaacttaatatgactagcttacacaatagcttttatagtaaagatacctctttacggactccacttatgactccctaaagcccatgtcgaagcccccatcgctgggtcaatagtacttgccgcagtactcttaaaactaggcggctatggtataatacgcctcacactcattctcaaccccctgacaaaacacatagcctaccccttccttgtactatccctatgaggcataattataacaagctccatctgcctacgacaaacagacctaaaatcgctcattgcatactcttcaatcagccacatagccctcgtagtaacagccattctcatccaaaccccctgaagcttcaccggcgcagtcattctcataatcgcccacggacttacatcctcattactattctgcctagcaaactcaaactacgaacgcactcacagtcgcatcataatcctctctcaaggacttcaaactctgctcccactaatagctttttgatgacttctagcaagcctcgctaacctcgccttaccccccactattaacctactgggagaactctctgtgctagtaaccacgttctcctgatcaaatatcactctcctacttacaggactcaacatactagtcacagccctatactccctctacatatttaccacaacacaatggggctcactcacccaccacattaacaacataaaaccctcattcacacgagaaaacaccctcatgttcatacacctatcccccattctcctcctatccctcaaccccgacatcattaccgggttttcctcttgtaaatatagtttaaccaaaacatcagattgtgaatctgacaacagaggcttacgaccccttatttaccgagaaagctcacaagaactgctaactcatgcccccatgtctaacaacatggctttctcaacttttaaaggataacagctatccattggtcttaggccccaaaaattttggtgcaactccaaataaaagtaataaccatgcacactactataaccaccctaaccctgacttccctaattccccccatccttaccaccctcgttaaccctaacaaaaaaaactcatacccccattatgtaaaatccattgtcgcatccacctttattatcagtctcttccccacaacaatattcatgtgcctagaccaagaagttattatctcgaactgacactgagccacaacccaaacaacccagctctccctaagcttcaaactagactacttctccataatattcatccctgtagcattgttcgttacatggtccatcatagaattctcactgtgatatataaactcagacccaaacattaatcagttcttcaaatatctactcatcttcctaattaccatactaatcttagttaccgctaacaacctattccaactgttcatcggctgagagggcgtaggaattatatccttcttgctcatcagttgatgatacgcccgagcagatgccaacacagcagccattcaagcaatcctatacaaccgtatcggcgatatcggtttcatcctcgccttagcatgatttatcctacactccaactcatgagacccacaacaaatagcccttctaaacgctaatccaagcctcaccccactactaggcctcctcctagcagcagcaggcaaatcagcccaattaggtctccacccctgactcccctcagccatagaaggccccaccccagtctcagccctactccactcaagcactatagttgtagcaggaatcttcttactcatccgcttccaccccctagcagaaaatagcccactaatccaaactctaacactatgcttaggcgctatcaccactctgttcgcagcagtctgcgcccttacacaaaatgacatcaaaaaaatcgtagccttctccacttcaagtcaactaggactcataatagttacaatcggcatcaaccaaccacacctagcattcctgcacatctgtacccacgccttcttcaaagccatactatttatgtgctccggatccatcatccacaaccttaacaatgaacaagatattcgaaaaataggaggactactcaaaaccatacctctcacttcaacctccctcaccattggcagcctagcattagcaggaatacctttcctcacaggtttctactccaaagaccacatcatcgaaaccgcaaacatatcatacacaaacgcctgagccctatctattactctcatcgctacctccctgacaagcgcctatagcactcgaataattcttctcaccctaacaggtcaacctcgcttccccacccttactaacattaacgaaaataaccccaccctactaaaccccattaaacgcctggcagccggaagcctattcgcaggatttctcattactaacaacatttcccccgcatcccccttccaaacaacaatccccctctacctaaaactcacagccctcgctgtcactttcctaggacttctaacagccctagacctcaactacctaaccaacaaacttaaaataaaatccccactatgcacattttatttctccaacatactcggattctaccctagcatcacacaccgcacaatcccctatctaggccttctcgcgagccaaaacctgcccctactcctcctagacctaacctgactagaaaagctattacctaaaacaatttcacagcaccaaatctccacctccatcatcacctcaacccaaaaaggcataattaaactttacttcctctctttcttcttcccactcatcctaaccctactcctaatcacataacctattcccccgagcaatctcaattacaatatatacaccaacaaacaatgttcaaccagtaactactactaatcaacgcccatagtcatacaaagcccccgcaccaataggatcctcccgaatcaaccctgacccctctccttcataaattattcagcttcctacactattaaagtttaccacaaccaccaccccatcatactctttcacccacagcaccaatcctacctccatcgctaaccccactaaaacactcaccaagacctcaacccctgacccccatgcctcaggatactcctcaatagccatcgctgtagtatatccaaagacaaccatcattccccctaaataaattaaaaaaactattaaacccatataacctcccccaaaattcagaataataacacacccgaccacaccgctaacaatcaatactaaacccccataaataggagaaggcttagaagaaaaccccacaaaccccattactaaacccacactcaacagaaacaaagcatacatcattattctcgcacgggctacaaccacgaccaatgatatgaaaaaccatcgttgtatttcaactacaagaacaccaatgaccccaatacgcaaaattaaccccctaataaaattaattaaccactcattcatcgacctccccaccccatccaacatctccgcatgatgaaacttcggctcactccttggcgcctgcctgatcctccaaatcaccacaggactattcctagccatacactactcaccagacgcctcaaccgccttttcatcaatcgcccacatcactcgagacgtaaattatggctgaatcatccgctaccttcacgccaatggcgcctcaatattctttatctgcctcttcctacacatcgggcgaggcctatattacggatcatttctctactcagaaacctgaaacatcggcattatcctcctgcttgcaactatagcaacagccttcataggctatgtcctcccgtgaggccaaatatcattctgaggggccacagtaattacaaacttactatccgccatcccatacattgggacagacctagttcaatgaatctgaggaggctactcagtagacagtcccaccctcacacgattctttacctttcacttcatcttgcccttcattattgcagccctagcagcactccacctcctattcttgcacgaaacgggatcaaacaaccccctaggaatcacctcccattccgataaaatcaccttccacccttactacacaatcaaagacgccctcggcttacttctcttcattctctccttaatgacattaacactattctcaccagacctcctaggcgacccagacaattataccctagccaaccccttaaacacccctccccacatcaagcccgaatgatatttcctattcgcctacacaattctccgatccgtccctaacaagctaggaggcgtccttgccctattactatccatcctcatcctagcaataatccccatcctccatatatccaaacaacaaagcataatatttcgcccactaagccaatcactttattgactcctagccgcagacctcctcattctaacctgaatcggaggacaaccagtaagctacccttttaccatcattggacaagtagcatccgtactatacttcacaacaatcctaatcctaataccaactatctccctaattgaaaacaaaatactcaaatgggcctgtccttgtagtataaactaatacaccagtcttgtaaaccgaagatgaaaacctttttccaaggacaaatcagagaaaaagtctttaactccaccattagcacccaaagctaagattctaatttaaactattctctgttctttcatggggaagcagatttgggtaccacccaagtattgactcacccatcaacaaccgctatgtatttcgtacattactgccagccaccatgaatattgcacggtaccataaatacttgaccacctgtagtacataaaaacccaatccacatcaaaaccccctccccatgcttacaagcaagtacagcaatcaaccctcaactatcacacatcgactgcaactccaaagccacccctcacccactaggataccaacaaacctacccatctttaacagtacatagtacataaagccatctaccgtacatagcacattacagtcaaatcccttctcgtccccatggatgacccccctcagataggggtcccttgaccaccatcctccgtgaaatcaatatcccgcacaagagtgctactctcctcgctccgggcccataacacttgggggtagctaaagtgaactgtatccgacatctggttcctacttcagggccataaagcctaaatagcccacacgttccccttaaataagacatcacgatg

SEQ ID NO: 433 - DNA, 16571 bp, Homo sapiens mitochondrial
  3109: "n" refers to a nucleotide at position 3107 of the Cambridge Reference Sequence (CRS, Anderson et al. 1981 Nature 290:457-465), later determined to be absent from the human mtDNA sequence according to the revised CRS (rCRS, Andrews et al. 1999 Nature Genetics 23:147); "n" therefore represents a single nucleotide deletion at a position corresponding to nucleotide 3107 of SEQ ID NO:1 as provided herein.
gatcacaggtctatcaccctattaaccactcacgggagctctccatgcatttggtattttcgtctggggggtgtgcacgcgatagcattgcgagacgctggagccggagcaccctatgtcgcagtatctgtctttgattcctgcctcatcctattatttatcgcacctacgttcaatattacaggcgaacatacttactaaagtgtgttaattaattaatgcttgtaggacataataataacaattgagtgtctgcacagccgctttccacacagacatcataacaaaaaatttccaccaaaccccccctcccccccgcttctggccacagcacttaaacacatctctgccaaaccccaaaaacaaagaaccctaacaccagcctaaccagatttcaaattttatcttttggcggtatgcacttttaacagtcaccccccaactaacacattattttcccctcccactcccatactactaatctcatcaatacaacccccgcccatcctacccagcacacacacaccgctgctaaccccataccccgaaccaaccaaaccccaaagacaccccccacagtttatgtagcttacctcctcaaagcaatacactgaaaatgtttagacgggctcacatcaccccataaacaaataggtttggtcctagcctttctattagctcttagtaagattacacatgcaagcatccccgttccagtgagttcaccctctaaatcaccacgatcaaaagggacaagcatcaagcacgcagcaatgcagctcaaaacgcttagcctagccacacccccacgggaaacagcagtgattaacctttagcaataaacgaaagtttaactaagctatactaaccccagggttggtcaatttcgtgccagccaccgcggtcacacgattaacccaagtcaatagaagccggcgtaaagagtgttttagatcaccccctccccaataaagctaaaactcacctgagttgtaaaaaactccagttgacacaaaatagactacgaaagtggctttaacatatctgaacacacaatagctaagacccaaactgggattagataccccactatgcttagccctaaacctcaacagttaaatcaacaaaactgctcgccagaacactacgagccacagcttaaaactcaaaggacctggcggtgcttcatatccctctagaggagcctgttctgtaatcgataaaccccgatcaacctcaccacctcttgctcagcctatataccgccatcttcagcaaaccctgatgaaggctacaaagtaagcgcaagtacccacgtaaagacgttaggtcaaggtgtagcccatgaggtggcaagaaatgggctacattttctaccccagaaaactacgatagcccttatgaaacttaagggtcgaaggtggatttagcagtaaactgagagtagagtgcttagttgaacagggccctgaagcgcgtacacaccgcccgtcaccctcctcaagtatacttcaaaggacatttaactaaaacccctacgcatttatatagaggagacaagtcgtaacatggtaagtgtactggaaagtgcacttggacgaaccagagtgtagcttaacacaaagcacccaacttacacttaggagatttcaacttaacttgaccgctctgagctaaacctagccccaaacccactccaccttactaccagacaaccttagccaaaccatttacccaaataaagtataggcgatagaaattgaaacctggcgcaatagatatagtaccgcaagggaaagatgaaaaattataaccaagcataatatagcaaggactaacccctataccttctgcataatgaattaactagaaataactttgcaaggagagccaaagctaagacccccgaaaccagacgagctacctaagaacagctaaaagagcacacccgtctatgtagcaaaatagtgggaagatttataggtagaggcgacaaacctaccgagcctggtgatagctggttgtccaagatagaatcttagttcaactttaaatttgcccacagaaccctctaaatccccttgtaaatttaactgttagtccaaagaggaacagctctttggacactaggaaaaaaccttgtagagagagtaaaaaatttaacacccatagtaggcctaaaagcagccaccaattaagaaagcgttcaagctcaacacccactacctaaaaaatcccaaacatataactgaactcctcacacccaattggaccaatctatcaccctatagaagaactaatgttagtataagtaacatgaaaacattctcctccgcataagcctgcgtcagattaaaacactgaactgacaattaacagcccaatatctacaatcaaccaacaagtcattattaccctcactgtcaacccaacacaggcatgctcataaggaaaggttaaaaaaagtaaaaggaactcggcaaatcttaccccgcctgtttaccaaaaacatcacctctagcatcaccagtattagaggcaccgcctgcccagtgacacatgtttaacggccgcggtaccctaaccgtgcaaaggtagcataatcacttgttccttaaatagggacctgtatgaatggctccacgagggttcagctgtctcttacttttaaccagtgaaattgacctgcccgtgaagaggcgggcatgacacagcaagacgagaagaccctatggagctttaatttattaatgcaaacagtacctaacaaacccacaggtcctaaactaccaaacctgcattaaaaatttcggttggggcgacctcggagcagaacccaacctccgagcagtacatgctaagacttcaccagtcaaagcgaactactatactcaattgatccaataacttgaccaacggaacaagttaccctagggataacagcgcaatcctattctagagtccatatcaacaatagggtttacgacctcgatgttggatcaggacatcccgatggtgcagccgctattaaaggttcgtttgttcaacgattaaagtcctacgtgatctgagttcagaccggagtaatccaggtcggtttctatctacnttcaaattcctccctgtacgaaaggacaagagaaataaggcctacttcacaaagcgccttcccccgtaaatgatatcatctcaacttagcattatacccacacccacccaagaacagggtttgttaagatggcagagcccggtaatcgcataaaacttaaaactttacagtcagaggttcaattcctcttcttaacaacatacccatggccaacctcctactcctcattgtacccattctaatcgcaatggcattcctaatgcttaccgaacgaaaaattctaggctatatacaactacgcaaaggccccaacgttgtaggcccctacgggctactacaacccttcgctgacgccataaaactcttcaccaaagagcccctaaaacccgccacatctaccatcaccctctacatcaccgccccgaccttagctctcaccatcgctcttctactatgaacccccctccccatacccaaccccctggtcaacctcaacctaggcctcctatttattctagccacctctagcctagccgtttactcaatcctctgatcagggtgagcatcaaactcaaactacgccctgatcggcgcactgcgagcagtagcccaaacaatctcatatgaagtcaccctagccatcattctactatcaacattactaataagtggctcctttaacctctccacccttatcacaacacaagaacacctctgattactcctgccatcatgacccttggccataatatgatttatctccacactagcagagaccaaccgaacccccttcgaccttgccgaaggggagtccgaactagtctcaggcttcaacatcgaatacgccgcaggccccttcgccctattcttcatagccgaatacacaaacattattataataaacaccctcaccactacaatcttcctaggaacaacatatgacgcactctcccctgaactctacacaacatattttgtcaccaagaccctacttctaacctccctgttcttatgaattcgaacagcatacccccgattccgctacgaccaactcatacacctcctatgaaaaaacttcctaccactcaccctagcattacttatatgatatgtctccatacccattacaatctccagcattccccctcaaacctaagaaatatgtctgataaaagagttactttgatagagtaaataataggagcttaaacccccttatttctaggactatgagaatcgaacccatccctgagaatccaaaattctccgtgccacctatcacaccccatcctaaagtaaggtcagctaaataagctatcgggcccataccccgaaaatgttggttatacccttcccgtactaattaatcccctggcccaacccgtcatctactctaccatctttgcaggcacactcatcacagcgctaagctcgcactgattttttacctgagtaggcctagaaataaacatgctagcttttattccagttctaaccaaaaaaataaaccctcgttccacagaagctgccatcaagtatttcctcacgcaagcaaccgcatccataatccttctaatagctatcctcttcaacaatatactctccggacaatgaaccataaccaatactaccaatcaatactcatcattaataatcataatggctatagcaataaaactaggaatagccccctttcacttctgagtcccagaggttacccaaggcacccctctgacatccggcctgcttcttctcacatgacaaaaactagcccccatctcaatcatataccaaatctctccctcactaaacgtaagccttctcctcactctctcaatcttatccatcatagcaggcagttgaggtggattaaaccaaacccagctacgcaaaatcttagcatactcctcaattacccacataggatgaataatagcagttctaccgtacaaccctaacataaccattcttaatttaactatttatattatcctaactactaccgcattcctactactcaacttaaactccagcaccacgaccctgctactatctcgcacctgaaacaagctaacatgactaacacccttaattccatccaccctcctctccctaggaggcctgcccccgctaaccggctttttgcccaaatgggccattatcgaagaattcacaaaaaacaatagcctcatcatccccaccatcatagccaccatcaccctccttaacctctacttctacctacgcctaatctactccacctcaatcacactactccccatatctaacaacgtaaaaataaaatgacagtttgaacatacaaaacccaccccattcctccccacactcatcgcccttaccacgctactcctacctatctccccttttatactaataatcttatagaaatttaggttaaatacagaccaagagccttcaaagccctcagtaagttgcaatacttaatttctgtaacagctaaggactgcaaaaccccactctgcatcaactgaacgcaaatcagccactttaattaagctaagcccttactagaccaatgggacttaaacccacaaacacttagttaacagctaagcaccctaatcaactggcttcaatctacttctcccgccgccgggaaaaaaggcgggagaagccccggcaggtttgaagctgcttcttcgaatttgcaattcaatatgaaaatcacctcggagctggtaaaaagaggcctaacccctgtctttagatttacagtccaatgcttcactcagccattttacctcacccccactgatgttcgccgaccgttgactattctctacaaaccacaaagacattggaacactatacctattattcggcgcatgagctggagtcctaggcacagctctaagcctccttattcgagccgagctgggccagccaggcaaccttctaggtaacgaccacatctacaacgttatcgtcacagcccatgcatttgtaataatcttcttcatagtaatacccatcataatcggaggctttggcaactgactagttcccctaataatcggtgcccccgatatggcgtttccccgcataaacaacataagcttctgactcttacctccctctctcctactcctgctcgcatctgctatagtggaggccggagcaggaacaggttgaacagtctaccctcccttagcagggaactactcccaccctggagcctccgtagacctaaccatcttctccttacacctagcaggtgtctcctctatcttaggggccatcaatttcatcacaacaattatcaatataaaaccccctgccataacccaataccaaacgcccctcttcgtctgatccgtcctaatcacagcagtcctacttctcctatctctcccagtcctagctgctggcatcactatactactaacagaccgcaacctcaacaccaccttcttcgaccccgccggaggaggagaccccattctataccaacacctattctgatttttcggtcaccctgaagtttatattcttatcctaccaggcttcggaataatctcccatattgtaacttactactccggaaaaaaagaaccatttggatacataggtatggtctgagctatgatatcaattggcttcctagggtttatcgtgtgagcacaccatatatttacagtaggaatagacgtagacacacgagcatatttcacctccgctaccataatcatcgctatccccaccggcgtcaaagtatttagctgactcgccacactccacggaagcaatatgaaatgatctgctgcagtgctctgagccctaggattcatctttcttttcaccgtaggtggcctgactggcattgtattagcaaactcatcactagacatcgtactacacgacacgtactacgttgtagctcacttccactatgtcctatcaataggagctgtatttgccatcataggaggcttcattcactgatttcccctattctcaggctacaccctagaccaaacctacgccaaaatccatttcactatcatattcatcggcgtaaatctaactttcttcccacaacactttctcggcctatccggaatgccccgacgttactcggactaccccgatgcatacaccacatgaaacatcctatcatctgtaggctcattcatttctctaacagcagtaatattaataattttcatgatttgagaagccttcgcttcgaagcgaaaagtcctaatagtagaagaaccctccataaacctggagtgactatatggatgccccccaccctaccacacattcgaagaacccgtatacataaaatctagacaaaaaaggaaggaatcgaaccccccaaagctggtttcaagccaaccccatggcctccatgactttttcaaaaaggtattagaaaaaccatttcataactttgtcaaagttaaattataggctaaatcctatatatcttaatggcacatgcagcgcaagtaggtctacaagacgctacttcccctatcatagaagagcttatcacctttcatgatcacgccctcataatcattttccttatctgcttcctagtcctgtatgcccttttcctaacactcacaacaaaactaactaatactaacatctcagacgctcaggaaatagaaaccgtctgaactatcctgcccgccatcatcctagtcctcatcgccctcccatccctacgcatcctttacataacagacgaggtcaacgatccctcccttaccatcaaatcaattggccaccaatggtactgaacctacgagtacaccgactacggcggactaatcttcaactcctacatacttcccccattattcctagaaccaggcgacctgcgactccttgacgttgacaatcgagtagtactcccgattgaagcccccattcgtataataattacatcacaagacgtcttgcactcatgagctgtccccacattaggcttaaaaacagatgcaattcccggacgtctaaaccaaaccactttcaccgctacacgaccgggggtatactacggtcaatgctctgaaatctgtggagcaaaccacagtttcatgcccatcgtcctagaattaattcccctaaaaatctttgaaatagggcccgtatttaccctatagcaccccctctaccccctctagagcccactgtaaagctaacttagcattaaccttttaagttaaagattaagagaaccaacacctctttacagtgaaatgccccaactaaatactaccgtatggcccaccataattacccccatactccttacactattcctcatcacccaactaaaaatattaaacacaaactaccacctacctccctcaccaaagcccataaaaataaaaaattataacaaaccctgagaaccaaaatgaacgaaaatctgttcgcttcattcattgcccccacaatcctaggcctacccgccgcagtactgatcattctatttccccctctattgatccccacctccaaatatctcatcaacaaccgactaatcaccacccaacaatgactaatcaaactaacctcaaaacaaatgataaccatacacaacactaaaggacgaacctgatctcttatactagtatccttaatcatttttattgccacaactaacctcctcggactcctgcctcactcatttacaccaaccacccaactatctataaacctagccatggccatccccttatgagcgggcgcagtgattataggctttcgctctaagattaaaaatgccctagcccacttcttaccacaaggcacacctacaccccttatccccatactagttattatcgaaaccatcagcctactcattcaaccaatagccctggccgtacgcctaaccgctaacattactgcaggccacctactcatgcacctaattggaagcgccaccctagcaatatcaaccattaaccttccctctacacttatcatcttcacaattctaattctactgactatcctagaaatcgctgtcgccttaatccaagcctacgttttcacacttctagtaagcctctacctgcacgacaacacataatgacccaccaatcacatgcctatcatatagtaaaacccagcccatgacccctaacaggggccctctcagccctcctaatgacctccggcctagccatgtgatttcacttccactccataacgctcctcatactaggcctactaaccaacacactaaccatataccaatgatggcgcgatgtaacacgagaaagcacataccaaggccaccacacaccacctgtccaaaaaggccttcgatacgggataatcctatttattacctcagaaatttttttcttcgcaggatttttctgagccttttaccactccagcctagcccctaccccccaattaggagggcactggcccccaacaggcatcaccccgctaaatcccctagaagtcccactcctaaacacatccgtattactcgcatcaggagtatcaatcacctgagctcaccatagtctaatagaaagcaaccgaaaccaaataattcaagcactgcttattacaattttactgggtctctattttaccctcctacaagcctcagagtacttcgagtctcccttcaccatttccgacggcatctacggctcaacattttttgtagccacaggcttccacggacttcacgtcattattggctcaactttcctcactatctgcttcatccgccaactaatatttcactttacatccaaacatcactttggcttcgaagccgccgcctgatactggcattttgtagatgtggtttgactatttctgtatgtctccatctattgatgagggtcttactcttttagtataaatagtaccgttaacttccaattaactagttttgacaacattcaaaaaagagtaataaacttcgccttaattttaataatcaacaccctcctagccttactactaataattattacattttgactaccacaactcaacggctacatagaaaaatccaccccttacgagtgcggcttcgaccctatatcccccgcccgcgtccctttctccataaaattcttcttagtagctattaccttcttattatttgatctagaaattgccctccttttacccctaccatgagccctacaaacaactaacctgccactaatagttatgtcatccctcttattaatcatcatcctagccctaagtctggcctatgagtgactacaaaaaggattagactgaaccgaattggtatatagtttaaacaaaacgaatgatttcgactcattaaattatgataatcatatttaccaaatgcccctcatttacataaatattatactagcatttaccatctcacttctaggaatactagtatatcgctcacacctcatatcctccctactatgcctagaaggaataatactatcgctgttcattatagctactctcataaccctcaacacccactccctcttagccaatattgtgcctattgccatactagtctttgccgcctgcgaagcagcggtgggcctagccctactagtctcaatctccaacacatatggcctagactacgtacataacctaaacctactccaatgctaaaactaatcgtcccaacaattatattactaccactgacatgactttccaaaaaacacataatttgaatcaacacaaccacccacagcctaattattagcatcatccctctactattttttaaccaaatcaacaacaacctatttagctgttccccaaccttttcctccgaccccctaacaacccccctcctaatactaactacctgactcctacccctcacaatcatggcaagccaacgccacttatccagtgaaccactatcacgaaaaaaactctacctctctatactaatctccctacaaatctccttaattataacattcacagccacagaactaatcatattttatatcttcttcgaaaccacacttatccccaccttggctatcatcacccgatgaggcaaccagccagaacgcctgaacgcaggcacatacttcctattctacaccctagtaggctcccttcccctactcatcgcactaatttacactcacaacaccctaggctcactaaacattctactactcactctcactgcccaagaactatcaaactcctgagccaacaacttaatatgactagcttacacaatagcttttatagtaaagatacctctttacggactccacttatgactccctaaagcccatgtcgaagcccccatcgctgggtcaatagtacttgccgcagtactcttgaaactaggcggctatggtataatacgcctcacactcattctcaaccccctgacaaaacacatagcctaccccttccttgtactatccctatgaggcataattataacaagctccatctgcctacgacaaacagacctaaaatcgctcattgcatactcttcaatcagccacatagccctcgtagtaacagccattctcatccaaaccccctgaagcttcaccggcgcagtcattctcataatcgcccacggacttacatcctcattactattctgcctagcaaactcaaactacgaacgcactcacagtcgcatcataatcctctctcaaggacttcaaactctactcccactaatagctttttgatgacttctagcaagcctcgctaacctcgccttaccccccactattaacctactgggagaactctctgtgctagtaaccacgttctcctgatcaaatatcactctcctacttacaggactcaacatactagtcacagccctatactccctctacatatttaccacaacacaatggggctcactcacccaccacattaacaacataaaaccctcattcacacgagaaaacaccctcatgttcatacacctatcccccattctcctcctatccctcaaccccgacatcattaccgggttttcctcttgtaaatatagtttaaccaaaacatcagattgtgaatctgacaacagaggcttacgaccccttatttaccgagaaagctcacaagaactgctaactcatgcccccatgtctaacaacatggctttctcaacttttaaaggataacagctatccattggtcttaggccccaagaattttggtgcaactccaaataaaagtaataaccatgcacactactataaccaccctaaccctaacttccctaattccccccatccttaccaccctcgttaaccctaacaaaaaaaactcatacccccattatgtaaaatccattgtcgcatccacctttattatcagtctcttccccacaacaatattcatgtgcctagaccaagaagttattatctcgaactgacactgagccacaacccaaacaacccagctctccctaagcttcaaactagactacttctccataatattcatccctgtagcattgttcgttacatggtccatcatagaattctcactgtgatatataaactcagacccaaacattaatcagttcttcaaatatctactcatcttcctaattaccatactaatcttagttaccgctaacaacctattccaactgttcatcggctgagagggcgtaggaattatatccttcttgctcatcagttgatgatacgcccgagcagatgccaacacagcagccattcaagcaatcctatacaaccgtatcggcgatatcggtttcatcctcgccttagcatgatttatcctacactccaactcatgagacccacaacaaatagcccttctaaacgctaatccaagcctcaccccactactaggcctcctcctagcagcagcaggcaaatcagcccaattaggtctccacccctgactcccctcagccatagaaggccccaccccagtctcagccctactccactcaagcactatagttgtagcaggaatcttcttactcatccgcttccaccccctagcagaaaatagcccactaatccaaactctaacactatgcttaggcgctatcaccactctgttcgcagcagtctgcgcccttacacaaaatgacatcaaaaaaatcgtagccttctccacttcaagtcaactaggactcataatagttacaatcggcatcaaccaaccacacctagcattcctgcacatctgtacccacgccttcttcaaagccatactatttatgtgctccgggtccatcatccacaaccttaacaatgaacaagatattcgaaaaataggaggactactcaaaaccatacctctcacttcaacctccctcaccattggcagcctagcattagcaggaatacctttcctcacaggtttctactccaaagaccacatcatcgaaaccgcaaacatatcatacacaaacgcctgagccctatctattactctcatcgctacctccctgacaagcgcctatagcactcgaataatccttctcaccctaacaggtcaacctcgcttccccacccttactaacattaacgaaaataaccccaccctactaaaccccattaaacgcctggcagccggaagcctattcgcaggatttctcattactaacaacatttcccccgcatcccccttccaaacaacaatccccctctacctaaaactcacagccctcgctgtcactttcctaggacttctaacagccctagacctcaactacctaaccaacaaacttaaaataaaatccccactatgcacattttatttctccaacatactcggattctaccctagcatcacacaccgcacaatcccctatctaggccttcttacgagccaaaacctgcccctactcctcctagacctaacctgactagaaaagctattacctaaaacaatttcacagcaccaaatctccacctccatcatcacctcaacccaaaaaggcataattaaactttacttcctctctttcttcttcccactcatcctaaccctactcctaatcacataacctattcccccgagcaatctcaattacaatatatacaccaacaaacaatgttcaaccagtaactactactaatcaacgcccataatcatacaaagcccccgcaccaataggatcctcccgaatcaaccctgacccctctccttcataaattattcagcttcctacactattaaagtttaccacaaccaccaccccatcatactctttcacccacagcaccaatcctacctccatcgctaaccccactaaaacactcaccaagacctcaacccctgacccccatgcctcaggatactcctcaatagccatcgctgtagtatatccaaagacaaccatcattccccctaaataaattaaaaaaactattaaacccatataacctcccccaaaattcagaataataacacacccgaccacaccgctaacaatcaatactaaacccccataaataggagaaggcttagaagaaaaccccacaaaccccattactaaacccacactcaacagaaacaaagcatacatcattattctcgcacggactacaaccacgaccaatgatatgaaaaaccatcgttgtatttcaactacaagaacaccaatgaccccaatacgcaaaattaaccccctaataaaattaattaaccgctcattcatcgacctccccaccccatccaacatctccgcatgatgaaacttcggctcactccttggcgcctgcctgatcctccaaatcaccacaggactattcctagccatgcactactcaccagacgcctcaaccgccttttcatcaatcgcccacatcactcgagacgtaaattatggctgaatcatccgctaccttcacgccaatggcgcctcaatattctttatctgcctcttcctacacatcgggcgaggcctatattacggatcatttctctactcagaaacctgaaacatcggcattatcctcctgcttgcaactatagcaacagccttcataggctatgtcctcccgtgaggccaaatatcattctgaggggccacagtaattacaaacttactatccgccatcccatacattggggcagacctagttcaatgaatctgaggaggctactcagtagacagtcccaccctcacacgattctttacctttcacttcatcttgcccttcattattgcagccctagcagcactccacctcctattcttgcacgaaacgggatcaaacaaccccctaggaatcacctcccattccgataaaatcaccttccacccttactacacaatcaaagacgccctcggcttacttctcttccttctctccttaatgacattaacactattctcaccagacctcctaggcgacccagacaattataccctagccaaccccttaaacacccctccccacatcaagcccgaatgatatttcctattcgcctacacaattctccgatccgtccctaacaaactaggaggcgtccttgccctattactatccatcctcatcctagcaataatccccatcctccatatatccaaacaacaaagcataatatttcgcccactaagccaatcactttattgactcctagccgcagacctcctcattctaacctgaatcggaggacaaccagtaagctacccttttaccatcattggacaagtagcatccgtactatacttcacaacaatcctaatcctaataccaactatctccctaattgaaaacaaaatactcaaatgggcctgtccttgtagtataaactaatacaccagtcttgtaaaccggagatgaaaacctttttccaaggacaaatcagagaaaaagtctttaactccaccattagcacccaaagctaagattctaatttaaactattctctgttctttcatggggaagcagatttgggtaccacccaagtattgactcacccatcaacaaccgctatgtatttcgtacattactgccagccaccatgaatattgtacggtaccataaatacttgaccacctgtagtacataaaaacccaatccacatcaaaaccccctcctcatgcttacaagcaagtacagcaatcaaccctcaactatcacacatcaactgcaactccaaagtcacccctcacccattaggataccaacaaacctacccacccttaacagtacatagtacataaagccatttaccgtacatagcacattacagtcaaatcccttctcgcccccatggatgacccccctcagataggggtcccttggccaccatcctccgtgaaatcaatatcccacacaagagtgctactctcctcgctccgggcccataacacttgggggtagctaaagtgaactgtatccgacatctggttcctacttcagggtcataaagcctaaatagcccacacgttccccttaaataagacatcacgatg

SEQ ID NO: 434 - DNA, 16570 bp, Homo sapiens mitochondrial
  3108: "n" refers to a nucleotide at position 3107 of the Cambridge Reference Sequence (CRS, Anderson et al. 1981 Nature 290:457-465), later determined to be absent from the human mtDNA sequence according to the revised CRS (rCRS, Andrews et al. 1999 Nature Genetics 23:147); "n" therefore represents a single nucleotide deletion at a position corresponding to nucleotide 3107 of SEQ ID NO:1 as provided herein.
gatcacaggtctatcaccctattaaccactcacgggagctctccatgcatttggtattttcgtctggggggtgtgcacgcgatagcattgcgagacgctggagccggagcaccctatgtcgcagtatctgtctttgattcctgccccatcccattatttatcgcacctacgttcaatattacaggcgaacatacttactaaagtgtgttaattaattaatgcttgtaggacataataataacaattgaatgtctgcacagccgctttccacacagacatcataacaaaaaatttccaccaaaccccccctcccccgccttctggccacagcacttaaacacatctctgccaaaccccaaaaacaaagaaccctaacaccagcctaaccagatttcaaattttatcttttggcggtatgcacttttaacagtcaccccccaactaacacattattttcccctcccactcccatactactaatctcatcaatacaacccccgcccatcctacccagcacacacacaccgctgctaaccccataccccgaaccaaccaaaccccaaagacaccccccacagtttatgtagcttacctcctcaaagcaatacactgaaaatgtttagacgggctcacatcaccccataaacaaataggtttggtcctagcctttctattagctcttagtaagattacacatgcaagcatccccattccagtgagttcaccctctaaatcaccacgatcaaaagggacaagcatcaagcacgcagcaatgcagctcaaaacgcttagcctagccacacccccacgggaaacagcagtgattaacctttagcaataaacgaaagtttaactaagctatactaaccccagggttggtcaatttcgtgccagccaccgcggtcacacgattaacccaagtcaatagaagccggcgtaaagagtgttttagatcaccccctccccaataaagctaaaactcacctgagttgtaaaaaactccagttgacacaaaatagactacgaaagtggctttaacatatctgaacacacaatagctaagacccaaactgggattagataccccactatgcttagccctaaacctcaacagttaaatcaacaaaactgctcgccagaacactacgagccacagcttaaaactcaaaggacctggcggtgcttcatatccctctagaggagcctgttctgtaatcgataaaccccgatcaacctcaccacctcttgctcagcctatataccgccatcttcagcaaaccctgatgaaggctacaaagtaagcgcaagtacccacgtaaagacgttaggtcaaggtgtagcccatgaggtggcaagaaatgggctacattttctaccccagaaaactacgatagcccttatgaaacttaagggtcgaaggtggatttagcagtaaactgagagtagagtgcttagttgaacagggccctgaagcgcgtacacaccgcccgtcaccctcctcaagtatacttcaaaggacatttaactaaaacccctacgcatttatatagaggagacaagtcgtaacatggtaagtgtactggaaagtgcacttggacgaaccagagtgtagcttaacacaaagcacccaacttacacttaggagatttcaacttaacttgaccgctctgagctaaacctagccccaaacccactccaccttactaccagacaaccttagccaaaccatttacccaaataaagtataggcgatagaaattgaaacctggcgcaatagatatagtaccgcaagggaaagatgaaaaattatagccaagcataatatagcaaggactaacccctataccttctgcataatgaattaactagaaataactttgcaaggagagccaaagctaagacccccgaaaccagacgagctacctaagaacagctaaaagagcacacccgtctatgtagcaaaatagtgggaagatttataggtagaggcgacaaacctaccgagcctggtgatagctggttgtccaagatagaatcttagttcaactttaaatttgcccacagaaccctctaaatccccttgtaaatttaactgttagtccaaagaggaacagctctttggacactaggaaaaaaccttgtagagagagtaaaaaatttaacacccatagtaggcctaaaagcagccaccaattaagaaagcgttcaagctcaacacccactacctaaaaaatcccaaacatataactgaactcctcacacccaattggaccaatctatcaccctatagaagaactaatgttagtataagtaacatgaaaacattctcctccgcataagcctgcgtcagattaaaacactgaactgacaattaacagcccaatatctacaatcaaccaacaagtcattattaccctcactgtcaacccaacacaggcatgctcataaggaaaggttaaaaaaagtaaaaggaactcggcaaatcttaccccgcctgtttaccaaaaacatcacctctagcatcaccagtattagaggcaccgcctgcccagtgacacatgtttaacggccgcggtaccctaaccgtgcaaaggtagcataatcacttgttccttaaatagggacctgtatgaatggctccacgagggttcagctgtctcttacttttaaccagtgaaattgacctgcccgtgaagaggcgggcatgacacagcaagacgagaagaccctatggagctttaatttattaatgcaaacagtacctaacaaacccacaggtcctaaactaccaaacctgcattaaaaatttcggttggggcgacctcggagcagaacccaacctccgagcagtacatgctaagacttcaccagtcaaagcgaactactatactcaattgatccaataacttgaccaacggaacaagttaccctagggataacagcgcaatcctattctagagtccatatcaacaatagggtttacgacctcgatgttggatcaggacatcccgatggtgcagccgctattaaaggttcgtttgttcaacgattaaagtcctacgtgatctgagttcagaccggagtaatccaggtcggtttctatctacnttcaaattcctccctgtacgaaaggacaagagaaataaggcctacttcacaaagcgccttcccccgtaaatgatatcatctcaacttagtattatacccacacccacccaagaacagggtttgttaagatggcagagcccggtaatcgcataaaacttaaaactttacagtcagaggttcaattcctcttcttaacaacatacccatggccaacctcctactcctcattgtacccattctaatcgcaatggcattcctaatgcttaccgaacgaaaaattctaggctatatacaactacgcaaaggccccaacgttgtaggcccctacgggctactacaacccttcgctgacgccataaaactcttcaccaaggagcccctaaaacccgccacatctaccatcaccctctacatcaccgccccgaccttagctctcaccatcgctcttctactatgaacccccctccccatacccaaccccctggtcaacctcaacctaggcctcctatttattctagccacctctagcctagccgtttactcaatcctctgatcagggtgagcatcaaactcaaactacgccctgatcggcgcactgcgagcagtagcccaaacaatctcatatgaagtcaccctagccatcattctactatcaacattactaataagtggctcctttaacctctccacccttatcacaacacaagaacacctctgattactcctgccatcatgacccttggccataatatgatttatctccacactagcagagaccaaccgaacccccttcgaccttgccgaaggggagtccgaactagtctcaggcttcaacatcgaatacgccgcaggccccttcgccctattcttcatagccgaatacacaaacattattataataaacaccctcaccactacaatcttcctaggaacaacatatgacgcactctcccctgaactctacacaacatattttgtcaccaagaccctacttctaacctccctgttcttatgaattcgaacagcatacccccgattccgctacgaccaactcatacacctcctatgaaaaaacttcctaccactcaccctagcattacttatatgatatgtctccatacccattacaatctccagcattccccctcaaacctaagaaatatgtctgataaaagagttactttgatagagtaaataataggagcttaaacccccttatttctaggactatgagaatcgaacccatccctgagaatccaaaattctccgtgccacctatcacaccccatcctaaagtaaggtcagctaaataagctatcgggcccataccccgaaaatgttggttatacccttcccgtactaattaatcccctggcccaacccgtcatctactctaccatctttgcaggcacactcatcacagcgctaagctcgcactgattttttacctgagcaggcctagaaataaacatgctagcttttattccagttctaaccaaaaaaataaaccctcgttccacagaagctgccatcaagtatttcctcacgcaagcaaccgcatccataatccttctaatagctatcctcttcaacaatatactctccggacaatgaaccataaccaatactaccaatcaatactcatcattaataatcataatggctatagcaataaaactaggaatagccccctttcacttctgagtcccagaggttacccaaggcacccctctgacatccggcctgcttcttctcacatgacaaaaactagcccccatctcaatcatataccaaatctctccctcactaaacgtaagccttctcctcactctctcaatcttatccatcatagcaggcagttgaggtggattaaaccaaacccagctacgcaaaatcttagcatactcctcaattacccacataggatgaataatagcagttctaccgtacaaccctaacataaccattcttaatttaactatttatattatcctaactactaccgcattcctactactcaacttaaactccagcaccacgaccctactactatctcgcacctgaaacaagctaacatgactaacacccttaattccatccaccctcctctccctaggaggcctgcccccgctaaccggctttttgcccaaatgggccattatcgaagaattcacaaaaaacaatagcctcatcatccccaccatcatagccaccatcaccctccttaacctctacttctacctacgcctaatctactccacctcaatcacactactccccatatctaacaacgtaaaaataaaatgacagtttgaacatacaaaacccaccccattcctccccacactcatcgcccttaccacgctactcctacctatctccccttttatactaataatcttatagaaatttaggttaaatacagaccaagagccttcaaagccctcagtaagttgcaatacttaatttctgtaacagctaaggactgcaaaaccccactctgcatcaactgaacgcaaatcagccactttaattaagctaagcccttactagaccaatgggacttaaacccacaaacacttagttaacagctaagcaccctaatcaactggcttcaatctacttctcccgccgccgggaaaaaaggcgggagaagccccggcaggtttgaagctgcttcttcgaatttgcaattcaatatgaaaatcacctcggagctggtaaaaagaggcctaacccctgtctttagatttacagtccaatgcttcactcagccattttacctcacccccactgatgttcgccgaccgttgactattctctacaaaccacaaagacattggaacactatacctattattcggcgcatgagctggagtcctaggcacagctctaagcctccttattcgagccgagctgggccagccaggcaaccttctaggtaacgaccacatctacaacgttatcgtcacagcccatgcatttgtaataatcttcttcatagtaatacccatcataatcggaggctttggcaactgactagttcccctaataatcggtgcccccgatatggcgtttccccgcataaacaacataagcttctgactcttacctccctctctcctactcctgctcgcatctgctatagtggaggccggagcaggaacaggttgaacagtctaccctcccttagcagggaactactcccaccctggagcctccgtagacctaaccatcttctccttacacctagcaggtgtctcctctatcttaggggccatcaatttcatcacaacaattatcaatataaaaccccctgccataacccaataccaaacgcccctcttcgtctgatccgtcctaatcacagcagtcctacttctcctatctctcccagtcctagctgctggcatcactatactactaacagaccgcaacctcaacaccaccttcttcgaccccgccggaggaggagaccccattctataccaacacctattctgatttttcggtcaccctgaagtttatattcttatcctaccaggcttcggaataatctcccatattgtaacttactactccggaaaaaaagaaccatttggatacataggtatggtctgagctatgatatcaattggcttcctagggtttatcgtgtgagcacaccatatatttacagtaggaatagacgtagacacacgagcatatttcacctccgctaccataatcatcgctatccccaccggcgtcaaagtatttagctgactcgccacactccacggaagcaatatgaaatgatctgctgcagtgctctgagccctaggattcatctttcttttcaccgtaggtggcctgactggcattgtattagcaaactcatcactagacatcgtactacacgacacgtactacgttgtagctcacttccactatgtcctatcaataggagctgtatttgccatcataggaggcttcattcactgatttcccctattctcaggctacaccctagaccaaacctacgccaaaatccatttcactatcatattcatcggcgtaaatctaactttcttcccacaacactttctcggcctatccggaatgccccgacgttactcggactaccccgatgcatacaccacatgaaacatcctatcatctgtaggctcattcatttctctaacagcagtaatattaataattttcatgatttgagaagccttcgcttcgaagcgaaaagtcctaatagtagaagaaccctccataaacctggagtgactatatggatgccccccaccctaccacacattcgaagaacccgtatacataaaatctagacaaaaaaggaaggaatcgaaccccccaaagctggtttcaagccaaccccatggcctccatgactttttcaaaaaggtattagaaaaaccatttcataactttgtcaaagttaaattataggctaaatcctatatatcttaatggcacatgcagcgcaagtaggtctacaagacgctacttcccctatcatagaagagcttatcacctttcatgatcacgccctcataatcattttccttatctgcttcctagtcctgtatgcccttttcctaacactcacaacaaaactaactaatactaacatctcagacgctcaggaaatagaaaccgtctgaactatcctgcccgccatcatcctagtcctcatcgccctcccatccctacgcatcctttacataacagacgaggtcaacgatccctcccttaccatcaaatcaattggccaccaatggtactgaacctacgagtacaccgactacggcggactaatcttcaactcctacatacttcccccattattcctagaaccaggcgacctgcgactccttgacgttgacaatcgagtagtactcccgattgaagcccccattcgtataataattacatcacaagacgtcttgcactcatgagctgtccccacattaggcttaaaaacagatgcaattcccggacgtctaaaccaaaccactttcaccgctacacgaccgggggtatactacggtcaatgctctgaaatctgtggagcaaaccacagtttcatgcccatcgtcctagaattaattcccctaaaaatctttgaaatagggcccgtatttaccctatagcaccccctctaccccctctagagcccactgtaaagctaacttagcattaaccttttaagttaaagattaagagaaccaacacctctttacagtgaaatgccccaactaaatactaccgtatggcccaccataattacccccatactccttacactattcctcatcacccaactaaaaatattaaacacaaactaccacctacctccctcaccaaagcccataaaaataaaaaattataacaaaccctgagaaccaaaatgaacgaaaatctgttcgcttcattcattgcccccacaatcctaggcctacccgccgcagtactgatcattctatttccccctctattgatccccacctccaaatatctcatcaacaaccgactaatcaccacccaacaatgactaatcaaactaacctcaaaacaaatgataaccatacacaacactaaaggacgaacctgatctcttatactagtatccttaatcatttttattgccacaactaacctcctcggactcctgcctcactcatttacaccaaccacccaactatctataaacctagccatggccatccccttatgagcgggcgcagtgattataggctttcgctctaagattaaaaatgccctagcccacttcttaccacaaggcacacctacaccccttatccccatactagttattatcgaaaccatcagcctactcattcaaccaatagccctggccgtacgcctaaccgctaacattactgcaggccacctactcatgcacctaattggaagcaccaccctagcaatatcaaccattaaccttccctctacacttatcatcttcacaattctaattctactgactatcctagaaatcgctgtcgccttaatccaagcctacgttttcacacttctagtaagcctctacctgcacgacaacacataatgacccaccaatcacatgcctatcatatagtaaaacccagcccatgacccctaacaggggccctctcagccctcctaatgacctccggcctagccatgtgatttcacttccactccataacgctcctcatactaggcctactaaccaacacactaaccatataccaatgatggcgcgatgtaacacgagaaagcacataccaaggccaccacacaccacctgtccaaaaaggccttcgatacgggataatcctatttattacctcagaagtttttttcttcgcaggatttttctgagccttttaccactccagcctagcccctaccccccaattaggagggcactggcccccaacaggcatcaccccgctaaatcccctagaagtcccactcctaaacacatccgtattactcgcatcaggagtatcaatcacctgagctcaccatagtctaatagaaaacaaccgaaaccaaataattcaagcactgctcattacaattttactgggcctctattttaccctcctacaagcctcagagtacttcgagtctcccttcaccatttccgacggcatctacggctcaacattttttgtagccacaggcttccacggacttcacgtcattattggctcaactttcctcactatctgcttcatccgccaactaatatttcactttacatccaaacatcactttggcttcgaagccgccgcctgatactggcattttgtagatgtggtttgactatttctgtatgtctccatctattgatgagggtcttactcttttagtataaatagtaccgttaacttccaattaactagttttgacaacattcaaaaaagagtaataaacttcgccttaattttaataatcaacaccctcctagccttactactaataattattacattttgactaccacaactcaacggctacatagaaaaatccaccccttacgagtgcggcttcgaccctatatcccccgcccgcgtccctttctccataaaattcttcttagtagctattaccttcttattatttgatctagaaattgccctccttttacccctaccatgagccctacaaacaactaacctgccactaatagttatgtcatccctcttattaatcatcatcctagccctaagtctggcctatgagtgactacaaaaaggattagactgaaccgaattggtatatagtttaaacaaaacgaatgatttcgactcattaaattatgataatcatatttaccaaatgcccctcatttacataaatattatactagcatttaccatctcacttctaggaatactagtatatcgctcacacctcatgtcctccctactatgcctagaaggaataatactatcgctgttcattatagctactctcataaccctcaacacccactccctcttagccaatattgtgcctattgccatactagtctttgccgcctgcgaagcagcggtgggcctagccctactagtctcaatctccaacacatatggcctagactacgtacataacctaaacctactccaatgctaaaactaatcgtcccaacaattatattactaccactgacatgactttccaaaaaacacataatttgaatcaacacaaccacccacagcctaattattagcatcatccctctactattttttaaccaaatcaacaacaacctatttagctgttccccaaccttttcctccgaccccctaacaacccccctcctaatactaactacctgactcctacccctcacaatcatggcaagccaacgccacttatccagtgaaccactatcacgaaaaaaactctacctctctatactaatctccctacaaatctccttaattataacattcacagccacagaactaatcatattttatatcttcttcgaaaccacacttatccccaccttggctatcatcacccgatgaggcaaccagccagaacgcctgaacgcaggcacatacttcctattctacaccctagtaggctcccttcccctactcatcgcactaatttacactcacaacaccctaggctcactaaacattctactactcaccctcactgcccaagaactatcaaactcctgagccaacaacttaatatgactagcttacacaatagcttttatagtaaagatacctctttacggactccacttatgactccctaaagcccatgtcgaagcccccatcgctgggtcaatagtacttgccgcagtactcttgaaactaggcggctatggtataatacgcctcacactcattctcaaccccctgacaaaacacatagcctaccccttccttgtactatccctatgaggcataattataacaagctccatctgcctacgacaaacagacctaaaatcgctcattgcatactcttcaatcagccacatagccctcgtagtaacagccattctcatccaaaccccctgaagcttcaccggcgcagtcattctcataatcgcccacggacttacatcctcattactattctgcctagcaaactcaaactacgaacgcactcacagtcgcatcataatcctctctcaaggacttcaaactctactcccactaatagctttttgatgacttctagcaagcctcgctaacctcgccttaccccccactattaacctactgggagaactctctgtgctagtaaccacgttctcctgatcaaatatcactctcctacttacaggactcaacatactagtcacagccctatactccctctacatatttaccacaacacaatggggctcactcacccaccacattaacaacataaaaccctcattcacacgagaaaacaccctcatgttcatacacctatcccccattctcctcctatccctcaaccccgacatcattaccgggttttcctcttgtaaatatagtttaaccaaaacatcagattgtgaatctgacaacagaggcttacgaccccttatttaccgagaaagctcacaagaactgctaactcatgcccccatgtctaacaacatggctttctcaacttttaaaggataacagctatccattggtcttaggccccaagaattttggtgcaactccaaataaaagtaataaccatgcacactactataaccaccctaaccctaacttccctaattccccccatccttaccaccctcgttaaccctaacaaaaaaaactcatacccccattatgtaaaatccattgtcgcatccacctttattatcagtctcttccccacaacaatattcatgtgcctagaccaagaagttattatctcgaactgacactgagccacaacccaaacaacccagctctccctaagcttcaaactagactacttctccataatattcatccctgtagcattgttcgttacatggtccatcatagaattctcactgtgatatataaactcagacccaaacattaatcagttcttcaaatatctactcatcttcctaattaccatactaatcttagttaccgctaacaacctattccaactgttcatcggctgagagggcgtaggaattatatccttcttgctcatcagttgatgatacgcccgagcagatgccaacacagcagccattcaagcaatcctatacaaccgtatcggcgatatcggtttcatcctcgccttagcatgatttatcctacactccaactcatgagacccacaacaaatagcccttctaaacgctaatccaagcctcaccccactactaggcctcctcctagcagcagcaggcaaatcagcccaattaggtctccacccctgactcccctcagccatagaaggccccaccccagtctcagccctactccactcaagcactatagttgtagcaggaatcttcttactcatccgcttccaccccctagcagaaaatagcccactaatccaaactctaacactatgcttaggcgctatcaccactctgttcgcagcagtctgcgcccttacacaaaatgacatcaaaaaaatcgtagccttctccacttcaagtcaactaggactcataatagttacaatcggcatcaaccaaccacacctagcattcctgcacatctgtacccacgccttcttcaaagccatactatttatgtgctccgggtccatcatccacaaccttaacaatgaacaagatattcgaaaaataggaggactactcaaaaccatacctctcacttcaacctccctcaccattggcagcctagcattagcaggaatacctttcctcacaggtttctactccaaagaccacatcatcgaaaccgcaaacatatcatacacaaacgcctgagccctatctattactctcatcgctacctccctgacaagcgcctatagcactcgaataattcttctcaccctaacaggtcaacctcgcttccccacccttactaacattaacgaaaataaccccaccctactaaaccccattaaacgcctggcagccggaagcctattcgcaggatttctcattactaacaacatttcccccgcatcccccttccaaacaacaatccccctctacctaaaactcacagccctcgctgtcactttcctaggacttctaacagccctagacctcaactacctaaccaacaaacttaaaataaaatccccactatgcacattttatttctccaacatactcggattctaccctagcatcacacaccgcacaatcccctatctaggccttcttacgagccaaaacctgcccctactcctcctagacctaacctgactagaaaagctattacctaaaacaatttcacagcaccaaatctccacctccatcatcacctcaacccaaaaaggcataattaaactttacttcctctctttcttcttcccactcatcctaaccctactcctaatcacataacctattcccccgagcaatttcaattacaatatatacaccaacaaacaatgttcaaccagtaactactactaatcaacgcccataatcatacaaagcccccgcaccaataggatcctcccgaatcaaccctgacccctctccttcataaattattcagcttcctacactattaaagtttaccacaaccaccaccccatcatactctttcacccacagcaccaatcctacctccatcgctaaccccactaaaacactcaccaagacctcaacccctgacccccatgcctcaggatactcctcaatagccatcgctgtagtatatccaaagacaaccatcattccccctaaataaattaaaaaaactattaaacccatataacctcccccaaaattcagaataataacacacccgaccacaccgctaacaatcaatactaaacccccataaataggagaaggcttagaagaaaaccccacaaaccccattactaaacccacactcaacagaaacaaagcatacatcattattctcgcacggactacaaccacgaccaatgatatgaaaaaccatcgttgtatttcaactacaagaacaccaatgaccccaatacgcaaaattaaccccctaataaaattaattaaccactcactcatcgacctccccaccccatccaacatctccgcatgatgaaacttcggctcactccttggcgcctgcctgatcctccaaatcaccacaggactattcctagccatgcactactcaccagacgcctcaaccgccttttcatcaatcgcccacatcactcgagacgtaaattatggctgaatcatccgctaccttcacgccaatggcgcctcaatattctttatctgcctcttcctacacatcgggcgaggcctatattacggatcatttctctactcagaaacctgaaacatcggcattatcctcctgcttgcaactatagcaacagccttcataggctatgtcctcccgtgaggccaaatatcattctgaggggccacagtaattacaaacttactatccgccatcccatacattgggacagacctagttcaatgaatctgaggaggctactcagtagacagtcccaccctcacacgattctttacctttcacttcatcttgcccttcattattgcagccctagcagcactccacctcctattcttgcacgaaacgggatcaaacaaccccctaggaatcacctcccattccgataaaatcaccttccacccttactacacaatcaaagacgccctcggcttacttctcttccttctctccttaatgacattaacactattctcaccagacctcctaggcgacccagacaattataccctagccaaccccttaaacacccctccccacatcaagcccgaatgatatttcctattcgcctacacaattctccgatccgtccctaacaaactaggaggcgtccttgccctattactatccatcctcatcctagcaataatccccatcctccatatatccaaacaacaaagcataatatttcgcccactaagccaatcactttattgactcctagccgcagacctcctcattctaacctgaatcggaggacaaccagtaagctacccttttaccatcattggacaagtagcatccgtactatacttcacaacaatcctaatcctaataccaactatctccctaattgaaaacaaaatactcaaatgggcctgtccttgtagtataaactaatacaccagtcttgtaaaccggagatgaaaacctttttccaaggacaaatcagagaaaaagtctttaactccaccattagcacccaaagctaagattctaatttaaactattctctgttctttcatggggaagcagatttgggtaccacccaagtattgactcacccatcaacaaccgctatgtatttcgtacattactgccagccaccatgaatattgtacggtaccataaatacttgaccacctgtagtacataaaaacccaatccacatcaaaaccccctccccatgcttacaagcaagtacagcaatcaacccccaactatcacacatcaactgcaactccaaagccacccctcacccactaggataccaacaaacctacccacccttaacagtacatagcacataaagccatttaccgtacatagcacattacagtcaaatcccttctcgtccccatggatgacccccctcagataggggtcccttgaccaccatcctccgtgaaatcaatatcccgcacaagagtgctactctcctcgctccgggcccataacacttgggggtagctaaagtgaactgtatccgacatctggttcctacttcagggccataaagcctaaatagcccacacgttccccttaaataagacatcacgatg

SEQ ID NO: 435 - DNA, 16568 bp, Homo sapiens mitochondrial
  3106: "n" refers to a nucleotide at position 3107 of the Cambridge Reference Sequence (CRS, Anderson et al. 1981 Nature 290:457-465), later determined to be absent from the human mtDNA sequence according to the revised CRS (rCRS, Andrews et al. 1999 Nature Genetics 23:147); "n" therefore represents a single nucleotide deletion at a position corresponding to nucleotide 3107 of SEQ ID NO:1 as provided herein.
gatcacaggtctatcaccctattaaccactcacgggagctctccatgcatttggtattttcgtctggggggtgtgcacgcgatagcattgcgagacgctggagccggagcaccctatgtcgcagtatctgtctttgattcctaccccatcccattatttatcgcacctacgttcaatattacaggcgaacatacctactaaagtgtgttaattaattaatgcttgtaggacataataataacaattgaatgtctgcacagccgctttccacacagacatcataacaaaaaatttccaccaaaccccccctcccccgccttctggccacagcacttaaacacatctctgccaaaccccaaaaacaaagaaccctaacaccagcctaaccagatttcaaattttatcttttggcggtatgcacttttaacagtcaccccccaactaacacattattttcccctcccactcccatactactaatctcatcaatacaacccccgcccatcctacccagcacacacaccgctgctaaccccataccccgaaccaaccaaaccccaaagacaccccccacagtttatgtagcttacctcctcaaagcaatacactgaaaatgtttagacgggctcacatcaccccataaacaaataggtttggtcctagcctttctattagctcttagtaagattacacatgcaagcatccccgttccagtgagttcaccctctaaatcaccacgatcaaaagggacaagcatcaagcacgcaacaatgcagctcaaaacgcttagcctagccacacccccacgggaaacagcagtgattaacctttagcaataaacgaaagtttaactaagctatactaaccccagggttggtcaatttcgtgccagccaccgcggtcacacgattaacccaagtcaatagaagccggcgtaaagagtgttttagatcaccccctccccaataaagctaaaactcacctgagttgtaaaaaactccagttgacacaaaataaactacgaaagtggctttaacatatctgaacacacaatagctaagacccaaactgggattagataccccactatgcttagccctaaacctcaacagttaaatcaacaaaactgctcgccagaacactacgagccacagcttaaaactcaaaggacctggcggtgcttcatatccctctagaggagcctgttctgtaatcgataaaccccgatcaacctcaccacctcttgctcagcctatataccgccatcttcagcaaaccctgatgaaggctacaaagtaagcgcaagtacccacgtaaagacgttaggtcaaggtgtagcccatgaggtggcaagaaatgggctacattttctaccccagaaaactacgatagcccttatgaaacttaagggtcgaaggtggatttagcagtaaactgagagtagagtgcttagttgaacagggccctgaagcgcgtacacaccgcccgtcaccctcctcaagtatacttcaaaggacatttaactaaaacccctacgcatttatatagaggagacaagtcgtaacatggtaagtgtactggaaagtgcacttggacgaaccagagtgtagcttaacacaaagcacccaacttacacttaggagatttcaacttaacttgaccgctctgagctaaacctagccccaaacccactccaccttactaccagacaaccttagccaaaccatttacccaaataaagtataggcgatagaaattgaaacctggcgcaatagatatagtaccgcaagggaaagatgaaaaattataaccaagcataatatagcaaggactaacccctataccttctgcataatgaattaactagaaataactttgcaaggagagccaaagctaagacccccgaaaccagacgagctacctaagaacagctaaaagagcacacccgtctatgtagcaaaatagtgggaagatttataggtagaggcgacaaacctaccgagcctggtgatagctggttgtccaagatagaatcttagttcaactttaaatttgcccacagaaccctctaaatccccttgcaaatttaactgttagtccaaagaggaacagctctttggacactaggaaaaaaccttgtagagagagtaaaaaatttaacacccatagtaggcctaaaagcagccaccaattaagaaagcgttcaagctcaacacccactacctaaaaaatcccaaacatataactgaactcctcacacccaattggaccaatctatcaccctatagaagaactaatgttagtataagtaacatgaaaacattctcctccgcataagcctgcgtcagattaaaacactgaactgacaattaacagcccaatatctacaatcaaccaacaagtcattattacccccactgtcaacccaacacaggcatgctcataaggaaaggttaaaaaaagtaaaaggaactcggcaaatcttaccccgcctgtttaccaaaaacatcacctctagcatcaccagtattagaggcaccgcctgcccagtgacacatgtttaacggccgcggtaccctaaccgtgcaaaggtagcataatcacttgttccttaaatagggacctgtatgaatggctccacgagggttcagctgtctcttacttttaaccagtgaaattgacctgcccgtgaagaggcgggcatgacacagcaagacgagaagaccctatggagctttaatttattaatgcaaacagtacctaacaaacccacaggtcctaaactactaaacctgcattaaaaatttcggttggggcgacctcggagcagaacccaacctccgagcagtacatgctaagacttcaccagtcaaagcgaactactatactcaattgatccaataacttgaccaacggaacaagttaccctagggataacagcgcaatcctattctagagtccatatcaacaatagggtttacgacctcgatgttggatcaggacatcccgatggtgcagccgctattaaaggttcgtttgttcaacgattaaagtcctacgtgatctgagttcagaccggagtaatccaggtcggtttctatctacnttcaaattcctccctgtacgaaaggacaagagaaataaggcctacttcacaaagcgccttcccccgtaaatgatatcatctcaacttagtattatacccacacccacccaagaacagggtttgttaagatggcagagcccggtaatcgcataaaacttaaaactttacagtcagaggttcaattcctcttcttaacaacatacccatggccaacctcctactcctcattgtacccattctaatcgcaatggcattcctaatgcttaccgaacgaaaaattctaggctatatacaactacgcaaaggccccaacgttgtaggcccctacgggctactacaacccttcgctgacgccataaaactcttcaccaaagagcccctaaaacccgccacatctaccatcaccctctacatcaccgccccgaccttagctctcaccatcgctcttctactatgaacccccctccccatacccaaccccctggttaacctcaacctaggcctcctatttattctagccacctctagcctagccgtttactcaatcctctgatcagggtgagcatcaaactcaaactacgccctgatcggcgcactgcgagcagtagcccaaacaatctcatatgaagtcaccctagccatcattctactatcaacattactaataagtggctcctttaacctctccacccttatcacaacacaagaacacctctgattactcctgccatcatgacccttggccataatatgatttatctccacactagcagagaccaaccgaacccccttcgaccttgccgaaggggagtccgaactagtctcaggcttcaacatcgaatacgccgcaggccccttcgccctattcttcatagccgaatacacaaacattattataataaacaccctcaccactacaatcttcctaggaacaacatatgacgcactctcccctgaactctacacaacatattttgtcaccaagaccctacttctgacctccctgttcttatgaattcgaacagcatacccccgattccgctacgaccaactcatacacctcctatgaaaaaacttcctaccactcaccctagcattacttatatgatatgtctccatacccattacaatctccagcattccccctcaaacctaagaaatatgtctgataaaagagttactttgatagagtaaataataggagcttaaacccccttatttctaggactatgagaatcgaacccatccctgagaatccaaaatcctccgtgccacctatcacaccccatcctaaagtaaggtcagctaaataagctatcgggcccataccccgaaaatgttggttatacccttcccgtactaattaatcccctggcccaacccgtcatctactctaccatctttgcaggcacactcatcacagcgctaagctcgcactgattttttacctgagtaggcctagaaataaacatgctagcttttattccagttctaaccaaaaaaataaaccctcgttccacagaagctgccatcaagtatttcctcacgcaagcaaccgcatccataatccttctaatagctatcctcttcaacaatatactctccggacaatgaaccataaccaatactaccaatcaatactcatcattaataatcataatggctatagcaataaaactaggaatagccccctttcacttctgagtcccagaggttacccaaggcacccctctgacatccggcctgcttcttctcacatgacaaaaactagcccccatctcaatcatataccaaatctctccctcactaaacgtaagccttctcctcactctctcaatcttatccatcatagcaggcagttgaggtggattaaaccaaacccagctacgcaaaatcttagcatactcctcaattacccacataggatgaataatagcagttctaccgtacaaccctaacataaccattcttaatttaactatttatattatcctaactactaccgcattcctactactcaacttaaactccagcaccacgaccctactactatctcgcacctgaaacaagctaacatgactaacacccttaattccatccaccctcctctccctaggaggcctgcccccgctaaccggctttttgcccaaatgggccattatcgaagaattcacaaaaaacaatagcctcatcatccccaccatcatagccaccatcaccctccttaacctctacttctacctacgcctaatctactccacctcaatcacactactccccatatctaacaacgtaaaaataaaatgacagtttgaacatacaaaacccaccccattcctccccacactcatcgcccttaccacgctactcctacctatctccccttttatactaataatcttatagaaatttaggttaaatacagaccaagagccttcaaagccctcagtaagttgcaatacttaatttctgtaacagctaaggactgcaaaaccccactctgcatcaactgaacgcaaatcagccactttaattaagctaagcccttactagaccaatgggacttaaacccacaaacacttagttaacagctaagcaccctaatcaactggcttcaatctacttctcccgccgccgggaaaaaaggcgggagaagccccggcaggtttgaagctgcttcttcgaatttgcaattcaatatgaaaatcacctcggagctggtaaaaagaggcctaacccctgtctttagatttacagtccaatgcttcactcagccattttacctcacccccactgatgttcgccgaccgttgactattctctacaaaccacaaagacattggaacactatacctattattcggcgcatgagctggagtcctaggcacagctctaagcctccttattcgagccgagctgggccagccaggcaaccttctaggtaacgaccacatctacaacgttatcgtcacagcccatgcatttgtaataatcttcttcatagtaatacccatcataatcggaggctttggcaactgactagttcccctaataatcggtgcccccgatatggcgtttccccgcataaacaacataagcttctgactcttacctccctctctcctactcctgctcgcatctgctatagtggaggccggagcaggaacaggttgaacagtctaccctcccttagcagggaactactcccaccctggagcctccgtagacctaaccatcttctccttacacctagcaggtgtctcctctatcttaggggccatcaatttcatcacaacaattatcaatataaaaccccctgccataacccaataccaaacgcccctcttcgtctgatccgtcctaatcacagcagtcctacttctcctatctctcccagtcctagctgctggcatcactatactactaacagaccgcaacctcaacaccaccttcttcgaccccgccggaggaggagaccccattctataccaacacctattctgatttttcggtcaccctgaagtttatattcttatcctaccaggcttcggaataatctcccatattgtaacttactactccggaaaaaaagaaccatttggatacataggtatggtctgagctatgatatcaattggcttcctagggtttatcgtgtgagcacaccatatatttacagtaggaatagacgtagacacacgagcatatttcacctccgctaccataatcatcgctatccccaccggcgtcaaagtatttagctgactcgccacactccacggaagcaatatgaaatgatctgctgcagtgctctgagccctaggattcatctttcttttcaccgtaggtggcctgactggcattgtattagcaaactcatcactagacatcgtactacacgacacgtactacgttgtagctcacttccactatgtcctatcaataggagctgtatttgccatcataggaggcttcattcactgatttcccctattctcaggctacaccctagaccaaacctacgccaaaatccatttcactatcatattcatcggcgtaaatctaaccttcttcccacaacactttctcggcctatccggaatgccccgacgttactcggactaccccgatgcatacaccacatgaaatatcctatcatctgtaggttcattcatttctctaacagcagtaatattaataattttcatgatttgagaagccttcgcttcgaagcgaaaagtcctaatagtagaagaaccctccataaacctggagtgactatatggatgccccccaccctaccacacattcgaagaacccgtatacataaaatctagacaaaaaaggaaggaatcgaaccccccaaagctggtttcaagccaaccccatggcctccatgactttttcaaaaagatattagaaaaaccatttcataactttgtcaaagttaaattataggctaaatcctatatatcttaatggcacatgcagcgcaagtaggtctacaagacgctacttcccctatcatagaagagcttatcacctttcatgatcacgccctcataatcattttccttatctgcttcctagtcctgtatgcccttttcctaacactcacaacaaaactaactaatactaacatctcagacgctcaggaaatagagaccgtctgaactatcctgcccgccatcatcctagtcctcatcgccctcccatccctacgcatcctttacataacagacgaggtcaacgatccctcccttaccatcaaatcaattggccaccaatggtactgaacctacgagtacaccgactacggcggactaatcttcaactcctacatacttcccccattattcctagaaccaggcgacctgcgactccttgacgttgacaatcgagtagtactcccgattgaagcccccattcgtataataattacatcacaagacgtcttgcactcatgagctgtccccacattaggcttaaaaacagatgcaattcccggacgtctaaaccaaaccactttcaccgctacacgaccgggggtatactacggtcaatgctctgaaatctgtggagcaaaccacagtttcatacccatcgtcctagaattaattcccctaaaaatctttgaaatagggcccgtatttaccctatagcaccccctctaccccctctagagcccactgtaaagctaacttagcattaaccttttaagttaaagattaagagaaccaacacctctttacagtgaaatgccccaactaaatactaccgtatggcccaccataattacccccatactccttacactattcctcatcacccaactaaaaatattaaacacaaactaccacctacctccctcaccaaagcccataaaaataaaaaattataacaaaccctgagaaccaaaatgaacgaaaatctgttcgcttcattcattgcccccacaatcctaggcctacccgccgcagtactgatcattctatttccccctctattgatccccacctccaaatatctcatcaacaaccgactaatcaccacccaacaatgactaatcaaactaacctcaaaacaaatgatagccatacacaacactaaaggacgaacctgatctcttatactagtatccttaatcatttttattgccacaactaacctcctcggactcctgcctcactcatttacaccaaccacccaactatctataaacctagccatggccatccccttatgagcgggcgcagtgattataggctttcgctctaagattaaaaatgccctagcccacttcttaccacaaggcacacctacaccccttatccccatactagttattatcgaaaccatcagcctactcattcaaccaatagccctggccgtacgcctaaccgctaacattactgcaggccacctactcatgcacctaattggaagcgccaccctagcaatatcaaccattaaccttccctctacacttatcatcttcacaattctaattctactgactatcctagaaatcgctgtcgccttaatccaagcctacgttttcacacttctagtaagcctctacctgcacgacaacacataatgacccaccaatcgcatgcctatcatatagtaaaacccagcccatgacccctaacaggggccctctcagccctcctaatgacctccggcctagccatgtgatttcacttccactccataacgctcctcatactaggcctactaaccaacacactaaccatataccaatgatggcgcgatgtaacacgagaaagcacataccaaggccaccacacaccacctgtccaaaaaggccttcgatacgggataatcctatttattacctcagaagtttttttcttcgcaggatttttctgagccttttaccactccagcctagcccctaccccccaactaggagggcactggcccccaacaggcatcaccccgctaaatcccctagaagtcccactcctaaacacatccgtattactcgcatcaggagtatcaatcacctgagctcaccatagtctaatagaaaacaaccgaaaccaaataattcaagcactgcttattacaattttactgggtctctattttaccctcctacaagcctcagagtacttcgagtctcccttcaccatttccgacggcatctacggctcaacattttttgtagccacaggcttccacggacttcacgtcattattggctcaactttcctcactatctgcttcatccgccaactaatatttcactttacatccaaacatcactttggcttcgaagccgccgcctgatactggcattttgtagatgtggtttgactatttctgtatgtctccatctattgatgaggatcttactcttttagtataaatagtaccgttaacttccaattaactagttttgacaacattcaaaaaagagtaataaacttcgccttaattttaataatcaacaccctcctagccttactactaataatcattacattttgactaccacaactcaacggctacatagaaaaatccaccccttacgagtgcggcttcgaccctatatcccccgcccgcgtccctttctccataaaattcttcttagtagctattaccttcttattatttgatctagaaattgccctccttttacccctaccatgagccctacaaacaactaacctgccactaatagttatgtcatccctcttattaatcatcatcctagccctaagtctggcctatgagtgactacaaaaaggattagactgagccgaattggtatatagtttaaacaaaacgaatgatttcgactcattaaattatgataatcatatttaccaaatgcccctcatttacataaatattatactagcatttaccatctcacttctaggaatactagtatatcgctcacacctcatatcctccctactatgcctagaaggaataatactatcgctgttcattatagctactctcataaccctcaacacccactccctcttagccaatattgtgcctattgccatactagtctttgccgcctgcgaagcagcggtgggcctagccctactagtctcaatctccaacacatatggcctagactacgtacataacctaaacctactccaatgctaaaactaatcgtcccaacaattatattactaccactgacatgactttccaaaaaacacataatttgaatcaacacaaccacccacagcctaattattagcatcatccccctactattttttaaccaaatcaacaacaacctatttagctgttccccaaccttttcctccgaccccctaacaacccccctcctaatactaactacctgactcctacccctcacaatcatggcaagccaacgccacttatccagtgaaccactatcacgaaaaaaactctacctctctatactaatctccctacaaatctccttaattataacattcacagccacagaactaatcatattttatatcttcttcgaaaccacacttatccccaccttggctatcatcacccgatgaggcaaccagccagaacgcctgaacgcaggcacatacttcctattctacaccctagtaggctcccttcccctactcatcgcactaatttacactcacaacaccctaggctcactaaacattctactactcactctcactgcccaagaactatcaaactcctgagccaacaacttaatatgactagcttacacaatagcttttatagtaaagatacctctttacggactccacttatgactccctaaagcccatgtcgaagcccccatcgctgggtcaatagtacttgccgcagtactcttaaaactaggcggctatggtataatacgcctcacactcattctcaaccccctgacaaaacacatagcctaccccttccttgtactatccctatgaggcataattataacaagctccatctgcctacgacaaacagacctaaaatcgctcattgcatactcttcaatcagccacatagccctcgtagtaacagccattctcatccaaaccccctgaagcttcaccggcgcagtcattctcataatcgcccacggacttacatcctcattactattctgcctagcaaactcaaactacgaacgcactcacagtcgcatcataatcctctctcaaggacttcaaactctactcccactaatagctttttgatgacttctagcaagcctcgctaacctcgccttaccccccactattaacctactgggagaactctctgtgctagtaaccacattctcctgatcaaatatcactctcctactcacaggactcaacatactagtcacagccctatactccctctacatatttaccacaacacaatggggctcactcacccaccacattaacaacataaaaccctcattcacacgagaaaacaccctcatgttcatacacctatcccccattctcctcctatccctcaaccccgacatcattaccgggttttcctcttgtaaatatagtttaaccaaaacatcagattgtgaatctgacaacagaggcttacgaccccttatttaccgagaaagctcacaagaactgctaactcatgcccccatgtctaacaacatggctttctcaacttttaaaggataacagctatccattggtcttaggccccaaaaattttggtgcaactccaaataaaagtaataaccatgcacactactataaccaccctaaccctgacttccctaattccccccatccttaccaccctcgttaaccctaacaaaaaaaactcatacccccattatgtaaaatccattgtcgcatccacctttattatcagtctcttccccacaacaatattcatgtgcctagaccaagaagttattatctcgaactgacactgagccacaacccaaacaacccagctctccctaagcttcaaactagactacttctccataatattcatccctgtagcattgttcgttacatggtccatcatagaattctcactgtgatatataaactcagacccaaacattaatcagttcttcaagtatctactcattttcctaattaccatactaatcttagttaccgctaacaacctattccaactgttcatcggctgagagggcgtaggaattatatccttcttgctcatcagttgatgatacgcccgagcagatgccaacacagcagccattcaagcaatcctatacaaccgtatcggcgatatcggtttcatcctcgccttagcatgatttatcctacactccaactcatgagacccacaacaaatagcccttctaaacgctaatccaagcctcaccccactactaggcctcctcctagcagcagcaggcaaatcagcccaattaggtctccacccctgactcccctcagccatagaaggccccaccccagtctcagccctactccactcaagcactatagttgtagcaggaatcttcttactcatccgcttccaccccctagcagaaaatagcccactaatccaaactctaacactatgcttaggcgctatcaccactctgttcgcagcagtctgcgcccttacacaaaatgacatcaaaaaaatcgtagccttctccacttcaagtcaactaggactcataatagttacaatcggcatcaaccaaccacacctagcattcctgcacatctgtacccacgccttcttcaaagccatactatttatgtgctccgggtccatcatccacaaccttaacaatgaacaagatattcgaaaaataggaggactactcaaaaccatacctctcacttcaacctccctcaccattggcagcctagcattagcaggaatacctttcctcacaggtttctactccaaagaccacatcatcgaaaccgcaaacatatcatacacaaacgcctgagccctatctattactctcatcgctacctccctaacaagcgcctatagcactcgaataattcttctcaccctaacaggtcaacctcgcttccctacccttactaacattaacgaaaataaccccaccctactaaaccccattaaacgcctggcagccggaagcctattcgcaggatttctcattactaacaacatttcccccgcatcccccttccaaacaacaatccccctctacctaaaactcacggccctcgctgtcactttcctaggacttctaacagccctagacctcaactacctaaccaacaaacttaaaataaaatccccactatgcacattttatttctccaacatactcggattctaccctagcatcacacaccgcacaatcccctatctaggccttcttacgagccaaaacctgcccctactcctcctagacctaacctgactagaaaagctattacctaaaacaatctcacagcaccaaatctccacctccatcatcacctcaacccaaaaaggcataattaaactttacttcctctctttcttcttcccactcatcctaaccctactcctaatcacataacctattcccccgagcaatctcaattacaatatatacaccaacaaacaatgttcaaccagtaactactactaatcaacgcccataatcatataaagcccccgcaccaataggatcctcccgaatcaaccctgacccctctccttcataaattattcagcttcctacactattaaagtttaccacaaccaccaccccatcatactctttcacccacagcaccaatcctacctccatcgctaaccccactaaaacactcaccaagacctcaacccctgacccccatgcctcaggatactcctcaatagccatcgctgtagtatatccaaagacaaccatcattccccctaaataaattaaaaaaactattaaacccatataacctcccccaaaattcagaataataacacacccgaccacgccgctaacaatcaatactaaacccccataaataggagaaggcttagaagaaaaccccacaaaccccattactaaacccacactcaacagaaacaaagcatacatcattattctcgcacggactacaaccacgaccaatgatatgaaaaaccatcgttgtatttcaactacaagaacaccaatgaccccaatacgcaaaattaaccccctaataaaattaattaaccactcattcatcgacctccccaccccatccaacatctccgcatgatgaaacttcggctcactccttggcgcctgcctgatcctccaaatcaccacaggactattcctagccatgcactactcaccagacgcctcaaccgccttttcatcaatcgcccacatcactcgagacgtaaattatggctgaatcatccgctaccttcacgccaatggcgcctcaatattctttatctgcctcttcctacacatcgggcgaggcctatattacggatcatttctctactcagaaacctgaaacatcggcattatcctcctgcttgcaactatagcaacagccttcataggctatgtcctcccgtgaggccaaatatcattctgaggggccacagtaattacaaacttactatccgccatcccatacattgggacagacctagttcaatgaatctgaggaggctactcagtagacagtcccaccctcacacgattctttacctttcacttcatcttacccttcattattgcagccctagcagcactccacctcctattcttgcacgaaacgggatcaaacaaccccctaggaatcacctcccattccgataaaatcaccttccacccttactacacaatcaaagacgccctcggcttacttctcttccttctctccttaatgacattaacactattctcaccagacctcctaggcgacccagacaattataccctagccaaccccttaaacacccctccccacatcaagcccgaatgatatttcctattcgcctacacaattctccgatccgtccctaacaaactaggaggcgtccttgccctattactatccatcctcatcctagcaataatccccatcctccatatatccaaacaacaaagcataatatttcgcccactaagccaatcactttattgactcctagccgcagacctcctcattctaacctgaatcggaggacaaccagtaagctacccctttaccatcattggacaagtagcatccgtactatacttcacaacaatcctaatcctaataccaactatctccctaattgaaaacaaaatactcaaatgggcctgtccttgtagtataaactaatacaccagtcttgtaaaccggagatgaaaacctttttccaaggacaaatcagagaaaaagtctttaactccaccattagcacccaaagctaagattctaatttaaactattctctgttctttcatggggaagcagatttgggtaccacccaagtattgactcacccatcaacaaccgctatgtatttcgtacattactgccagccaccatgaatattgtacggtaccataaatacttgaccacctgtagtacataaaaacccaatccacatcaaaacccccccctcatgcttacaagcaagtacagcaatcaaccttcaactatcacacatcaactgcaactccaaagccacccctcacccactaggatatcaacaaacctacccatccttaacagtacatggtacataaagccatttaccgtacatagcacattacagtcaaatcccttctcgtccccatggatgacccccctcagataggagtcccttgaccaccatcctccgtgaaatcaatatcccgcacaagagtgctactctcctcgctccgggcccataacacttgggggtagctaaagtgaactgtatccgacatctggttcctacttcagggtcataaagcctaaatagcccacacgttccccttaaataagacatcacgatg

SEQ ID NO: 436 - DNA, 16564 bp, Homo sapiens mitochondrial
  3108: "n" refers to a nucleotide at position 3107 of the Cambridge Reference Sequence (CRS, Anderson et al. 1981 Nature 290:457-465), later determined to be absent from the human mtDNA sequence according to the revised CRS (rCRS, Andrews et al. 1999 Nature Genetics 23:147); "n" therefore represents a single nucleotide deletion at a position corresponding to nucleotide 3107 of SEQ ID NO:1 as provided herein.
gatcacaggtctatcaccctattaaccactcacgggagctctccatgcatttggtattttcgtctggggggtgtgcacgcgatagcattgcgagacgctggagccggagcaccctatgtcgcagtatctgtctttgattcctgcctcatcctattatttatcgcacctacgttcaatattacaggcgaacatacctactaaagtgtgttaattaattaatgcttgtaggacataataataacaattgaatgtctgcacagccgctttccacacagacatcataacaaaaaatttccaccaaaccccccctcccccgccttctggccacagcacttaaacacatctctgccaaaccccaaaaacaaagaaccctaacaccagcctaaccagatttcaaattttatcttttggcggtatgcacttttaacagtcaccccccaactaacacattattttcccctcccactcccatactactaatctcatcaatacaacccccgcccatcctacccagcacacacacaccgctgctaaccccataccccgaaccaaccaaaccccaaagacaccccccacagtttatgtagcttacctcctcaaagcaatacactgaaaatgtttagacgggctcacatcaccccataaacaaataggtttggtcctagcctttctattagctcttagtaagattacacatgcaagcatccccattccagtgagttcaccctctaaatcaccacgatcaaaagggacaagcatcaagcacgcagcaatgcagctcaaaacgcttagcctagccacacccccacgggaaacagcagtgattaacctttagcaataaacgaaagtttaactaagctatactaaccccagggttggtcaatttcgtgccagccaccgcggtcacacgattaacccaagtcaatagaagccggcgtaaagagtgttttagatcaccccctccccaataaagctaaaactcacctgagttgtaaaaaactccagttgacacaaaatagactacgaaagtggctttaacatatctgaacacacaatagctaagacccaaactgggattagataccccactatgcttagccctaaacctcaacagttaaatcaacaaaactgctcgccagaacactacgagccacagcttaaaactcaaaggacctggcggtgcttcatatccctctagaggagcctgttctgtaatcgataaaccccgatcaacctcaccacctcttgctcagcctatataccgccatcttcagcaaaccctgatgaaggctacaaagtaagcgcaagtacccacgtaaagacgttaggtcaaggtgtagcccatgaggtggcaagaaatgggctacattttctaccccagaaaactacgatagcccttatgaaacttaagggtcgaaggtggatttagcagtaaactgagagtagagtgcttagttgaacagggccctgaagcgcgtacacaccgcccgtcaccctcctcaagtatacttcaaaggacatttaactaaaacccctacgcatttatatagaggagacaagtcgtaacatggtaagtgtactggaaagtgcacttggacgaaccagagtgtagcttaacacaaagcacccaacttacacttaggagatttcaacttaacttgaccgctctgagctaaacctagccccaaacccactccaccttactaccagacaaccttagccaaaccatttacccaaataaagtataggcgatagaaattgaaacctggcgcaatagatatagtaccgcaagggaaagatgaaaaattataaccaagcataatatagcaaggactaacccctataccttctgcataatgaattaactagaaataactttgcaaggagaaccaaagctaagacccccgaaaccagacgagctacctaagaacagctaaaagagcacacccgtctatgtagcaaaatagtgggaagatttataggtagaggcgacaaacctaccgagcctggtgatagctggttgtccaagatagaatcttagttcaactttaaatttgcccacagaaccctctaaatccccttgtaaatttaactgttagtccaaagaggaacagctctttggacactaggaaaaaaccttgtagagagagtaaaaaatttaacacccatagtaggcctaaaagcagccaccaattaagaaagcgttcaagctcaacacccactacctaaaaaatcccaaacatataactgaactcctcacacccaattggaccaatctatcaccctatagaagaactaatgttagtataagtaacatgaaaacattctcctccgcataagcctgcgtcagattaaaacactgaactgacaattaacagcccaatatctacaatcaaccaacaagtcattattaccctcactgtcaacccaacacaggcatgctcataaggaaaggttaaaaaaagtaaaaggaactcggcaaatcttaccccgcctgtttaccaaaaacatcacctctagcatcaccagtattagaggcaccgcctgcccagtgacacatgtttaacggccgcggtaccctaaccgtgcaaaggtagcataatcacttgttccttaaatagggacctgtatgaatggctccacgagggttcagctgtctcttacttttaaccagtgaaattgacctgcccgtgaagaggcgggcatgacacagcaagacgagaagaccctatggagctttaatttattaatgcaaacagtacctaacaaacccacaggtcctaaactaccaaacctgcattaaaaatttcggttggggcgacctcggagcagaacccaacctccgagcagtacatgctaagacttcaccagtcaaagcgaactactatactcaattgatccaataacttgaccaacggaacaagttaccctagggataacagcgcaatcctattctagagtccatatcaacaatagggtttacgacctcgatgttggatcaggacatcccgatggtgcagccgctattaaaggttcgtttgttcaacgattaaagtcctacgtgatctgagttcagaccggagtaatccaggtcggtttctatctacnttcaaattcctccctgtacgaaaggacaagagaaataaggcctacttcacaaagcgccttcccccgtaaatgatatcatctcaacttagtattatacccacacccacccaagaacagggtttgttaagatggcagagcccggtaatcgcataaaacttaaaactttacagtcagaggttcaattcctcttcttaacaacatacccatggccaacctcctactcctcattgtacccattctaatcgcaatggcattcctaatgcttaccgaacgaaaaattctaggctatatacaactacgcaaaggccccaacgttgtaggcccctacgggctactacaacccttcgctgacgccataaaactcttcaccaaagagcccctaaaacccgccacatctaccatcaccctctacatcaccgccccgaccttagctctcaccatcgctcttctactatgaacccccctccccatacccaaccccctggtcaacctcaacctaggcctcctatttattctagccacctctagcctagccgtttactcaatcctctgatcagggtgagcatcaaactcaaactacgccctgatcggcgcactgcgagcagtagcccaaacaatctcatatgaagtcaccctagccatcattctactatcaacattactaataagtggctcctttaacctctccacccttatcacaacacaagaacacctctgattactcctgccatcatgacccttggccataatatgatttatctccacactagcagagaccaaccgaacccccttcgaccttgccgaaggggagtccgaactagtctcaggcttcaacatcgaatacgccgcaggccccttcgccctattcttcatagccgaatacacaaacattattataataaacaccctcaccactacaatcttcctaggaacaacatatgacgcactctcccctgaactctacacaacatattttgtcaccaagaccctacttctaacctccctgttcttatgaattcgaacagcatacccccgattccgctacgaccaactcatacacctcctatgaaaaaacttcctaccactcaccctagcattacttatatgacatgtctccatacccattacaatctccagcattccccctcaaacctaagaaatatgtctgataaaagagttactttgatagagtaaataataggagcttaaacccccttatttctaggactatgagaatcgaacccatccctgagaatccaaaattctccgtgccacctatcacaccccatcctaaagtaaggtcagctaaataagctatcgggcccataccccgaaaatgttggttatacccttcccgtactaattaatcccctggcccaacccgtcatctactctaccatctttgcaggcacactcatcacagcgctaagctcgcactgattttttacctgagtaggcctagaaataaacatgctagcttttattccagttctaaccaaaaaaataaaccctcgttccacagaagctgccatcaagtatttcctcacgcaagcaaccgcatccataatccttctaatagctatcctcttcaacaatatactctccggacaatgaaccataaccaatactaccaatcaatactcatcattaataatcataatggctatagcaataaaactaggaatagccccctttcacttctgagtcccagaggttacccaaggcacccctctgacatccggcctgcttcttctcacatgacaaaaactagcccccatctcaatcatataccaaatctctccctcactagacgtaagccttctcctcactctctcaatcttatccatcatagcaggcagttgaggtggattaaaccaaacccagctacgcaaaatcttagcatactcctcaattacccacataggatgaataatagcagttctaccgtacaaccctaacataaccattcttaatttaactatttatattatcctaactactaccgcattcctactactcaacttaaactccagcaccacgaccctactactatctcgcacctgaaacaagctaacatgactaacacccttaattccatccaccctcctctccctaggaggcctgcccccgctaaccggctttttgcccaaatgggccattatcgaagaactcacaaaaaacaatagcctcatcatccccaccatcatagccaccatcaccctccttaacctctacttctacctacgcctaatctactccacctcaatcacactactccccatatctaacaacgtaaaaataaaatgacagtttgaacacacaaaacccaccccattcctccccacactcatcgcccttaccacgctactcctacctatctccccttttatactaataatcttatagaaatttaggttaaatacagaccaagagccttcaaagccctcagtaagttgcaatacttaatttctgtaacagctaaggactgcaaaaccccactctgcatcaactgaacgcaaatcagccactttaattaagctaagcccttactagaccaatgggacttaaacccacaaacacttagttaacagctaagcaccctaatcaactggcttcaatctacttctcccgccgccgggaaaaaaggcgggagaagccccggcaggtttgaagctgcttcttcgaatttgcaattcaatatgaaaatcacctcggagctggtaaaaagaggcctaacccctgtctttagatttacagtccaatgcttcactcagccattttacctcacccccactgatgttcgccgaccgttgactattctctacaaaccacaaagacattggaacactatacctattattcggcgcatgagctggagtcctaggcacagctctaagcctccttattcgagccgagctgggccagccaggcaaccttctaggtaacgaccacatctacaacgttatcgtcacagcccatgcatttgtaataatcttcttcatagtaatacccatcataatcggaggctttggcaactgactagttcccctaataatcggtgcccccgatatggcgtttccccgcataaacaacataagcttctgactcttacctccctctctcctactcctgctcgcatctgctatagtggaggccggagcaggaacaggttgaacagtctaccctcccttagcagggaactactcccaccctggagcctccgtagacctaaccatcttctccttacacctagcaggtgtctcctctatcttaggggccatcaatttcatcacaacaattatcaatataaaaccccctgccataacccaataccaaacgcccctcttcgtctgatccgtcctaatcacagcagtcctacttatcctatctctcccagtcctagctgctggcatcactatactactaacagaccgcaacctcaacaccaccttcttcgaccccgccggaggaggagaccccattctataccaacacctattctgatttttcggtcaccctgaagtttatattcttatcctaccaggcttcggaataatctcccatattgtaacttactactccggaaaaaaagaaccatttggatacataggtatggtctgagctatgatatcaattggcttcctagggtttatcgtgtgagcacaccatatatttacagtaggaatagacgtagacacacgagcatatttcacctccgctaccataatcatcgctatccccaccggcgtcaaagtatttagctgactcgccacactccacggaagcaatatgaaatgatctgctgcagtgctctgagccctaggattcatctttcttttcaccgtaggtggcctgactggcattgtattagcaaactcatcactagacatcgtactacacgacacgtactacgttgtagctcacttccactatgtcctatcaataggagctgtatttgccatcataggaggcttcattcactgatttcccctattctcaggctacaccctagaccaaacctacgccaaaatccatttcactatcatattcatcggcgtaaatctaactttcttcccacaacactttctcggcctatccggaatgccccgacgttactcggactaccccgatgcatacaccacatgaaacatcctatcatctgtaggctcattcatttctctaacagcagtaatattaataattttcatgatttgagaagccttcgcttcgaagcgaaaagtcctaatagtagaagaaccctccataaacctggagtgactatatggatgccccccaccctaccacacattcgaagaacccgtatacataaaatctagacaaaaaaggaaggaatcgaaccccccaaagctggtttcaagccaaccccatggcctccatgactttttcaaaaaggtattagaaaaaccatttcataactttgtcaaagttaaattataggctaaatcctatatatcttaatggcacatgcagcgcaagtaggtctacaagacgctacttcccctatcatagaagagcttatcacctttcatgatcacgccctcataatcattttccttatctgcttcctagtcctgtatgcccttttcctaacactcacaacaaaactaactaatactaacatctcagacgctcaggaaatagaaaccgtctgaactatcctgcccgccatcatcctagtcctcatcgccctcccatccctacgcatcctttacataacagacgaggtcaacgatccctcccttaccatcaaatcaattggccaccaatggtactgaacctacgagtacaccgactacggcggactaatcttcaactcctacatacttcccccattattcctagaaccaggcgacctgcgactccttgacgttgacaatcgagtagtactcccgattgaagcccccattcgtataataattacatcacaagacgtcttgcactcatgagctgtccccacattaggcttaaaaacagatgcaattcccggacgtctaaaccaaaccactttcaccgctacacgaccgggggtatactacggtcaatgctctgaaatctgtggagcaaaccacagtttcatgcccatcgtcctagaattaattcccctaaaaatctttgaaatagggcccgtatttaccctatagtacccccccctctagagcccactgtaaagctaacttagcattaaccttttaagttaaagattaagagaaccaacacctctttacagtgaaatgccccaactaaatactaccgtatggcccaccataattacccccatactccttacactattcctcatcacccaactaaaaatattaaacacaaactaccacctacctccctcaccaaagcccataaaaataaaaaattataacaaaccctgagaaccaaaatgaacgaaaatctgttcgcttcattcattgcccccacaatcctaggcctacccgccgcagtactgatcattctatttccccctctattgatccccacctccaaatatctcatcaacaaccgactaatcaccacccaacaatgactaatcaaactaacctcaaaacaaataataaccatacacaacactaaaggacgaacctgatctcttatactagtatccttaatcatttttattgccacaactaacctcctcggactcctgcctcactcatttacaccaaccacccaactatctataaacctagccatggccatccccttatgagcgggcgcagtgattataggctttcgctctaagattaaaaatgccctagcccacttcttaccacaaggcacacctacaccccttatccccatactagttattatcgaaaccatcagcctactcattcaaccaatagccctggccgtacgcctaaccgctaacattactgcaggccacctactcatgcacctaattggaagcgccaccctagcaatatcaaccattaaccttccctctacacttatcatcttcacaattctaattctactgactatcctagaaatcgctgtcgccttaatccaagcctacgttttcacacttctagtaagcctctacctgcacgacaacacataatgacccaccaatcacatgcctatcatatagtaaaacccagcccatgacccctaacaggggccctctcagccctcctaatgacctccggcctagccatgtgatttcacttccactccataacgctcctcatactaggcctactaaccaacacactaaccatataccaatgatggcgcgatgtaacacgagaaagcacataccaaggccaccacacaccacctgtccaaaaaggccttcgatacgggataatcctatttattacctcagaagtttttttcttcgcaggatttttctgagccttttaccactccagcctagcccctaccccccaattaggagggcactggcccccaacaggcatcaccccgctaaatcccctagaagtcccactcctaaacacatccgtattactcgcatcaggagtatcaatcacctgagctcaccatagtctaatagaaaacaaccgaaaccaaataattcaagcactgcttattacaattttactgggtctctattttaccctcctacaagcctcagagtacttcgagtctcccttcaccatttccgacggcatctacggctcaacattttttgtagccacaggcttccacggacttcacgtcattattggctcaactttcctcactatctgcttcatccgccaactaatatttcactttacatccaaacatcactttggcttcgaagccgccgcctgatactggcattttgtagatgtggtttgactatttctgtatgtctccatctattgatgagggtcttactcttttagtataaatagtaccgttaacttccaattaactagttttgacaacattcaaaaaagagtaataaacttcgccttaattttaataatcaacaccctcctagccttactactaataattattacattttgactaccacaactcaacggctacatagaaaaatccaccccttacgagtgcggcttcgaccctatatcccccgcccgcgtccctttctccataaaattcttcttagtagctattaccttcttattatttgatctagaaattgccctccttttacccctaccatgagccctacaaacaactaacctgccactaatagttatgtcatccctcttattaatcatcatcctagccctaagtctggcctatgagtgactacaaaaaggattagactgaaccgaattggtatatagtttaaacaaaacgaatgatttcgactcattaaattatgataatcatatctaccaaatgcccctcatttacataaatattatactagcatttaccatctcacttctaggaatactagtatatcgctcacacctcatatcctccctactatgcctagaaggaataatactatcgctgttcattatagctactctcataaccctcaacacccactccctcttagccaatattgtgcctattgccatactagtctttgccgcctgcgaagcagcggtgggcctagccctactagtctcaatctccaacacatatggcctagactacgtacataacctaaacctactccaatgctaaaactaatcgtcccaacaattatattactaccactgacatgactttccaaaaaacacataatttgaatcaacacaaccacccacagcctaattattagcatcatccctctactattttttaaccaaatcaacaacaacctatttagctgttccccaaccttttcctccgaccccctaacaacccccctcctaatactaactacctgactcctacccctcacaatcatggcaagccaacgccacttatccagtgaaccactatcacgaaaaaaactctacctctctatactaatctccctacaaatctccttaattataacattcacagccacagaactaatcatattttatatcttcttcgaaaccacacttatccccaccttggctatcatcacccgatgaggcaaccagccagaacgcctgaacgcaggcacatacttcctattctacaccctagtaggctcccttcccctactcatcgcactgatttacactcacaacaccctaggctcactaaacattctactactcactctcactgcccaagaactatcaaactcctgagccaacaacttaatatgactagcttacacaatagcttttatagtaaagatacctctttacggactccacttatgactccctaaagcccatgtcgaagcccccatcgctgggtcaatagtacttgccgcagtactcttaaaactaggcggctatggtataatacgcctcacactcattctcaaccccctgacaaaacacatagcctaccccttccttgtactatccctatgaggcataattataacaagctccatctgcctacgacaaacagacctaaaatcgctcattgcatactcttcaatcagccacatagccctcgtagtaacagccattctcatccaaaccccctgaagcttcaccggcgcagtcattctcataatcgcccacggacttacatcctcattactattctgcctagcaaactcaaactacgaacgcactcacagtcgcatcataatcctctctcaaggacttcaaactctgctcccactaatagctttttgatgacttctagcaagcctcgctaacctcgccttaccccccactattaacctactgggagaactctctgtgctagtaaccacgttctcctgatcaaatatcactctcctacttacaggactcaacatactagtcacagccctatactccctctacatatttaccacaacacaatggggctcactcacccaccacattaacaacataaaaccctcattcacacgagaaaacaccctcatgttcatacacctatcccccattctcctcctatccctcaaccccgacatcattaccgggttttcctcttgtaaatatagtttaaccaaaacatcagattgtgaatctgacaacagaggcttacgaccccttatttaccgagaaagctcacaagaactgctaactcatgcccccatgtctaacaacatggctttctcaacttttaaaggataacagctatccattggtcttaggccccaaaaattttggtgcaactccaaataaaagtaataaccatgcacactactataaccaccctaaccctgacttccctaattccccccatccttaccaccctcgttaaccctaacaaaaaaaactcatacccccattatgtaaaatccattgtcgcatccacctttattatcagtctcttccccacaacaatattcatgtgcctagaccaagaagttattatctcgaactgacactgagccacaacccaaacaacccagctctccctaagcttcaaactagactacttctccataatattcatccctgtagcattgttcgttacatggtccatcatagaattctcactgtgatatataaactcagacccaaacattaatcagttcttcaaatatctactcatcttcctaattaccatactaatcttagttaccgctaacaacctattccaactgttcatcggctgagagggcgtaggaattatatccttcttgctcatcagttgatgatacgcccgagcagatgccaacacagcagccattcaagcaatcctatacaaccgtatcggcgatatcggtttcatcctcgccttagcatgatttatcctacactccaactcatgagacccacaacaaatagcccttctaaacgctaatccaagcctcaccccactactaggcctcctcctagcagcagcaggcaaatcagcccaattaggtctccacccctgactcccctcagccatagaaggccccaccccagtctcagccctactccactcaagcactatagttgtagcaggaatcttcttactcatccgcttccaccccctagcagaaaatagcccactaatccaaactctaacactatgcttaggcgctatcaccactctgttcgcagcagtctgcgcccttacacaaaatgacatcaaaaaaatcgtagccttctccacttcaagtcaactaggactcataatagttacaatcggcatcaaccaaccacacctagcattcctgcacatctgtacccacgccttcttcaaagccatactatttatgtgctccggatccatcatccacaaccttaacaatgaacaagatattcgaaaaataggaggactactcaaaaccatacctctcacttcaacctccctcaccattggcagcctagcattagcaggaatacctttcctcacaggtttctactccaaagaccacatcatcgaaaccgcaaacatatcatacacaaacgcctgagccctatctattactctcatcgctacctccctgacaagcgcctatagcactcgaataattcttctcaccctaacaggtcaacctcgcttccccacccttactaacattaacgaaaataaccccaccctactaaaccccattaaacgcctggcagccggaagcctattcgcaggatttctcattactaacaacatttcccccgcatcccccttccaaacaacaatccccctctacctaaaactcacagccctcgctgtcactttcctaggacttctaacagccctagacctcaactacctaaccaacaaacttaaaataaaatccccactatgcacattttatttctccaacatactcggattctaccctagcatcacacaccgcacaatcccctatctaggccttcttacgagccaaaacctgcccctactcctcctagacctaacctgactagaaaagctattacctaaaacaatttcacagcaccaaatctccacctccatcatcacctcaacccaaaaaggcataattaaactttacttcctctctttcttcttcccactcatcctaaccctactcctaatcacataacctattcccccgagcaatctcaattacaatatatacaccaacaaacaatgttcaaccagtaactactactaatcaacgcccatagtcatacaaagcccccgcaccaataggatcctcccgaatcaaccctgacccctctccttcataaattattcagcttcctacactattaaagtttaccacaaccaccaccccatcatactctttcacccacagcaccaatcctacctccatcgctaaccccactaaaacactcaccaagacctcaacccctgacccccatgcctcaggatactcctcaatagccatcgctgtagtatatccaaagacaaccatcattccccctaaataaattaaaaaaactattaaacccatataacctcccccaaaattcagaataataacacacccgaccacaccgctaacaatcaatactaaacccccataaataggagaaggcttagaagaaaaccccacaaaccccattactaaacccacactcaacagaaacaaagcatacatcattattctcgcacggactacaaccacgaccaatgatatgaaaaaccatcgttgtatttcaactacaagaacaccaatgaccccaatacgcaaaattaaccccctaataaaattaattaaccactcattcatcgacctccccaccccatccaacatctccgcatgatgaaacttcggctcactccttggcgcctgcctgatcctccaaatcaccacaggactattcctagccatacactactcaccagacgcctcaaccgccttttcatcaatcgcccacatcactcgagacgtaaattatggctgaatcatccgctaccttcacgccaatggcgcctcaatattctttatctgcctattcctacacatcggacgaggcctatattacggatcatttctctactcagaaacctgaaacatcggcattatcctcctgcttgcaactatagcaacagccttcataggctatgtcctcccgtgaggccaaatatcattctgaggggccacagtaattacaaacttactatccgccatcccatacattgggacagacctagttcaatgaatctgaggaggctactcagtagacagtcccaccctcacacgattctttacctttcacttcatcttgcccttcattattgcagccctagcagcactccacctcctattcttgcacgaaacgggatcaaacaaccccctaggaatcacctcccattccgataaaatcaccttccacccttactacacaatcaaagacgccctcggcttacttctcttcattctctccttaatgacattaacactattctcaccagacctcctaggcgacccagacaattataccctagccaaccccttaaacacccctccccacatcaagcccgaatgatatttcctattcgcctacacaattctccgatccgtccctaacaagctaggaggcgtccttgccctattactatccatcctcatcctagcaataatccccatcctccatatatccaaacaacaaagcataatatttcgcccactaagccaatcactttattgactcctagccgcagacctcctcattctaacctgaatcggaggacaaccagtaagctacccttttaccatcattggacaagtagcatccgtactatacttcacaacaatcctaatcctaataccaactatctccctaattgaaaacaaaatactcaaatgggcctgtccttgtagtataaactaatacaccagtcttgtaaaccgaagatgaaaacctttttccaaggacaaatcagagaaaaagtctttaactccaccattagcacccaaagctaagattctaatttaaactattctctgttctttcatggggaagcagatttgggtaccacccaagtattgactcacccatcaacaaccgctatgtatttcgtacattactgccagccaccatgaatattgcacggtaccataaatacttgaccacctgtagtacataaaaacccaatccacatcaaccccccccccccatgcttacaagcaagtacagcaatcaaccctcaactatcacacatcaactgcaactccaaagccacccctcacccactaggataccaacaaacctacccatcttcaacagtacatagtacataaagccatttaccgtacatagcacattacagtcaaatcccttctcgtccccatggatgacccccctcagataggggtcccttgaccaccatcctccgtgaaatcaatatcccgcacaagagtgctactctcctcgctccgggcccataacacttgggggtagctaaagtgaactgtatccgacatctggttcctacttcagggccataaagcctaaatagcccacacgttccccttaaataagacatcacgatg

SEQ ID NO: 437 - DNA, 16570 bp, Homo sapiens mitochondrial
  3108: "n" refers to a nucleotide at position 3107 of the Cambridge Reference Sequence (CRS, Anderson et al. 1981 Nature 290:457-465), later determined to be absent from the human mtDNA sequence according to the revised CRS (rCRS, Andrews et al. 1999 Nature Genetics 23:147); "n" therefore represents a single nucleotide deletion at a position corresponding to nucleotide 3107 of SEQ ID NO:1 as provided herein.
gatcacaggtctatcaccctattaaccactcacgggagctctccatgcatttggtattttcgtctggggggtgtgcacgcgatagcattgcgagacgctggagccggagcaccctatgtcgcagtatctgtctttgattcctgcctcatcctattatttatcgcacctacgttcaatattacaggcgaacatacttactaaagtgtgttaattaattaatgcttgtaggacataataataacaattgaatgtctgcacagccgctttccacacagacatcataacaaaaaatttccaccaaaccccccctcccccgccttctggccacagcacttaaacacatctctgccaaaccccaaaaacaaagaaccctaacaccagcctaaccagatttcaaattttatcttttggcggtatgcacttttaacagtcaccccccaactaacacattattttcccctcccactcccatactactaatctcatcaatacaacccccgcccatcctacccagcacacacacaccgctgctaaccccataccccgaaccaaccaaaccccaaagacaccccccacagtttatgtagcttacctcctcaaagcaatacactgaaaatgtttagacgggctcacatcaccccataaacaaataggtttggtcctagcctttctattagctcttagtaagattacacatgcaagcatccccattccagtgagttcaccctctaaatcaccacgatcaaaagggacaagcatcaagcacgcagcaatgcagctcaaaacgcttagcctagccacacccccacgggaaacagcagtgattaacctttagcaataaacgaaagtttaactaagctatactaaccccagggttggtcaatttcgtgccagccaccgcggtcacacgattaacccaagtcaatagaaaccggcgtaaagagtgttttagatcaccccctccccaataaagctaaaactcacctgagttgtaaaaaactccagttgacacaaaatagactacgaaagtggctttaacatatctgaacacacaatagctaagacccaaactgggattagataccccactatgcttagccctaaacctcaacagttaaatcaacaaaactgctcgccagaacactacgagccacagcttaaaactcaaaggacctggcggtgcttcatatccctctagaggagcctgttctgtaatcgataaaccccgatcaacctcaccacctcttgctcagcctatataccgccatcttcagcaaaccctgatgaaggctacaaagtaagcgcaagtacccacgtaaagacgttaggtcaaggtgtagcccatgaggtggcaagaaatgggctacattttctaccccagaaaactacgatagcccttatgaaacttaagggtcgaaggtggatttagcagtaaactgagagtagagtgcttagttgaacagggccctgaagcgcgtacacaccgcccgtcaccctcctcaagtatacttcaaaggacatttaactaaaacccctacgcatttatatagaggagacaagtcgtaacatggtaagtgtactggaaagtgcacttggacgaaccagagtgtagcttaacacaaagcacccaacttacacttaggagatttcaacttaacttgaccgctctgagctaaacctagccccaaacccactccaccttactaccagacaaccttagccaaaccatttacccaaataaagtataggcgatagaaattgaaacctggcgcaatagatatagtaccgcaagggaaagatgaaaaattataaccaagcataatatagcaaggactaacccctataccttctgcataatgaattaactagaaataactttgcaaggagaaccaaagctaagacccccgaaaccagacgagctacctaagaacagctaaaagagcacacccgtctatgtagcaaaatagtgggaagatttataggtagaggcgacaaacctaccgagcctggtgatagctggttgtccaagatagaatcttagttcaactttaaatttgcccacagaaccctctaaatccccttgtaaatttaactgttagtccaaagaggaacagctctttggacactaggaaaaaaccttgtagagagagtaaaaaatttaacacccatagtaggcctaaaagcagccaccaattaagaaagcgttcaagctcaacacccactacctaaaaaatcccaaacatataactgaactcctcacacccaattggaccaatctatcaccctatagaagaactaatgttagtataagtaacatgaaaacattctcctccgcataagcctgcgtcagattaaaacactgaactgacaattaacagcccaatatctacaatcaaccaacaagtcattattaccctcactgtcaacccaacacaggcatgctcataaggaaaggttaaaaaaagtaaaaggaactcggcaaatcttaccccgcctgtttaccaaaaacatcacctctagcatcaccagtattagaggcaccgcctgcccagtgacacatgtttaacggccgcggtaccctaaccgtgcaaaggtagcataatcacttgttccttaaatagggacctgtatgaatggctccacgagggttcagctgtctcttacttttaaccagtgaaattgacctgcccgtgaagaggcgggcatgacacagcaagacgagaagaccctatggagctttaatttattaatgcaaacagtacctaacaaacccacaggtcctaaactaccaaacctgcattaaaaatttcggttggggcgacctcggagcagaacccaacctccgagcagtacatgctaagacttcaccagtcaaagcgaactactatactcaattgatccaataacttgaccaacggaacaagttaccctagggataacagcgcaatcctattctagagtccatatcaacaatagggtttacgacctcgatgttggatcaggacatcccgatggtgcagccgctattaaaggttcgtttgttcaacgattaaagtcctacgtgatctgagttcagaccggagtaatccaggtcggtttctatctacnttcaaattcctccctgtacgaaaggacaagagaaataaggcctacttcacaaagcgccttcccccgtaaatgatatcatctcaacttagtattatacccacacccacccaagaacagggtttgttaagatggcagagcccggtaatcgcataaaacttaaaactttacagtcagaggttcaattcctcttcttaacaacatacccatggccaacctcctactcctcattgtacccattctaatcgcaatggcattcctaatgcttaccgaacgaaaaattctaggctatatacaactacgcaaaggccccaacgttgtaggcccctacgggctactacaacccttcgctgacgccataaaactcttcaccaaagagcccctaaaacccgccacatctaccatcaccctctacatcaccgccccgaccttagctctcaccatcgctcttctactatgaacccccctccccatacccaaccccctggtcaacctcaacctaggcctcctatttattctagccacctctagcctagccgtttactcaatcctctgatcagggtgagcatcaaactcaaactacgccctgatcggcgcactgcgagcagtagcccaaacaatctcatatgaagtcaccctagccatcattctactatcaacattactaataagtggctcctttaacctctccacccttatcacaacacaagaacacctctgattactcctgccatcatgacccttggccataatatgatttatctccacactagcagagaccaaccgaacccccttcgaccttgccgaaggggagtccgaactagtctcaggcttcaacatcgaatacgccgcaggccccttcgccctattcttcatagccgaatacacaaacattattataataaacaccctcaccactacaatcttcctaggaacaacatatgacgcactctcccctgaactctacacaacatattttgtcaccaagaccctacttctaacctccctgttcttatgaattcgaacagcatacccccgattccgctacgaccaactcatacacctcctatgaaaaaacttcctaccactcaccctagcattacttatatgacatgtctccatacccattacaatctccagcattccccctcaaacctaagaaatatgtctgataaaagagttactttgatagagtaaataataggagcttaaacccccttatttctaggactatgagaatcgaacccatccctgagaatccaaaattctccgtgccacctatcacaccccatcctaaagtaaggtcagctaaataagctatcgggcccataccccgaaaatgttggttatacccttcccgtactaattaatcccctggcccaacccgtcatctactctaccatctttgcaggcacactcatcacagcgctaagctcgcactgattttttacctgagtaggcctagaaataaacatgctagcttttattccagttctaaccaaaaaaataaaccctcgttccacagaagctgccatcaagtatttcctcacgcaagcaaccgcatccataatccttctaatagctatcctcttcaacaatatactctccggacaatgaaccataaccaatactaccaatcaatactcatcattaataatcataatggctatagcaataaaactaggaatagccccctttcacttctgagtcccagaggttacccaaggcacccctctgacatccggcctgcttcttctcacatgacaaaaactagcccccatctcaatcatataccaaatctctccctcactagacgtaagccttctcctcactctctcaatcttatccatcatagcaggcagttgaggtggattaaaccaaacccagctacgcaaaatcttagcatactcctcaattacccacataggatgaataatagcagttctaccgtacaaccctaacataaccattcttaatttaactatttatattatcctaactactaccgcattcctactactcaacttaaactccagcaccacaaccctactactatctcgcacctgaaacaagctaacatgactaacacccttaattccatccaccctcctctccctaggaggcctgcccccgctaaccggctttttgcccaaatgggccattatcgaagaattcacaaaaaacaatagcctcatcatccccaccatcatagccaccatcaccctccttaacctctacttctacctacgcctaatctactccacctcaatcacactactccccatatctaacaacgtaaaaataaaatgacagtttgaacatacaaaacccaccccattcctccccacactcatcgcccttaccacgctactcctacctatctccccttttatactaataatcttatagaaatttaggttaaatacagaccaagagccttcaaagccctcagtaagttgcaatacttaatttctgtaacagctaaggactgcaaaaccccactctgcatcaactgaacgcaaatcagccactttaattaagctaagcccttactagaccaatgggacttaaacccacaaacacttagttaacagctaagcaccctaatcaactggcttcaatctacttctcccgccgccgggaaaaaaggcgggagaagccccggcaggtttgaagctgcttcttcgaatttgcaattcaatatgaaaatcacctcggagctggtaaaaagaggcctaacccctgtctttagatttacagtccaatgcttcactcagccattttacctcacccccactgatgttcgccgaccgttgactattctctacaaaccacaaagacattggaacactatacctattattcggcgcatgagctggagtcctaggcacagctctaagcctccttattcgagccgagctgggccagccaggcaaccttctaggtaacgaccacatctacaacgttatcgtcacagcccatgcatttgtaataatcttcttcatagtaatacccatcataatcggaggctttggcaactgactagttcccctaataatcggtgcccccgatatggcgtttccccgcataaacaacataagcttctgactcttacctccctctctcctactcctgctcgcatctgctatagtggaggccggagcaggaacaggttgaacagtctaccctcccttagcagggaactactcccaccctggagcctccgtagacctaaccatcttctccttacacctagcaggtgtctcctctatcttaggggccatcaatttcatcacaacaattatcaatataaaaccccctgccataacccaataccaaacgcccctcttcgtctgatccgtcctaatcacagcagtcctacttctcctatctctcccagtcctagctgctggcatcactatactactaacagaccgcaacctcaacaccaccttcttcgaccccgccggaggaggagaccccattctataccaacacctattctgatttttcggtcaccctgaagtttatattcttatcctaccaggcttcggaataatctcccatattgtaacttactactccggaaaaaaagaaccatttggatacataggtatggtctgagctatgatatcaattggcttcctagggtttatcgtgtgagcacaccatatatttacagtaggaatagacgtagacacacgagcatatttcacctccgctaccataatcatcgctatccccaccggcgtcaaagtatttagctgactcgccacactccacggaagcaatatgaaatgatctgctgcagtgctctgagccctaggattcatctttcttttcaccgtaggtggcctgactggcattgtattagcaaactcatcactagacatcgtactacacgacacgtactacgttgtagctcacttccactatgtcctatcaataggagctgtatttgccatcataggaggcttcattcactgatttcccctattctcaggctacaccctagaccaaacctacgccaaaatccatttcactatcatattcatcggcgtaaatctaactttcttcccacaacactttctcggcctatccggaatgccccgacgttactcggactaccccgatgcatacaccacatgaaacatcctatcatctgtaggctcattcatttctctaacagcagtaatattaataattttcatgatttgagaagccttcgcttcgaagcgaaaagtcctaatagtagaagaaccctccataaacctggagtgactatatggatgccccccaccctaccacacattcgaagaacccgtatacataaaatctagacaaaaaaggaaggaatcgaaccccccaaagctggtttcaagccaaccccatggcctccatgactttttcaaaaaggtattagaaaaaccatttcataactttgtcaaagttaaattataggctaaatcctatatatcttaatggcacatgcagcgcaagtaggtctacaagacgctacttcccctatcatagaagagcttatcacctttcatgatcacgccctcataatcattttccttatctgcttcctagtcctgtatgcccttttcctaacactcacaacaaaactaactaatactaacatctcagacgctcaggaaatagaaaccgtctgaactatcctgcccgccatcatcctagtcctcatcgccctcccatccctacgcatcctttacataacagacgaggtcaacgatccctcccttaccatcaaatcaattggccaccaatggtactgaacctacgagtacaccgactacggcggactaatcttcaactcctacatacttcccccattattcctagaaccaggcgacctgcgactccttgacgttgacaatcgagtagtactcccgattgaagcccccattcgtataataattacatcacaagacgtcttgcactcatgagctgtccccacattaggcttaaaaacagatgcaattcccggacgtctaaaccaaaccactttcaccgctacacgaccgggggtatactacggtcaatgctctgaaatctgtggagcaaaccacagtttcatgcccatcgtcctagaattaattcccctaaaaatctttgaaatagggcccgtatttaccctatagcaccccctctaccccctctagagcccactgtaaagctaacttagcattaaccttttaagttaaagattaagagaaccaacacctctttacagtgaaatgccccaactaaatactaccgtatggcccaccataattacccccatactccttacactattcctcatcacccaactaaaaatattaaacacaaactaccacctacctccctcaccaaagcccataaaaataaaaaattataacaaaccctgagaaccaaaatgaacgaaaatctgttcgcttcattcattgcccccacaatcctaggcctacccgccgcagtactgatcattctatttccccctctattgatccccacctccaaatatctcatcaacaaccgactaatcaccacccaacaatgactaatcaaactaacctcaaaacaaataataaccatacacaacactaaaggacgaacctgatctcttatactagtatccttaatcatttttattgccacaactaacctcctcggactcctgcctcactcatttacaccaaccacccaactatctataaacctagccatggccatccccttatgagcgggcgcagtgattataggctttcgctctaagattaaaaatgccctagcccacttcttaccacaaggcacacctacaccccttatccccatactagttattatcgaaaccatcagcctactcattcaaccaatagccctggccgtacgcctaaccgctaacattactgcaggccacctactcatgcacctaattggaagcgccaccctagcaatatcaaccattaaccttccctctacacttatcatcttcacaattctaattctactgactatcctagaaatcgctgtcgccttaatccaagcctacgttttcacacttctagtaagcctctacctgcacgacaacacataatgacccaccaatcacatgcctatcatatagtaaaacccagcccatgacccctaacaggggccctctcagccctcctaatgacctccggcctagccatgtgatttcacttccactccataacgctcctcatactaggcctactaaccaacacactaaccatataccaatgatggcgcgatgtaacacgagaaagcacataccaaggccaccacacaccacctgtccaaaaaggccttcgatacgggataatcctatttattacctcagaagtttttttcttcgcaggatttttctgagccttttaccactccagcctagcccctaccccccaattaggagggcactggcccccaacaggcatcaccccgctaaatcccctagaagtcccactcctaaacacatccgtattactcgcatcaggagtatcaatcacctgagctcaccatagtctaatagaaaacaaccgaaaccaaataattcaagcactgcttattacaattttactgggtctctattttaccctcctacaagcctcagagtacttcgagtctcccttcaccatttccgacggcatctacggctcaacattttttgtagccacaggcttccacggacttcacgtcattattggctcaactttcctcactatctgcttcatccgccaactaatatttcactttacatccaaacatcactttggcttcgaagccgccgcctgatactggcattttgtagatgtggtttgactatttctgtatgtctccatctattgatgagggtcttactcttttagtataaatagtaccgttaacttccaattaactagttttgacaacattcaaaaaagagtaataaacttcgccttaattttaataatcaacaccctcctagccttactactaataattattacattttgactaccacaactcaacggctacatagaaaaatccaccccttacgagtgcggcttcgaccctatatcccccgcccgcgtccctttctccataaaattcttcttagtagctattaccttcttattatttgatctagaaattgccctccttttacccctaccatgagccctacaaacaactaacctgccactaatagttatgtcatccctcttattaatcatcatcctagccctaagtctggcctatgagtgactacaaaaaggattagactgaaccgaattggtatatagtttaaacaaaacgaatgatttcgactcattaaattatgataatcatatctaccaaatgcccctcatttacataaatattatactagcatttaccatctcacttctaggaatactagtatatcgctcacacctcatatcctccctactatgcctagaaggaataatactatcgctgttcattatagctactctcataaccctcaacacccactccctcttagccaatattgtgcctattgccatactagtctttgccgcctgcgaagcagcggtgggcctagccctactagtctcaatctccaacacatatggcctagactacgtacataacctaaacctactccaatgctaaaactaatcgtcccaacaattatattactaccactgacatgactttccaaaaaacacataatttgaatcaacacaaccacccacagcctaattattagcatcatccctctactattttttaaccaaatcaacaacaacctatttagctgttccccaaccttttcctccgaccccctaacaacccccctcctaatattaactacctgactcctacccctcacaatcatggcaagccaacgccacttatccagtgaaccactatcacgaaaaaaactctacctctctatactaatctccctacaaatctccttaattataacattcacagccacagaactaatcatattttatatcttcttcgaaaccacacttatccccaccttggctatcatcacccgatgaggcaaccagccagaacgcctgaacgcaggcacatacttcctattctacaccctagtaggctcccttcccctactgatcgcactgatttacactcacaacaccctaggctcactaaacattctactactcactctcactgcccaagaactatcaaactcctgagccaacaacttaatatgactagcttacacaatagcttttatagtaaagatacctctttacggactccacttatgactccctaaagcccatgtcgaagcccccatcgctgggtcaatagtacttgccgcagtactcttaaaactaggcggctatggtataatacgcctcacactcattctcaaccccctgacaaaacacatagcctaccccttccttgtactatccctatgaggcataattataacaagctccatctgcctacgacaaacagacctaaaatcgctcattgcatactcttcaatcagccacatagccctcgtagtaacagccattctcatccaaaccccctgaagcttcaccggcgcagtcattctcataatcgcccacggacttacatcctcattactattctgcctagcaaactcaaactacgaacgcactcacagtcgcatcataatcctctctcaaggacttcaaactctgctcccactaatagctttttgatgacttctagcaagcctcgctaacctcgccttaccccccactattaacctactgggagaactctctgtgctagtaaccacgttctcctgatcaaatatcactctcctacttacaggactcaacatactagtcacagccctatactccctctacatatttaccacaacacaatggggctcactcacccaccacattaacaacataaaaccctcattcacacgagaaaacaccctcatgttcatacacctatcccccattctcctcctatccctcaaccccgacatcattaccgggttttcctcttgtaaatatagtttaaccaaaacatcagattgtgaatctgacaacagaggcttacgaccccttatttaccgagaaagctcacaagaactgctaactcatgcccccatgtctaacaacatggctttctcaacttttaaaggataacagctatccattggtcttaggccccaaaaattttggtgcaactccaaataaaagtaataaccatgcacactactataaccaccctaaccctgacttccctaattccccccatccttaccaccctcgttaaccctaacaaaaaaaactcatacccccattatgtaaaatccattgtcgcatccacctttattatcagtctcttccccacaacaatattcatgtgcctagaccaagaagttattatctcgaactgacactgagccacaacccaaacaacccagctctccctaagcttcaaactagactacttctccataatattcatccctgtagcattgttcgttacatggtccatcatagaattctcactgtgatatataaactcagacccaaacattaatcagttcttcaaatatctactcatcttcctaattaccatactaatcttagttaccgctaacaacctattccaactgttcatcggctgagagggcgtaggaattatatccttcttgctcatcagttgatgatacgcccgagcagatgccaacacagcagccattcaagcaatcctatacaaccgtatcggcgatatcggtttcatcctcgccttagcatgatttatcctacactccaactcatgagacccacaacaaatagcccttctaaacgctaatccaagcctcaccccactactaggcctcctcctagcagcagcaggcaaatcagcccaattaggtctccacccctgactcccctcagccatagaaggccccaccccagtctcagccctactccactcaagcactatagttgtagcaggaatcttcttactcatccgcttccaccccctagcagaaaatagcccactaatccaaactctaacactatgcttaggcgctatcaccactctgttcgcagcagtctgcgcccttacacaaaatgacatcaaaaaaatcgtagccttctccacttcaagtcaactaggactcataatagttacaatcggcatcaaccaaccacacctagcattcctgcacatctgtacccacgccttcttcaaagccatactatttatgtgctccggatccatcatccacaaccttaacaatgaacaagatattcgaaaaataggaggactactcaaaaccatacctctcacttcaacctccctcaccattggcagcctagcattagcaggaatacctttcctcacaggtttctactccaaagaccacatcatcgaaaccgcaaacatatcatacacaaacgcctgagccctatctattactctcatcgctacctccctgacaagcgcctatagcactcgaataattcttctcaccctaacaggtcaacctcgcttccccacccttactaacattaacgaaaataaccccaccctactaaaccccattaaacgcctggcagccggaagcctattcgcaggatttctcattactaacaacattccccccgcatcccccttccaaacaacaatccccctctacctaaaactcacagccctcgctgtcactttcctaggacttctaacagccctagacctcaactacctaaccaacaaacttaaaataaaatccccactatgcacattttatttctccaacatactcggattctaccctagcatcacacaccgcacaatcccctatctaggccttcttacgagccaaaacctgcccctactcctcctagacctaacctgactagaaaagctattacctaaaacaatttcacagcaccaaatctccacctccatcatcacctcaacccaaaaaggcataattaaactttacttcctctctttcttcttcccactcatcctaaccctactcctaatcacataacctattcccccgagcaatctcaattacaatatatacaccaacaaacaatgttcaaccagtaactactactaatcaacgcccatagtcatacaaagcccccgcaccaataggatcctcccgaatcaaccctgacccctctccttcataaattattcagcttcctacactattaaagtttaccacaaccaccaccccatcatactctttcacccacagcaccaatcctacctccatcgctaaccccactaaaacactcaccaagacctcaacccctgacccccatgcctcaggatactcctcaatagccatcgctgtagtatatccaaagacaaccatcattccccctaaataaattaaaaaaactattaaacccatataacctcccccaaaattcagaataataacacacccgaccacaccgctaacaatcaatactaaacccccataaataggagaaggcttagaagaaaaccccacaaaccccattactaaacccacactcaacagaaacaaagcatacatcattattctcgcacggactacaaccacgaccaatgatatgaaaaaccatcgttgtatttcaactacaagaacaccaatgaccccaatacgcaaaattaaccccctaataaaattaattaaccactcattcatcgacctccccaccccatccaacatctccgcatgatgaaacttcggctcactccttggcgcctgcctgatcctccaaatcaccacaggactattcctagccatacactactcaccagacgcctcaaccgccttttcatcaatcgcccacatcactcgagacgtaaattatggctgaatcatccgctaccttcacgccaatggcgcctcaatattctttatctgcctcttcctacacatcgggcgaggcctatattacggatcatttctctactcagaaacctgaaacatcggcattatcctcctgcttgcaactatagcaacagccttcataggctatgtcctcccgtgaggccaaatatcattctgaggggccacagtaattacaaacttactatccgccatcccatacattgggacagacctagttcaatgaatctgaggaggctactcagtagacagtcccaccctcacacgattctttacctttcacttcatcttgcccttcattattgcagccctagcagcactccacctcctattcttgcacgaaacgggatcaaacaaccccctaggaatcacctcccattccgataaaatcaccttccacccttactacacaatcaaagacgccctcggcttacttctcttcattctctccttaatgacattaacactattctcaccagacctcctaggcgacccagacaattataccctagccaaccccttaaacacccctccccacatcaagcccgaatgatatttcctattcgcctacacaattctccgatccgtccctaacaagctaggaggcgtccttgccctattactatccatcctcatcctagcaataatccccatcctccatatatccaaacaacaaagcataatatttcgcccactaagccaatcactttattgactcctagccgcagacctcctcattctaacctgaatcggaggacaaccagtaagctacccttttaccatcattggacaagtagcatccgtactatacttcacaacaatcctaatcctaataccaactatctccctaattgaaaacaaaatactcaaatgggcctgtccttgtagtataaactaatacaccagtcttgtaaaccgaagatgaaaacctttttccaaggacaaatcagagaaaaagtctttaactccaccattagcacccaaagctaagattctaatttaaactattctctgttctttcatggggaagcagatttgggtaccacccaagtattgactcacccatcaacaaccgctatgtatttcgtacattactgccagccaccatgaatattgcacggtaccataaatacttgaccacctgtagtacataaaaacccaatccacatcaaaaccccctccccatgcttacaagcaagtacagcaatcaaccctcaactatcacacatcaactgcaactccaaagccacccctcacccactaggataccaacaaacctacccatctttaacagtacatagtacataaagccatttaccgtacatagcacattacagtcaaatcccttctcgtccccatggatgacccccctcagataggggtcccttgaccaccatcctccgtgaaatcaatatcccgcacaagagtgctactctcctcgctccgggcccataacacttgggggtagctaaagtgaactgtatccgacatctggttcctacttcagggccataaagcctaaatagcccacacgttccccttaaataagacatcacgatg

SEQ ID NO: 438 - DNA, 16576 bp, Homo sapiens mitochondrial
  3114: "n" refers to a nucleotide at position 3107 of the Cambridge Reference Sequence (CRS, Anderson et al. 1981 Nature 290:457-465), later determined to be absent from the human mtDNA sequence according to the revised CRS (rCRS, Andrews et al. 1999 Nature Genetics 23:147); "n" therefore represents a single nucleotide deletion at a position corresponding to nucleotide 3107 of SEQ ID NO:1 as provided herein.
gatcacaggtctatcaccctattaaccactcacgggagctctccatgcatttggtattttcgtctggggggtgtgcacgcgatagcattgcgagacgctggagccggagcaccctatgtcgcagtatctgtctttgattcctgcctcatcccattatttatcgcacctacgttcaatattacaggcgaacatacttaccaaagcgtattaattaattaatgcttgtaggacataataataacaattgaacgtctgcacagccgctttccacacagacatcataacaaaaaatttccaccaaaccccccctcccccccgcttctggccacagcacttaaacacatctctgccaaaccccaaaaacaaagaaccctaacaccagcctaaccagatttcaaattttatcttttggcggtatgcacttttaacagtcaccccccaactaacacattattttcccctcccactcccatactactaatctcatcaatacaacccccgcccatcctacccagcacacacacaccgctgctaaccccataccccgaaccaaccaaaccccaaagacaccccccaccccccagtttatgtagcttacctcctcaaagcaatacactgaaaatgtttagacgggctcacatcaccccataaacaaataggtttggtcctagcctttctattagctcttagtaagattacacatgcaagcatccccgttccagtgagttcaccctctaaatcaccacgatcaaaagggacaagcatcaagcacgcagcaatgcagctcaaaacgcttagcctagccacacccccacgggaaacagcagtgattaacctttagcaataaacgaaagtttaactaagctatactaaccccagggttggtcaatttcgtgccagccaccgcggtcacacgattaacccaagtcaatagaagccggcgtaaagagtgttttagatcaccccctccccaataaagctaaaactcacctgagttgtaaaaaactccagttgacacaaaatagactacgaaagtggctttaacatatctgaacacacaatagctaagacccaaactgggattagataccccactatgcttagccctaaacctcaacagttaaatcaacaaaactgctcgccagaacactacgagccacagcttaaaactcaaaggacctggcggtgcttcatatccctctagaggagcctgttctgtaatcgataaaccccgatcaacctcaccacctcttgctcagcctatataccgccatcttcagcaaaccctgatgaaggctacaaagtaagcgcaagtacccacgtaaagacgttaggtcaaggtgtagcccatgaggtggcaagaaatgggctacattttctaccccagaaaactacgatagcccttatgaaacttaagggtcgaaggtggatttagcagtaaactgagagtagagtgcttagttgaacagggccctgaagcgcgtacacaccgcccgtcaccctcctcaagtatacttcaaaggacatttaactaaaacccctacgcatttatatagaggagacaagtcgtaacatggtaagtgtactggaaagtgcacttggacgaaccagagtgtagcttaacacaaagcacccaacttacacttaggagatttcaacttaacttgaccgctctgagctaaacctagccccaaacccactccaccttactaccagacaaccttaaccaaaccatttacccaaataaagtataggcgatagaaattgaaacctggcgcaatagatatagtaccgcaagggaaagatgaaaaattataaccaagcataatatagcaaggactaacccctataccttctgcataatgaattaactagaaataactttgcaaggagagccaaagctaagacccccgaaaccagacgagctacctaagaacagctaaaagagcacacccgtctatgtagcaaaatagtgggaagatttataggtagaggcgacaaacctaccgagcctggtgatagctggttgtccaagatagaatcttagttcaactttaaatttgcccacagaaccctctaaatccccttgtaaatttaactgttagtccaaagaggaacagctctttggacactaggaaaaaaccttgtagagagagtaaaaaatttaacacccatagtaggcctaaaagcagccaccaattaagaaagcgttcaagctcaacacccactacctaaaaaatcccaaacatataactgaactcctcacacccaattggaccaatctatcaccctatagaagaactaatgttagtataagtaacatgaaaacattctcctccgcataagcctgcgtcagattaaaacactgaactgacaattaacagcccaatatctacaatcaaccaacaagtcattattaccctcactgtcaacccaacacaggcatgctcataaggaaaggttaaaaaaagtaaaaggaactcggcaaatcttaccccgcctgtttaccaaaaacatcacctctagcatcaccagtattagaggcaccgcctgcccagtgacacatgtttaacggccgcggtaccctaaccgtgcaaaggtagcataatcacttgttccttaaatagggacctgtatgaatggctccacgagggttcagctgtctcttacttttaaccagtgaaattgacctgcccgtgaagaggcgggcatgacacagcaagacgagaagaccctatggagctttaatttattaatgcaaacagtacctaacaaacccacaggtcctaaactaccaaacctgcattaaaaatttcggttggggcgacctcggagcagaacccaacctccgagcagtacatgctaagacttcaccagtcaaagcgaactactatactcaattgatccaataacttgaccaacggaacaagttaccctagggataacagcgcaatcctattctagagtccatatcaacaatagggtttacgacctcgatgttggatcaggacatcccgatggtgcagccgctattaaaggttcgtttgttcaacgattaaagtcctacgtgatctgagttcagaccggagtaatccaggtcggtttctatctacnttcaaattcctccctgtacgaaaggacaagagaaataaggcctacttcacaaagcgccttcccccgtaaatgatatcatctcaacttagtattatacccacacccacccaagaacagggtttgttaagatggcagagcccggtaatcgcataaaacttaaaactttacagtcagaggttcaattcctcttcttaacaacatacccatggccaacctcctactcctcattgtacccattctaatcgcaatggcattcctaatgcttaccgaacgaaaaattctaggctatatacaactacgcaaaggccccaacgttgtaggcccctacgggctactacaacccttcgctgacgccataaaactcttcaccaaagagcccctaaaacccgccacatctaccatcaccctctacatcaccgccccgaccttagctctcaccatcgctcttctactatgaacccccctccccatacccaaccccctggtcaacctcaacctaggcctcctatttattctagccacctctagcctagccgtttactcaatcctctgatcagggtgagcatcaaactcaaactacgccctgatcggcgcactgcgagcagtagcccaaacaatctcatatgaagtcaccctagccatcattctactatcaacattactaataagtggctcctttaacctctccacccttatcacaacacaagaacacctctgattactcctgccatcatgacccttggccataatatgatttatctccacactagcagagaccaaccgaacccccttcgaccttgccgaaggggagtccgaactagtctcaggcttcaacatcgaatacgccgcaggccccttcgccctattcttcatagccgaatacacaaacattattataataaacaccctcaccactacaatcttcctaggaacaacatatgacgcactctcccctgaactctacacaacatattttgtcaccaagaccctacttctaacctccctgttcttatgaattcgaacagcatacccccgattccgctacgaccaactcatacacctcctatgaaaaaacttcctaccactcaccctagcattacttatatgatatgtctccatacccattacaatctccagcattccccctcaaacctaagaaatatgtctgataaaagagttactttgatagagtaaataataggagcttaaacccccttatttctaggactatgagaatcgaacccatccctgagaatccaaaattctccgtgccacctatcacaccccatcctaaagtaaggtcagctaaataagctatcgggcccataccccgaaaatgttggttatacccttcccgtactaattaatcccctggcccaacccgtcatctactctaccatctttgcaggcacactcatcactgcgctaagctcgcactgattttttacctgagtaggcctagaaataaacatgctagcttttattccagttctaaccaaaaaaataaaccctcgttccacagaagctgccatcaagtatttcctcacgcaagcaaccgcatccataatccttctaatagctatcctcttcaacaatatactctccggacaatgaaccataaccaatactaccaatcaatactcatcattaataatcataatggctatagcaataaaactaggaatagccccctttcacttctgagtcccagaggttacccaaggcacccctctgacatccggcctgcttcttctcacatgacaaaaactagcccccatctcaatcatataccaaatctctccctcactaaacgtaagccttctcctcactctctcaatcttatccatcatagcaggcagttgaggtggattaaaccaaacccagctacgcaaaatcttagcatactcctcaattacccacataggatgaataatagcagttctaccgtacaaccctaacataaccattcttaatttaactatttatattatcctaactactaccgcattcctactactcaacttaaactccagcaccacgaccctactactatctcgcacctgaaacaagctaacatgactaacacccttaattccatccaccctcctctccctaggaggcctgcccccgctaaccggctttttgcccaaatgggccattatcgaagaattcacaaaaaacaatagcctcatcatccccaccatcatagccaccatcaccctccttaacctctacttctacctacgcctaatctactccacctcaatcacactactccccatatctaacaacgtaaaaataaaatgacagtttgaacatacaaaacccaccccattcctccccacactcatcgcccttaccacgctactcctacctatctccccttttatactaataatcttatagaaatttaggttaaatacagaccaagagccttcaaagccctcagtaagttgcaatacttaatttctgtaacagctaaggactgcaaaaccccactctgcatcaactgaacgcaaatcagccactttaattaagctaagcccttactagaccaatgggacttaaacccacaaacacttagttaacagctaagcaccctaatcaactggcttcaatctacttctcccgccgccgggaaaaaaggcgggagaagccccggcaggtttgaagctgcttcttcgaatttgcaattcaatatgaaaatcacctcggagctggtaaaaagaggcctaacccctgtctttagatttacagtccaatgcttcactcagccattttacctcacccccactgatgttcgccgaccgttgactattctctacaaaccacaaagacattggaacactatacctattattcggcgcatgagctggagtcctaggcacagctctaagcctccttattcgagccgagctgggccagccaggcaaccttctaggtaacgaccacatctacaacgttatcgtcacagcccatgcatttgtaataatcttcttcatagtaatacccatcataatcggaggctttggcaactgactagttcccctaataatcggtgcccccgatatggcgtttccccgcataaacaacataagcttctgactcttacctccctctctcctactcctgctcgcatctgctatagtggaggccggagcaggaacaggttgaacagtctaccctcccttagcagggaactactcccaccctggagcctccgtagacctaaccatcttctccttacacctagcaggtgtctcctctatcttaggggccatcaatttcatcacaacaattatcaatataaaaccccctgccataacccaataccaaacgcccctcttcgtctgatccgtcctaatcacagcagtcctacttctcctatctctcccagtcctagctgctggcatcactatactactaacagaccgcaacctcaacaccaccttcttcgaccccgccggaggaggagaccccattctataccaacacctattctgatttttcggtcaccctgaagtttatattcttatcctaccaggcttcggaataatctcccatattgtaacttactactccggaaaaaaagaaccatttggatacataggtatggtctgagctatgatatcaattggcttcctagggtttatcgtgtgagcacaccatatatttacagtaggaatagacgtagacacacgagcatatttcacctccgctaccataatcatcgctatccccaccggcgtcaaagtatttagctgactcgccacactccacggaagcaatatgaaatgatctgctgcagtgctctgagccctaggattcatctttcttttcaccgtaggtggcctgactggcattgtattagcaaactcatcactagacatcgtactacacgacacgtactacgttgtagctcacttccactatgtcctatcaataggagctgtatttgccatcataggaggcttcattcactgatttcccctattctcaggctacaccctagaccaaacctacgccaaaatccatttcactatcatattcatcggcgtaaatctaactttcttcccacaacactttctcggcctatccggaatgccccgacgttactcggactaccccgatgcatacaccacatgaaacatcctatcatctgtaggctcattcatttctctaacagcagtaatattaataattttcatgatttgagaagccttcgcttcgaagcgaaaagtcctaatagtagaagaaccctccataaacctggagtgactatatggatgccccccaccctaccacacattcgaagaacccgtatacataaaatctagacaaaaaaggaaggaatcgaaccccccaaagctggtttcaagccaaccccatggcctccatgactttttcaaaaaggtattagaaaaaccatttcataactttgtcaaagttaaattataggctaaatcctatatatcttaatggcacatgcagcgcaagtaggtctacaagacgctacttcccctatcatagaagagcttatcacctttcatgatcacgccctcataatcattttccttatctgcttcctagtcctgtatgcccttttcctaacactcacaacaaaactaactaatactaacatctcagacgctcaggaaatagaaaccgtctgaactatcctgcccgccatcatcctagtcctcatcgccctcccatccctacgcatcctttacataacagacgaggtcaacgatccctcccttaccatcaaatcaattggccaccaatggtactgaacctacgagtacaccgactacggcggactaatcttcaactcctacatacttcccccattattcctagaaccaggcgacctgcgactccttgacgttgacaatcgagtagtactcccgattgaagcccccattcgtataataattacatcacaagacgtcttgcactcatgagctgtccccacattaggcttaaaaacagatgcaattcccggacgtctaaaccaaaccactttcaccgctacacgaccgggggtatactacggtcaatgctctgaaatctgtggagcaaaccacagtttcatgcccatcgtcctagaattaattcccctaaaaatctttgaaataggacccgtatttaccctatagcaccccctctaccccctctagagcccactgtaaagctaacttagcattaaccttttaagttaaagattaagagaaccaacacctctttacagtgaaatgccccaactaaatactaccgtatggcccaccataattacccccatactccttacactattcctcatcacccaactaaaaatattaaacacaaactaccacctacctccctcaccaaagcccataaaaataaaaaattataacaaaccctgagaaccaaaatgaacgaaaatctgttcgcttcattcattgcccccacaatcctaggcctacccgccgcagtactgatcattctatttccccctctattgatccccacctccaaatatctcatcaacaaccgactaatcaccacccaacaatgactaatcaaactaacctcaaaacaaatgataaccatacacaacactaaaggacgaacctgatctcttatactagtatccttaatcatttttattgccacaactaacctcctcggactcctgcctcactcatttacaccaaccacccaactatctataaacctagccatggccatccccttatgagcgggcgcagtgattataggctttcgctctaagattaaaaatgccctagcccacttcttaccacaaggcacacctacaccccttatccccatactagttattatcgaaaccatcagcctactcattcaaccaatagccctggccgtacgcctaaccgctaacattactgcaggccacctactcatgcacctaattggaagcgccaccctagcaatatcaaccattaaccttccctctacacttatcatcttcacaattctaattctactgactatcctagaaatcgctgtcgccttaatccaagcctacgttttcacacttctagtaagcctctacctgcacgacaacacataatgacccaccaatcacatgcctatcatatagtaaaacccagcccatgacccctaacaggggccctctcagccctcctaatgacctccggcctagccatgtgatttcacttccactccataacgctcctcatactaggcctactaaccaacacactaaccatataccaatgatggcgcgatgtaacacgagaaagcacataccaaggccaccacacaccacctgtccaaaaaggccttcgatacgggataatcctatttattacctcagaagtttttttcttcgcaggatttttctgagccttttaccactccagcctagcccctaccccccaattaggagggcactggcccccaacaggcatcaccccgctaaatcccctagaagtcccactcctaaacacatccgtattactcgcatcaggagtatcaatcacctgagctcaccatagtctaatagaaaacaaccgaaaccaaataattcaagcactgcttattacaattttactgggtctctattttaccctcctacaagcctcagagtacttcgagtctcccttcaccatttccgacggcatctacggctcaacattttttgtagccacaggcttccacggacttcacgtcattattggctcaactttcctcactatctgcttcatccgccaactaatatttcactttacatccaaacatcactttggcttcgaagccgccgcctgatactggcattttgtagatgtggtttgactatttctgtatgtctccatctattgatgagggtcttactcttttagtataaatagtaccgttaacttccaattaactagctttgacaacattcaaaaaagagtaataaacttcgccttaattttaataatcaacaccctcctagccttactactaataattattacattttgactaccacaactcaacggctacatagaaaaatccaccccttacgagtgcggcttcgaccctatatcccccgcccgcgtccctttctccataaaattcttcttagtagctatcaccttcttattatttgatctagaaattgccctccttttacccctaccatgagccctacaaacaactaacctgccactaatagttatgtcatccctcttattaatcatcatcctagccctaagtctggcctatgagtgactacaaaaaggattagactgagccgaattggtatatagtttaaacaaaacgaatgatttcgactcattaaattatgataatcatatttaccaaatgcccctcatttacataaatattatactagcatttaccatctcacttctaggaatactagtatatcgctcacacctcatatcctccctactatgcctagaaggaataatactatcgctgttcattatagctactctcataaccctcaacacccactccctcttagccaatattgtgcctattgccatactagtctttgccgcctgcgaagcagcggtgggcctagccctactagtctcaatctccaacacatatggcctagactacgtacataacctaaacctactccaatgctaaaactaatcgtcccaacaattatattactaccactgacatgactttccaaaaaacacataatttgaatcaacacaaccacccacagcctaattattagcatcatccctctactattttttaaccaaatcaacaacaacctatttagctgttccccaaccttttcctccgaccccctaacaacccccctcctaatactaactacctgactcctacccctcacaatcatggcaagccaacgccacttatccagtgaaccactatcacgaaaaaaactctacctctctatactaatctccctgcaaatctccttaattataacattcacagccacagaactaatcatattttatatcttcttcgaaaccacacttatccccaccttggctatcatcacccgatgaggcaaccagccagaacgcctgaacgcaggcacatacttcctattctacaccctagtaggctcccttcccctactcatcgcactaatttacactcacaacaccctaggctcactaaacattctactactcactctcactgcccaagaactatcaaactcctgagccaacaacttaatatgactagcttacacaatagcttttatagtaaagatacctctttacggactccacttatgactccctaaagcccatgtcgaagcccccatcgctgggtcaatagtacttgccgcagtactcttaaaactaggcggctatggtataatacgcctcacactcattctcaaccccctgacaaaacacatagcctaccccttccttgtactatccctatgaggcataattataacaagctccatctgcctacgacaaacagacctaaaatcgctcattgcatactcttcaatcagccacatagccctcgtagtaacagccattctcatccaaaccccctgaagcttcaccggcgcagtcattctcataatcgcccacggacttacatcctcattactattctgcctagcaaactcaaactacgaacgcactcacagtcgcatcataatcctctctcaaggacttcaaactctactcccactaatagctttttgatgacttctagcaagcctcgctaacctcgccttaccccccactattaacctactgggagaactctctgtgctagtaaccacgttctcctgatcaaatatcactctcctacttacaggactcaacatactagtcacagccctatactccctctacatatttaccacaacacaatggggctcactcacccaccacattaacaacataaaaccctcattcacacgagaaaacaccctcatgttcatacacctatcccccattctcctcctatccctcaaccccgacatcattaccgggttttcctcttgtaaatatagtttaaccaaaacatcagattgtgaatctgacaacagaggcttacgaccccttatttaccgagaaagctcacaagaactgctaactcatgcccccatgtctaacaacatggctttctcaacttttaaaggataacagctatccattggtcttaggccccaaaaattttggtgcaactccaaataaaagtaataaccatgcacactactataaccaccctaaccctgacttccctaattccccccatccttaccaccctcgttaaccctaacaaaaaaaactcatacccccattatgtaaaatccattgtcgcatccacctttattatcagtctcttccccacaacaatattcatatgcctagaccaagaagttattatctcgaactgacactgagccacaacccaaacaacccagctctccctaagcttcaaactagactacttctccataatattcatccctgtagcattgttcgttacatggtccatcatagaattctcactgtgatatataaactcagacccaaacattaatcagttcttcaaatatctactcattttcctaattaccatactaatcttagttaccgctaacaacctattccaactgttcatcggctgagagggcgtaggaattatatccttcttgctcatcagttgatgatacgcccgagcagatgccaacacagcagccattcaagcaatcctatacaaccgtatcggcgatatcggtttcatcctcgccttagcatgatttatcctacactccaactcatgagacccacaacaaatagcccttctaaacgctaatccaagcctcaccccactactaggcctcctcctagcagcagcaggcaaatcagcccaattaggtctccacccctgactcccctcagccatagaaggccccaccccagtctcagccctactccactcaagcactatagttgtagcaggaatcttcttactcatccgcttccaccccctagcagaaaatagcccactaatccaaactctaacactatgcttaggcgctatcaccactctgttcgcagcagtctgcgcccttacacaaaatgacatcaaaaaaatcgtagccttctccacttcaagtcaactaggactcataatagttacaatcggcatcaaccaaccacacctagcattcctgcacatctgtacccacgccttcttcaaagccatactatttatgtgctccgggtccatcatccacaaccttaacaatgaacaagatattcgaaaaataggaggactactcaaaaccatacctctcacttcaacctccctcaccattggcagcctagcattagcaggaatacctttcctcacaggtttctactccaaagaccacatcatcgaaaccgcaaacatatcatacacaaacgcctgagccctatctattactctcatcgctacctccctgacaagcgcctatagcactcgaataattcttctcaccctaacaggtcaacctcgcttccccacccttactaacattaacgaaaataaccccaccctactaaaccccattaaacgcctggcagccggaagcctattcgcaggatttctcattactaacaacatttcccccgcatcccccttccaaacaacagtccccctctacctaaaactcacagccctcgctgtcactttcctaggacttctaacagccctagacctcaactacctaaccaacaaacttaaaataaaatccccactatgcacattttatttctccaacatactcggattctaccctagcatcacacaccgcacaatcccctatctaggccttcttacgagccaaaacctgcccctactcctcctagacctaacctgactagaaaagctattacctaaaacaatttcacagcaccaaatctccacctccatcatcacctcaacccaaaaaggcataattaaactttacttcctctctttcttcttcccactcatcctaaccctactcctaatcacataacctattcccccgagcaatctcaattacaatatatacaccaacaaacaatgttcaaccagtaactactactaatcaacgcccataatcatacaaagcccccgcaccaataggatcctcccgaatcaaccctgacccctctccttcataaattattcagcttcctacactattaaagtttaccacaaccaccaccccatcatactctttcacccacagcaccaatcctacctccatcgctaaccccactaaaacactcaccaagacctcaacccctgacccccatgcctcaggatactcctcaatagccatcgctgtagtatatccaaagacaaccatcattccccctaaataaattaaaaaaactattaaacccatataacctcccccaaaattcagaataataacacacccgaccacaccgctaacaatcaatactaaacccccataaataggagaaggcttagaagaaaaccccacaaaccccattactaaacccacactcaacagaaacaaagcatacatcattattctcgcacggactacaaccacgaccaatgatatgaaaaaccatcgttgtatttcaactacaagaacaccaatgaccccaatacgcaaaactaaccccctaataaaattaattaaccactcattcatcgacctccccaccccatccaacatctccgcatgatgaaacttcggctcactccttggcgcctgcctgatcctccaaatcaccacaggactattcctagccatgcactactcaccagacgcctcaaccgccttttcatcaatcgcccacatcactcgagacgtaaattatggctgaatcatccgctaccttcacgccaatggcgcctcaatattctttatctgcctcttcctacacatcggacgaggcctatattacggatcatttctctactcagaaacctgaaacatcggcattatcctcctgcttgcaactatagcaacagccttcataggctatgtcctcccgtgaggccaaatatcattctgaggggccacagtaattacaaacttactatccgccatcccatacattgggacagacctagttcaatgaatctgaggaggctactcagtagacagtcccaccctcacacgattctttacctttcacttcatcttgcccttcattattgcagccctagcagcactccacctcctattcttgcacgaaacgggatcaaacaaccccctaggaatcacctcccattccgataaaatcaccttccacccttactacacaatcaaagacgccctcggcttacttctcttccttctctccttaatgacattaacactattctcaccagacctcctaggcgacccagacaattataccctagccaaccccttaaacacccctccccacatcaagcccgaatgatatttcctattcgcctacacaattctccgatccgtccctaacaaactaggaggcgtccttgccctattactatccatcctcatcctagcaataatccccatcctccatatatccaaacaacaaagcataatatttcgcccactaagccaatcactttattgactcctagccgcagacctcctcattctaacctgagtcggaggacaaccagtaagctacccttttaccatcattggacaagtagcatccgtactatacttcacaacaatcctaatcctaataccaactatctccctaattgaaaacaaaatactcaaatgggcctgtccttgtagtataaactaatacaccagtcttgtaagccggagatgaaaacctttttccaaggacaaatcagagaaaaagtctttaactccaccattagcacccaaagctaagattctaatttaaactattctctgttctttcatggggaagcagatttgggtaccacccaagtattgactcacccatcaacaaccgctatgtatttcgtacattactgccagccaccatgaatattgtacagtaccataaatacttaaccacctgtagtacataaaaacccaatccacatcaaaaccccctccccatgcttacaagcaagtacagcaatcaaccttcaactatcacacatcaactgcaactccaaagccacccctcacccactaggataccaacaaacctacccacccttaacagtacatagtacataaagccatttaccgtacatagcacattacagtcaaatcccttctcgtccccatggatgacccccctcagatagggatcccttgaccaccatcctccgtgaaatcaatatcccgcacaagagtgctactctcctcgctccgggcccataacacttgggggtagctaaagtgaactgtatccgacatctggttcctacttcagggccataaagcctaaatagcccacacgttccccttaaataagacatcacgatg

SEQ ID NO: 439 - DNA, 16574 bp, Homo sapiens mitochondrial
  3112: "n" refers to a nucleotide at position 3107 of the Cambridge Reference Sequence (CRS, Anderson et al. 1981 Nature 290:457-465), later determined to be absent from the human mtDNA sequence according to the revised CRS (rCRS, Andrews et al. 1999 Nature Genetics 23:147); "n" therefore represents a single nucleotide deletion at a position corresponding to nucleotide 3107 of SEQ ID NO:1 as provided herein.
gatcacaggtctatcaccctattaaccactcacgggagctctccatgcatttggtattttcgtctggggggtgtgcacgcgatagcattgcgagacgctggagccggagcaccctatgtcgcagtatctgtctttgattcctgcctcatcctattatttatcgcacctacgttcaatattacaggcgaacatacttactaaagtgtgttaattaattaatgcttgtaggacataataataacaattgaatgtctgcacagccgctttccacacagacatcataacaaaaaatttccaccaaaccccccctccccccccgcttctggccacagcacttaaacacatctctgccaaaccccaaaaacaaagaaccctaacaccagcctaaccagatttcaaattttatcttttggcggtatgcacttttaacagtcaccccccaactaacacattattttcccctcccactcccatactactaatctcatcaacacaacccccgcccatcctacccaacacacacacaccacgctgctaaccccataccccgaaccaaccaaaccccaaagacaccccccacagtttatgtagcttacctcctcaaagcaatacactgaaaatgtttagacgggctcacatcaccccataaacaaataggtttggtcctagcctttctattagctcttagtaagattacacatgcaagcatccccgttccagtgagttcaccctctaaatcaccacgatcaaaagggacaagcatcaagcacgcagcaatgcagctcaaaacgcttagcctagccacacccccacgggaaacagcagtgattaacctttagcaataaacgaaagtttaactaagctatactaaccccagggttggtcaatttcgtgccagccaccgcggtcacacgattaacccaagtcaatagaagccggcgtaaagagtgttttagatcaccccctccccaataaagctaaaactcacctgagttgtaaaaaactccagttgacacaaaatagactacgaaagtggctttaacatatctgaacacacaatagctaagacccaaactgggattagataccccactatgcttagccctaaacctcaacagttaaatcaacaaaactgctcgccagaacactacgagccacagcttaaaactcaaaggacctggcggtgcttcatatccctctagaggagcctgttctgtaatcgataaaccccgatcaacctcaccacctcttgctcagcctatataccgccatcttcagcaaaccctgatgaaggctacaaagtaagcgcaagtacccacgtaaagacgttaggtcaaggtgtagcccatgaggtggcaagaaatgggctacattttctaccccagaaaactacgatagcccttatgaaacttaagggtcgaaggtggatttagcagtaaactgagagtagagtgcttagttgaacagggccctgaagcgcgtacacaccgcccgtcaccctcctcaagtatacttcaaaggacatttaactaaaacccctacgcatttatatagaggagacaagtcgtaacatggtaagtgtactggaaagtgcacttggacgaaccagagtgtagcttaacacaaagcacccaacttacacttaggagatttcaacttaacttgaccgctctgagctaaacctagccccaaacccactccaccttactaccagacaaccttagccaaaccatttacccaaataaagtataggcgatagaaattgaaacctggcgcaatagatatagtaccgcaagggaaagatgaaaaattataaccaagcataatatagcaaggactaacccctataccttctgcataatgaattaactagaaataactttgcaaggagagccaaagctaagacccccgaaaccagacgagctacctaagaacagctaaaagagcacacccgtctatgtagcaaaatagtgggaagatttataggtagaggcgacaaacctaccgagcctggtgatagctggttgtccaagatagaatcttagttcaactttaaatttgcccacagaaccctctaaatccccttgtaaatttaattgttagtccaaagaggaacagctctttggacactaggaaaaaaccttgtagagagagtaaaaaatttaacacccatagtaggcctaaaagcagccaccaattaagaaagcgttcaagctcaacacccactacctaaaaaatcccaaacatataactgaactcctcacacccaattggaccaatctatcaccctatagaagaactaatgttagtataagtaacatgaaaacattctcctccgcataagcctgcgtcagattaaaacactgaactgacaattaacagcccaatatctacaatcaaccaacaagtcattattaccctcactgtcaacccaacacaggcatgctcataaggaaaggttaaaaaaagtaaaaggaactcggcaaatcttaccccgcctgtttaccaaaaacatcacctctagcatcaccagtattagaggcaccgcctgcccagtgacacatgtttaacggccgcggtaccctaaccgtgcaaaggtagcataatcacttgttccttaaatagggacctgtatgaatggctccacgagggttcagctgtctcttacttttaaccagtgaaattgacctgcccgtgaagaggcgggcatgacacagcaagacgagaagaccctatggagctttaatttattaatgcaaacagtacctaacaaacccacaggtcctaaactaccaaacctgcattaaaaatttcggttggggcgacctcggagcagaacccaacctccgagcagtacatgctaagacttcaccagtcaaagcgaactactatactcaattgatccaataacttgaccaacggaacaagttaccctagggataacagcgcaatcctattctagagtccatatcaacaatagggtttacgacctcgatgttggatcaggacatcccaatggtgcagccgctattaaaggttcgtttgttcaacgattaaagtcctacgtgatctgagttcagaccggagtaatccaggtcggtttctatctacnttcaaattcctccctgtacgaaaggacaagagaaataaggcctacttcacaaagcgccttcccccgtaaatgatatcatctcaacttagtattatacccacacccacccaagaacagggtttgttaagatggcagagcccggtaatcgcataaaacttaaaactttacagtcagaggttcaattcctcttcttaacaacatacccatggccaacctcctactcctcattgtacccattctaatcgcaatggcattcctaatgcttaccgaacgaaaaattctaggctatatacaactacgcaaaggccccaacgttgtaggcccctacgggctactacaacccttcgctgacgccataaaactcttcaccaaagagcccctaaaacccgccacatctaccatcaccctctacatcaccgccccgaccttagctctcaccatcgctcttctactatgaacccccctccccatacccaaccccctggtcaacctcaacctaggcctcctatttattctagccacctctagcctagccgtttactcaatcctctgatcagggtgagcatcaaactcaaactacgccctgatcggcgcactgcgagcagtagcccaaacaatctcatatgaagtcaccctagccatcattctactatcaacattactaataagtggctcctttaacctctccacccttatcacaacacaagaacacctctgattactcctgccatcatgacccttggccataatatgatttatctccacactagcagagaccaaccgaacccccttcgaccttgccgaaggggagtccgaactagtctcaggcttcaacatcgaatacgccgcaggccccttcgccctattcttcatagccgaatacacaaacattattataataaacaccctcaccactacaatcttcctaggaacaacatatgacgcactctcccctgaactctacacaacatattttgtcaccaagaccctacttctaacctccctgttcttatgaattcgaacagcatacccccgattccgctacgaccaactcatacacctcctatgaaaaaacttcctaccactcaccctagcattacttatatgatatgtctccatacccattacaatctccagcattccccctcaaacctaagaaatatgtctgataaaagagttactttgatagagtaaataataggagcttaaacccccttatttctaggactatgagaatcgaacccatccctgagaatccaaaattctccgtgccacctatcacaccccatcctaaagtaaggtcagctaaataagctatcgggcccataccccgaaaatgttggttatacccttcccgtactaattaatcccctggcccaacccgtcatctactctaccatctttgcaggcacactcatcacagcgctaagctcgcactgattttttacctgagtgggcctagaaataaacatgctagcttttattccagttctaaccaaaaaaataaaccctcgttccacagaagctgccatcaagtatttcctcacgcaagcaaccgcatccataatccttctaatagctatcctcttcaacaatatactctccggacaatgaaccataaccaatactaccaatcaatactcatcattaataatcataatggctatagcaataaaactaggaatagccccctttcacttctgagtcccagaggttacccaaggcacccctctgacatccggcctgcttcttctcacatgacaaaaactagcccctatctcaatcatataccaaatctctccctcactaaacgtaagccttctcctcactctctcaatcttatccatcatagcaggcagttgaggtggattaaaccaaacccagctacgcaaaatcttagcatactcctcaattacccacataggatgaataatagcagttctaccgtacaaccctaacataaccattcttaatttaactatttatattatcctaactactaccgcattcctactactcaacttaaactccagcaccacgaccctactactatctcgcacctgaaacaagataacatgactaacacccttaattccatccaccctcctctccctaggaggcctgcccccgctaaccggctttttgcccaaatgggccattatcgaagaattcacaaaaaacaatagcctcatcatccccaccatcatagccaccatcaccctccttaacctctacttctacctacgcctaatctactccacctcaatcacactactccccatatctaacaacgtaaaaataaaatgacagtttgaacatacaaaacccaccccattcctccccacactcatcgcccttaccacgctactcctacctatctccccttttatactaataatcttatagaaatttaggttaaatacagaccaagagccttcaaagccctcagtaagttgcaatacttaatttctgtaacagctaaggactgcaaaaccccactctgcatcaactgaacgcaaatcagccactttaattaagctaagcccttactagaccaatgggacttaaacccacaaacacttagttaacagctaagcaccctaatcaactggcttcaatctacttctcccgccgccgggaaaaaaggcgggagaagccccggcaggtttgaagctgcttcttcgaatttgcaattcaatatgaaaatcacctcggagctggtaaaaagaggcctaacccctgtctttagatttacagtccaatgcttcactcagccattttacctcacccccactgatgttcgccgaccgttgactattctctacaaaccacaaagacattggaacactatacctattattcggcgcatgagctggagtcctaggcacagctctaagcctccttattcgagccgagctgggccagccaggcaaccttctaggtaacgaccacatctacaacgttatcgtcacagcccatgcatttgtaataatcttcttcatagtaatacccatcataatcggaggctttggcaactgactagttcccctaataatcggtgcccccgatatggcgtttccccgcataaacaacataagcttctgactcttacctccctctctcctactcctgctcgcatctgctatagtggaggccggagcaggaacaggttgaacagtctaccctcccttagcagggaactactcccaccctggagcctccgtagacctaaccatcttctccttacacctagcaggtgtctcctctatcttaggggccatcaatttcatcacaacaattatcaatataaaaccccctgccataacccaataccaaacgcccctcttcgtctgatccgtcctaatcacagcagtcctacttctcctatctctcccagtcctagctgctggcatcactatactactaacagaccgcaacctcaacaccaccttcttcgaccccgccggaggaggagaccccattctataccaacacctattctgatttttcggtcaccctgaagtttatattcttatcctaccaggcttcggaataatctcccatattgtaacttactactccggaaaaaaagaaccatttggatacataggtatggtctgagctatgatatcaattggcttcctagggtttatcgtgtgagcacaccatatatttacagtaggaatagacgtagacacacgagcatatttcacctccgctaccataatcatcgctatccccaccggcgtcaaagtatttagctgactcgccacactccacggaagcaatatgaaatgatctgctgcagtgctctgagccctaggattcatctttcttttcaccgtaggtggcctgactggcattgtattagcaaactcatcactagacatcgtactacacgacacgtactacgttgtagctcacttccactatgtcctatcaataggagctgtatttgccatcataggaggcttcattcactgatttcccctattctcaggctacaccctagaccaaacctacgccaaaatccatttcactatcatattcatcggcgtaaatctaactttcttcccacaacactttctcggcctatccggaatgccccgacgttactcggactaccccgatgcatacaccacatgaaacatcctatcatctgtaggctcattcatttctctaacagcagtaatattaataattttcatgatttgagaagccttcgcttcgaagcgaaaagtcctaatagtagaagaaccctccataaacctggagtgactatatggatgccccccaccctaccacacattcgaagaacccgtatacataaaatctagacaaaaaaggaaggaatcgaaccccccaaagctggtttcaagccaaccccatggcctccatgactttttcaaaaaggtattagaaaaaccatttcataactttgtcaaagttaaattataggctaaatcctatatatcttaatggcacatgcagcgcaagtaggtctacaagacgctacttcccctatcatagaagagcttatcacctttcatgatcacgccctcataatcattttccttatctgcttcctagtcctgtatgcccttttcctaacactcacaacaaaactaactaatactaacatctcagacgctcaggaaatagaaaccgtctgaactatcctgcccgccatcatcctagtcctcatcgccctcccatccctacgcatcctttacataacagacgaggtcaacgatccctcccttaccatcaaatcaattggccaccaatggtactgaacctacgagtacaccgactacggcggactaatcttcaactcctacatacttcccccattattcctagaaccaggcgacctgcgactccttgacgttgacaatcgagtagtactcccgattgaagcccccattcgtataataattacatcacaagacgtcttgcactcatgagctgtccccacattaggcttaaaaacagatgcaattcccggacgtctaaaccaaaccactttcaccgctacacgaccgggggtatactacggtcaatgctctgaaatctgtggagcaaaccacagtttcatgcccatcgtcctagaattaattcccctaaaaatctttgaaatagggcccgtatttaccctatagcaccccctctaccccctctagagcccactgtaaagctaacttagcattaaccttttaagttaaagattaagagaaccaacacctctttacagtgaaatgccccaactaaatactaccgtatggcccaccataattacccccatattccttacactattcctcatcacccaactaaaaatattaaacacaaactaccacctacctccctcaccaaagcccataaaaataaaaaattataacaaaccctgagaaccaaaatgaacgaaaatctgttcgcttcattcattgcccccacaatcctaggcctacccgccgcagtactgatcattctatttccccctctattgatccccacctccaaatatctcatcaacaaccgactaatcaccacccaacaatgactaatcaaactaacctcaaaacaaatgatagccatacacaacactaaaggacgaacctgatctcttatactagtatccttaatcatttttattgccacaactaacctcctcggactcctgcctcactcatttacaccaaccacccaactatctataaacctagccatggccatccccttatgagcgggcgcagtgattataggctttcgctctaagattaaaaatgccctagcccacttcttaccacaaggcacacctacaccccttatccccatactagttattatcgaaaccatcagcctactcattcaaccaatagccctggccgtacgcctaaccgctaacattactgcaggccacctactcatgcacctaattggaagcgccaccctagcaatatcaaccattaaccttccctctacacttatcatcttcacaattctaattctactgactatcctagaaatcgctgtcgccttaatccaagcctacgttttcacacttctagtaagcctctacctgcacgacaacacataatgacccaccaatcacatgcctatcatatagtaaaacccagcccatgacccctaacaggggccctctcagccctcctaatgacctccggcctagccatgtgatttcacttccactccataacgctcctcatactaggcctactaaccaacacactaaccatataccaatgatggcgcgatgtaacacgagaaagcacataccaaggccaccacacaccacctgtccaaaaaggccttcgatacgggataatcctatttattacctcagaagtttttttcttcgcaggatttttctgagccttttaccactccagcctagcccctaccccccaactaggagggcactggcccccaacaggcatcaccccgctaaatcccctagaagtcccactcctaaacacatccgtattactcgcatcaggagtatcaatcacctgagctcaccatagtctaatagaaaacaaccgaaaccaaataattcaagcactgcttattacaattttactgggtctctattttaccctcctacaagcctcagagtacttcgagtctcccttcaccatttccgacggcatctacggctcaacattttttgtagccacaggcttccacggacttcacgtcattattggctcaactttcctcactatctgcttcatccgccaactaatatttcactttacatccaaacatcactttggcttcgaagccgccgcctgatactggcattttgtagatgtggtttgactatttctgtatgtctccatctattgatgagggtcttactcttttagtataaatagtaccgttaacttccaattaactagttttgacaacattcaaaaaagagtaataaacttcgccttaattttaataatcaacaccctcctagccttactactaataattattacattttgactaccacaactcaacggctacatagaaaaatccaccccttacgagtgcggcttcgaccctatatcccccgcccgcgtccctttctccataaaattcttcttagtagctattaccttcttattatttgatctagaaattgccctccttttacccctaccatgagccctacaaacaactaacctgccactaatagttatgtcatccctcttattaatcatcatcctagccctaagtctggcctatgagtgactacaaaaaggattagactgagctgaattggtatatagtttaaacaaaacgaatgatttcgactcattaaattatgataatcatatttaccaaatgcccctcatttacataaatattatactagcatttaccatctcacttctaggaatactagtatatcgctcacacctcatatcctccctactatgcctagaaggaataatactatcgctgttcattatagctactctcataaccctcaacacccactccctcttagccaatattgtgcctattgccatactagtctttgccgcctgcgaagcagcggtgggcctagccctactagtctcaatctccaacacatatggcctagactacgtacataacctaaacctactccaatgctaaaactaatcgtcccaacaattatattactaccactgacatgactttccaaaaaacacataatttgaatcaacacaaccacccacagcctaattattagcatcatccccctactattttttaaccaaatcaacaacaacctatttagctgttccccaaccttttcctccgaccccctaacaacccccctcctaatactaactacctgactcctacccctcacaatcatggcaagccaacgccacttatccagtgaaccactatcacgaaaaaaactctacctctctatactaatctccctacaaatctccttaattataacattcacagccacagaactaatcatattttatatcttcttcgaaaccacacttatccccaccttggctatcatcacccgatgaggcaaccagccagaacgcctgaacgcaggcacatacttcctattctacaccctagtaggctcccttcccctactcatcgcactaatttacactcacaacaccctaggctcactaaacattctactactcactctcactgcccaagaactatcaaactcctgagccaacaacttaatatgactagcttacacaatagcttttatagtaaagatacctctttacggactccacttatgactccctaaagcccatgtcgaagcccccatcgctgggtcaatagtacttgccgcagtactcttaaaactaggcggctatggtataatacgcctcacactcattctcaaccccctgacaaaacacatagcctaccccttccttgtactatccctatgaggcataattataacaagctccatctgcctacgacaaacagacctaaaatcgctcattgcatactcttcaatcagccacatagccctcgtagtaacagccattctcatccaaaccccctgaagcttcaccggcgcagtcattctcataatcgcccacggacttacatcctcattactattctgcctagcaaactcaaactacgaacgcactcacagtcgcatcataatcctctctcaaggacttcaaactctactcccactaatagctttttgatgacttctagcaagcctcgctaacctcgccttaccccccactattaacctactgggagaactctctgtgctagtaaccacgttctcctgatcaaatatcactctcctacttacaggactcaacatactagtcacagccctatactccctctacatatttaccacaacacaatggggctcactcacccaccacattaacaacataaaaccctcattcacacgagaaaacaccctcatgttcatacacctatcccccattctcctcctatccctcaaccccgacatcattaccgggttttcctcttgtaaatatagtttaaccaaaacatcagattgtgaatctgacaacagaggcttacgaccccttatttaccgagaaagctcacaagaactgctaactcatgcccccatgtctaacaacatggctttctcaacttttaaaggataacagctatccattggtcttaggccccaaaaattttggtgcaactccaaataaaagtaataaccatgcacactactataaccaccctaaccctgacttccctaattccccccatccttaccaccctcgttaaccctaacaaaaaaaactcatacccccattatgtaaaatccattgtcgcatccacctttattatcagtctcttccccacaacaatattcatgtgcctagaccaagaagttattatctcgaactgacactgagccacaacccaaacaacccagctctccctaagcttcaaactagactacttctccataatattcatccctgtagcattgttcgttacatggtccatcatagaattctcactgtgatatataaactcagacccaaacattaatcagttcttcaaatatctactcattttcctaattaccatactaatcttagttaccgctaacaacctattccaactgttcatcggctgagagggcgtaggaattatatccttcttgctcatcagttgatgatacgcccgagcagatgccaacacagcagccattcaagcaatcctatacaaccgtatcggcgatatcggtttcatcctcgccttagcatgatttatcctacactccaactcatgagacccacaacaaatagcccttctaaacgctaatccaagcctcaccccactactaggcctcctcctagcagcagcaggcaaatcagcccaattaggtctccacccctgactcccctcagccatagaaggccccaccccagtctcagccctactccactcaagcactatagttgtagcaggaatcttcttactcatccgcttccaccccctagcagaaaatagcccactaatccaaactctaacactatgcttaggcgctatcaccactctgttcgcagcagtctgcgcccttacacaaaatgacatcaaaaaaatcgtagccttctccacttcaagtcaactaggactcataatagttacaatcggcatcaaccaaccacacctagcattcctgcacatctgtacccacgccttcttcaaagccatactatttatgtgctccgggtccatcatccacaaccttaacaatgaacaagatattcgaaaaataggaggactactcaaaaccatacctctcacttcaacctccctcaccattggcagcctagcattagcaggaatacctttcctcacaggtttctactccaaagaccacatcatcgaaaccgcaaacatatcatacacaaacgcctgagccctatctattactctcatcgctacctccctgacaagcgcctatagcactcgaataattcttctcaccctaacaggtcaacctcgcttccccacccttactaacattaacgaaaataaccccaccctactaaaccccattaaacgcctggcagccggaagcctattcgcaggatttctcattactaacaacatttcccccgcatcccccttccaaacaacaatccccctctacctaaaactcacagccctcgctgtcactttcctaggacttctaacagccctagacctcaactacctaaccaacaaacttaaaataaaatccccactatgcacattttatttctccaacatactcggattctaccctagcatcacacaccgcacaatcccctatctaggccttcttacgagccaaaacctgcccctactcctcctagacctaacctgactagaaaagctattacctaaaacaatttcacagcaccaaatctccacctccatcatcacctcaacccaaaaaggcataattaaactttacttcctctctttcttcttcccactcatcctaaccctactcctaatcacataacctattcccccgagcaatctcaattacaatatatacaccaacaaacaatgttcaaccagtaactactactaatcaacgcccataatcatacaaagcccccgcaccaataggatcctcccgaatcaaccctgacccctctccttcataaattattcagcttcctacactattaaagtttaccacaaccaccaccccatcatactctttcacccacagcaccaatcctacctccatcgctaaccccactaaaacactcaccaagacctcaacccctgacccccatgcctcaggatactcctcaatagccatcgctgtagtatatccaaagacaaccatcattccccctaaataaattaaaaaaactattaaacccatataacctcccccaaaattcagaataataacacacccgaccacaccgctaacaatcaatactaaacccccataaataggagaaggcttagaagaaaaccccacaaaccccattactaaacccacactcaacagaaacaaagcatatatcattattctcgcacggactacaaccacgaccaatgatatgaaaaaccatcgttgtatttcaactacaagaacaccaatgaccccaatacgcaaaattaaccccctaataaaactaattaaccactcattcatcgacctccccaccccatccaacatctccgcatgatgaaacttcggctcactccttggcgcctgcctgatcctccaaatcaccacaggactattcctagccatgcactactcaccagacgcctcaaccgccttttcatcaatcgcccacatcactcgagacgtaaattatggctgaatcatccgctaccttcacgccaatggcgcctcaatattctttatctgcctcttcctacacatcggacgaggcctatattacggatcatttctctactcagaaacctgaaacatcggcattatcctcctgcttgcaactatagcaacagccttcataggctatgtcctcccgtgaggccaaatatcattctgaggggccacagtaattacaaacttactatccgccatcccatacattgggacagacctagttcaatgaatctgaggaggctactcagtagacagtcccaccctcacacgattctttacctttcacttcatcttacccttcattattgcagccctagcagcactccacctcctattcttgcacgaaacgggatcaaacaaccccctaggaatcacctcccattccgataaaatcaccttccacccttactacacaatcaaagacgccctcggcttacttctcttccttctctccttaatgacattaacactattctcaccagacctcctaggcgacccagacaattataccctagccaaccccttaaacacccctccccacatcaagcccgaatgatatttcctattcgcctacacaattctccgatccgtccctaacaaactaggaggcgtccttgccctattactatccatcctcatcctagcaataatccccatcctccatatatccaaacaacaaagcataatatttcgcccactaagccaatcactttattgactcctagccgcagacctcctcattctaacctgaatcggaggacaaccagtaagctacccttttaccatcattggacaagtagcatccgtactatacttcacaacaatcctaatcctaataccaactatctccctaattgaaaacaaaatactcaaatgggcctgtccttgtagtataaactaatacaccagtcttgtaaaccggagatgaaaacctttttccaaggacaaatcagagaaaaagtctttaactccaccattagcacccaaagctaagattctaatttaaactattctctgttctttcatggggaagcagatttgggtaccacccaagtattgactcacccatcaacaaccgctatgtatttcgtacattactgccagccaccatgaatattgtacggtaccataaatatttgaccacctgtagtacataaaaacccaatccacatcaaaaccccctccccatgcttacaagcaggtacagcaatcaaccttcaactatcacacatcaactgcaactccaaagccacccctcacccactaggataccaacaaacctacccacccttaacagtacatagtacataaagccattcaccgtacatagcacattacagtcaaatcccttctcgcccccatggatgacccccctcagataggggtcccttgaccaccatcctccgtgaaatcaatatcccgcacaagagtgctactctcctcgctccgggcccataacacttgggggtagctaaagtgaactgtatccgacatctggttcctacttcagggccataaagcctaaatagcccacacgttccccttaaataagacatcacgatg

SEQ ID NO: 440 - DNA, 16569 bp, Homo sapiens mitochondrial
  3107: "n" refers to a nucleotide at position 3107 of the Cambridge Reference Sequence (CRS, Anderson et al. 1981 Nature 290:457-465), later determined to be absent from the human mtDNA sequence according to the revised CRS (rCRS, Andrews et al. 1999 Nature Genetics 23:147); "n" therefore represents a single nucleotide deletion at a position corresponding to nucleotide 3107 of SEQ ID NO:1 as provided herein.
gatcacaggtctatcaccctattaaccactcacgggagctctccatgcatttggtattttcgtctggggggtgtgcacgcgatagcattgcgagacgctggagccggagcaccctatgtcgcagtatctgtctttgattcctgccccatcctgttatttatcgcacctacgttcaatattacaggcgaacatacttactaaagtgtgttaattaattaatgcttgtaggacatagtaataacaattgaatgtctgcacagccgctttccacacagacatcataacaaaaaatttccaccaaaccccccctcccccccgcttctggccacagcacttaaacacatctctgccaaaccccaaaaacaaagaaccctaacaccagcctaaccagatttcaaattttatcttttggcggtatgcacttttaacagtcaccccccaactaacacattattttcccctcccactcccatactactaatctcatcaatacaacccccgcccatcctacccagcacacacaccgctgctaaccccataccccgaaccaaccaaaccccaaagacaccccccacagtttatgtagcttacctcctcaaagcaatacactgaaaatgtttagacgggctcacatcaccccataaacaaataggtttggtcctggcctttctattagctcttagtaagattacacatgcaagcatccccgttccagtgagttcaccctctaaatcaccacgatcaaaagggacaagcatcaagcacgcagcaatgcagctcaaaacgcttagcctagccacacccccacgggaaacagcagtgattaacctttagcaataaacgaaagtttaactaagctatactaaccccagggttggtcaatttcgtgccagccaccgcggtcacacgattaacccaagtcaatagaagccggcgtaaagagtgttttagatcaccccctccccaataaagctaaaactcacctgagttgtaaaaaactccagttgacacaaaatagactacgaaagtggctttaacatatctgaacacacaatagctaagacccaaactgggattagataccccactatgcttagccctaaacctcaacagttaaatcaacaaaactgctcgccagaacactacgagccacagcttaaaactcaaaggacctggcggtgcttcatatccctctagaggagcctgttctgtaatcgataaaccccgatcaacctcaccacctcttgctcagcctatataccgccatcttcagcaaaccctgatgaaggctacaaagtaagcgcaagtacccacgtaaagacgttaggtcaaggtgtagcccatgaggtggcaagaaatgggctacattttctaccccagaaaactacgatagcccttatgaaacttaagggtcgaaggtggatttagcagtaaactgagagtagagtgcttagttgaacagggccctgaagcgcgtacacaccgcccgtcaccctcctcaagtatacttcaaaggacatttaactaaaacccctacgcatttatatagaggagacaagtcgtaacatggtaagtgtactggaaagtgcacttggacgaaccagagtgtagcttaacacaaagcacccaacttacacttaggagatttcaacttaacttgaccgctctgagctaaacctagccccaaacccactccaccttactaccagacaaccttagccaaaccatttacccagataaagtataggcgatagaaattgaaacctggcgcaatagatatagtaccgcaagggaaagatgaaaaattataaccaagcataatatagcaaggactaacccctataccttctgcataatgaattaactagaaataactttgcaaggagagccaaagctaagacccccgaaaccagacgagctacctaagaacagctaaaagagcacacccgtctatgtagcaaaatagtgggaagatttataggtagaggcgacaaacctaccgagcctggtgatagctggttgtccaagatagaatcttagttcaactttaaatttgcccacagaaccctctaaatccccttgtaaatttaactgttagtccaaagaggaacagctctttggacactaggaaaaaaccttgtagagagagtaaaaaatttaacacccatagtaggcctaaaagcagccaccaattaagaaagcgttcaagctcaacacccactacctaaaaaatcccaaacatataactgaactcctcacacccaattggaccaatctatcaccctatagaagaactaatgttagtataagtaacatgaaaacattctcctccgcataagcctgcgtcagattaaaacactgaactgacaattaacagcccaatatctacaatcaaccaacaagtcattattaccctcactgtcaacccaacacaggcatgctcataaggaaaggttaaaaaaagtaaaaggaactcggcaaatcttaccccgcctgtttaccaaaaacatcacctctagcatcaccagtattagaggcaccgcctgcccagtgacacatgtttaacggccgcggtaccctaaccgtgcaaaggtagcataatcacttgttccttaaatagggacctgtatgaatggctccacgagggttcagctgtctcttacttttaaccagtgaaattgacctgcccgtgaagaggcgggcatgacacagcaagacgagaagaccctatggagctttaatttattaatgcaaacagtacctaacaaacccacaggtcctaaactaccaaacctgcattaaaaatttcggttggggcgacctcggagcagaacccaacctccgagcagtacatgctaagacttcaccagtcaaagcgaactactatactcaattgatccaataacttgaccaacggaacaagttaccctagggataacagcgcaatcctattctagagtccatatcaacaatagggtttacgacctcgatgttggatcaggacatcccgatggtgcagccgctattaaaggttcgtttgttcaacgattaaagtcctacgtgatctgagttcagaccggagtaatccaggtcggtttctatctacnttcaaattcctccctgtacgaaaggacaagagaaataaggcctacttcacaaagcgccttcccccgtaaatgatatcatctcaacttagtattatacccacacccacccaagaacagggtttgttaagatggcagagcccggtaatcgcataaaacttaaaactttacagtcagaggttcaattcctcttcttaacaacatacccatggccaacctcctactcctcattgtacccattctaatcgcaatggcattcctaatgcttaccgaacgaaaaattctaggctatatacaactacgcaaaggccccaacgttgtaggcccctacgggctactacaacccttcgctgacgccataaaactcttcaccaaagagcccctaaaacccgccacatctaccatcaccctctacatcaccgccccgaccttagctctcaccatcgctcttctactatgaacccccctccccatacccaaccccctggtcaacctcaacctaggcctcctatttattctagccacctctagcctagccgtttactcaattctctgatcagggtgagcatcaaactcaaactacgccctgatcggcgcactgcgagcagtagcccaaacaatctcatatgaagtcaccctagccatcattctactatcaacattactaataagtggctcctttaacctctccacccttatcacaacacaagaacacctctgattactcctgccatcatgacccttggccataatatgatttatctccacactagcagagaccaaccgaacccccttcgaccttgccgaaggggagtccgaactagtctcaggcttcaacatcgaatacgccgcaggccccttcgccctattcttcatagccgaatacacaaacattattataataaacaccctcaccactacaatcttcctaggaacaacatatgacgcactctcccctgaactctacacaacatattttgtcaccaagaccctacttctaacctccctgttcttatgaattcgaacagcatacccccgattccgctacgaccaactcatacacctcctatgaaaaaacttcctaccactcaccctagcattacttatatgatatgtctccatacccattacaatctccagcatcccccctcaaacctaagaaatatgtctgataaaagagttactttgatagagtaaataataggagcttaaacccccttatttctaggactatgagaatcgaacccatccctgagaatccaaaattctccgtgccacctatcacaccccatcctaaagtaaggtcagctaaataagctatcgggcccataccccgaaaatgttggttatacccttcccgtactaattaatcccctggcccaacccgtcatctactctaccatctttgcaggcacactcatcacagcgctaagctcgcactgattttttacctgagtaggcctagaaataaacatgctagcttttattccagttctaaccaaaaaaataaaccctcgttccacagaagctgccatcaagtatttcctcacgcaagcaaccgcatccataatccttctaatagctatcctcttcaacaatatactctccggacaatgaaccataaccaatactaccaatcaatactcatcattaataatcataatggctatagcaataaaactaggaatagccccctttcacttctgagtcccagaggttgcccaaggcacccctctgacatccggcctgcttcttctcacatgacaaaaactagcccccatctcaatcatataccaaatctctccctcactaaacgtaagccttctcctcactctctcaatcttatccatcatagcaggcagttgaggtggattaaaccaaacccagctacgcaaaatcttagcatactcctcaattacccacataggatgaataatagcagttctaccgtacaaccctaacataaccattcttaatttaactatttatattatcctaactactaccgcattcctactactcaacttaaactccagcaccacgaccctactactatctcgcacctgaaacaagctaacatgactaacacccttaattccatccaccctcctctccctaggaggcctgcccccgctaaccggctttttgcccaaatgggccattatcgaagaattcacaaaaaacaatagcctcatcatccccaccatcatagccaccatcaccctccttaacctctacttctacctacgcctaatctactccacctcaatcacactactccccatatctaacaacgtaaaaataaaatgacagtttgaacatacaaaacccaccccattcctccccacactcatcgcccttaccacgctactcctacctatctccccttttatactaataatcttatagaaatttaggttaaatacagaccaagagccttcaaagccctcagtaagttgcaatacttaatttctgtaacagctaaggactgcaaaaccccactctgcatcaactgaacgcaaatcagccactttaattaagctaagcccttactagaccaatgggacttaaacccacaaacacttagttaacagctaagcaccctaatcaactggcttcaatctacttctcccgccgccgggaaaaaaggcgggagaagccccggcaggtttgaagctgcttcttcgaatttgcaattcaatatgaaaatcacctcggagctggtaaaaagaggcctaacccctgtctttagatttacagtccaatgcttcactcagccattttacctcacccccactgatgttcgccgaccgttgactattctctacaaaccacaaagacattggaacactatacctattattcggcgcatgagctggagtcctaggcacagctctaagcctccttattcgagccgagctgggccagccaggcaaccttctaggtaacgaccacatctacaacgttatcgtcacagcccatgcatttgtaataatcttcttcatagtaatacccatcataatcggaggctttggcaactgactagttcccctaataatcggtgcccccgatatggcgtttccccgcataaacaacataagcttctgactcttacctccctctctcctactcctgctcgcatctgctatagtggaggccggagcaggaacaggttgaacagtctaccctcccttagcagggaactactcccaccctggagcctccgtagacctaaccatcttctccttacacctagcaggtgtctcctctatcttaggggccatcaatttcatcacaacaattatcaatataaaaccccctgccataacccaataccaaacgcccctcttcgtctgatccgtcctaatcacagcagtcctacttctcctatctctcccagtcctagctgctggcatcactatactactaacagaccgcaacctcaacaccaccttcttcgaccccgccggaggaggagaccccattctataccaacacctattctgatttttcggtcaccctgaagtttatattcttatcctaccaggcttcggaataatctcccatattgtaacttactactccggaaaaaaagaaccatttggatacataggtatggtctgagctatgatatcaattggcttcctagggtttatcgtgtgagcacaccatatatttacagtaggaatagacgtagacacacgagcatatttcacctccgctaccataatcatcgctatccccaccggcgtcaaagtatttagctgactcgccacactccacggaagcaatatgaaatgatctgctgcagtgctctgagccctaggatttatctttcttttcaccgtaggtggcctgactggcattgtattagcaaactcatcactagacatcgtactacacgacacgtactacgttgtagctcacttccactatgtcctatcaataggagctgtatttgccatcataggaggcttcattcactgatttcccctattctcaggctacaccctagaccaaacctacgccaaaatccatttcactatcatattcatcggcgtaaatctaactttcttcccacaacactttctcggcctatccggaatgccccgacgttactcggactaccccgatgcatacaccacatgaaacatcctatcatctgtaggctcattcatttctctaacagcagtaatattaataattttcatgatttgagaagccttcgcttcgaagcgaaaagtcctaatagtagaagaaccctccataaacctggagtgactatatggatgccccccaccctaccacacattcgaagaacccgtatacataaaatctagacaaaaaaggaaggaatcgaaccccccaaagctggtttcaagccaaccccatggcctccatgactttttcaaaaaggtattagaaaaaccatttcataactttgtcaaagttaaattataggctaaatcctatatatcttaatggcacatgcagcgcaagtaggtctacaagacgctacttcccctatcatagaagagcttatcacctttcatgatcacgccctcataatcattttccttatctgcttcctagtcctgtatgcccttttcctaacactcacaacaaaactaactaatactaacatctcagacgctcaggaaatagaaaccgtctgaactatcctgcccgccatcatcctagtcctcatcgccctcccatccctacgcatcctttacataacagacgaggtcaacgatccctcccttaccatcaaatcaattggccaccaatggtactgaacctacgagtacaccgactacggcggactaatcttcaactcctacatacttcccccattattcctagaaccaggcgacctgcgactccttgacgttgacaatcgagtagtactcccgattgaaacccccattcgtataataattacatcacaagacgtcttgcactcatgagctgtccccacattaggcttaaaaacagatgcaattcccggacgtctaaaccaaaccactttcaccgctacacgaccgggggtatactacggtcaatgctctgaaatctgtggagcaaaccacagtttcatgcccatcgtcctagaattaattcccctaaaaatctttgaaatagggcccgtatttaccctatagcaccccctctaccccctctagagcccactgtaaagctaacttagcattaaccttttaagttaaaaattaagagaaccaacacctctttacagtgaaatgccccaactaaatactaccgtatggcccaccataattacccccatactccttacactattcctcatcacccaactaaaaatattaaacacaaactaccacctacctccctcaccaaagcccataaaaataaaaaattataacaaaccctgagaaccaaaatgaacgaaaatctgttcgcttcattcattgcccccacaatcctaggcctacccaccgcagtactgatcattctatttccccctctattgatccccacctccaaatatctcatcaacaaccgactaatcaccacccaacaatgactaatcaaactaacctcaaaacaaatgataaccatacacaacactaaaggacgaacctgatctcttatactagtatccttaatcatttttattgccacaactaacctcctcggactcctgccttactcatttacaccaaccacccaactatctataaacctagccatggccatccccttatgagcgggcgcagtgattataggctttcgctctaagattaaaaatgccctagcccacttcttaccacaaggcacacctacaccccttatccccatactagttattatcgaaaccatcagcctactcattcaaccaatagccctggccgtacgcctaaccgctaacattactgcaggccacctactcatgcacctaattggaagcgccaccctagcaatatcaaccattaaccttccctctacacttatcatcttcacaattctaattctactgactatcctagaaatcgctgtcgccttaatccaagcctacgttttcacacttctagtaagcctctacctgcacgacaacacataatgacccaccaatcacatgcctatcatatagtaaaacccagcccatgacccctaacaggggccctctcagccctcctaatgacctccggcctagccatgtgatttcacttccactccataacgctcctcatactaggcctactaaccaacacactaaccatataccaatgatggcgcgatgtaacacgagaaagcacataccaaggccaccacacaccacctgtccaaaaaggccttcgatacgggataatcctatttattacctcagaagtttttttcttcgcaggatttttctgagccttttaccactccagcctagcccctaccccccaattaggagggcactggcccccaacaggcatcaccccgctaaatcccctagaagtcccactcctaaacacatccgtattactcgcatcaggagtatcaatcacctgagctcaccatagtctaatagaaaacaaccgaaaccaaataattcaagcactgcttattacaattttactgggtctctattttaccctcctacaagcctcagagtacttcgagtctcccttcaccatttccgacggcatctacggctcaacattttttgtagccacaggcttccacggacttcacgtcattattggctcaactttcctcactatctgcttcatccgccaactaatatttcactttacatccaaacatcactttggcttcgaagccgccgcctgatactggcattttgtagatgtggtttgactatttctgtatgtctccatctattgatgagggtcttactcttttagtataaatagtaccgttaacttccaattaactagttttgacaacattcaaaaaagagtaataaacttcgccttaattttaataatcaacaccctcctagccttactactaataattattacattttgactaccacaactcaacggctacatagaaaaatccaccccttacgagtgcggcttcgaccctatatcccccgcccgcgtccctttctccataaaattcttcttagtagctattaccttcttattatttgatctagaaattgccctccttttacccctaccatgagccctacaaacaactaacctgccactaatagttatgtcatccctcttattaatcatcatcctagccctaagtctggcctatgagtgactacaaaaaggattagactgaaccgaattggtatatagtttaaacaaaacgaatgatttcgactcattaaattatgataatcatatttaccaaatgcccctcatttacataaatattatactagcatttaccatctcacttctaggaatactagtatatcgctcacacctcatatcctccctactatgcctagaaggaataatactatcgctgttcattatagctactctcataaccctcaacacccactccctcttagccaatattgtgcctattgccatactagtctttgccgcctgcgaagcagcggtgggcctagccctactagtctcaatctccaacacatatggcctagactacgtacataacctaaacctactccaatgctaaaactaatcgtcccaacaattatattactaccactgacatgactttccaaaaaacacataatttgaatcaacacaaccacccacagcctaattattagcatcatccctctactattttttaaccaaatcaacaacaacctatttagctgttccccaaccttttcctccgaccccctaacaacccccctcctaatactaactacctgactcctacccctcacaatcatggcaagccaacgccacttatccagtgaaccactatcacgaaaaaaactctacctctctatactaatctccctacaaatctccttaattataacattcacagccacagaactaatcatattttatatcttcttcgaaaccacacttatccccaccttggctatcatcacccgatgaggcaaccagccagaacgcctgaacgcaggcacatacttcctattctacaccctagtaggctcccttcccctactcatcgcactaatttacactcacaacaccctaggctcactaaacattctactactcactctcactgcccaagaactatcaaactcctgagccaacaacttaatatgactagcttacacaatagcttttatagtaaagatacctctttacggactccacttatgactccctaaagcccatgtcgaagcccccatcgctgggtcaatagtacttgccgcagtactcttaaaactaggcggctatggtataatacgcctcacactcattctcaaccccctgacaaaacacatagcctaccccttccttgtactatccctatgaggcataattataacaagctccatctgcctacgacaaacagacctaaaatcgctcattgcatactcttcaatcagccacatagccctcgtagtaacagccattctcatccaaaccccctgaagcttcaccggcgcagtcattctcataatcgcccacggacttacatcctcattactattctgcctagcaaactcaaactacgaacgcactcacagtcgcatcataatcctctctcaaggacttcaaactctactcccactaatagctttttgatgacttctagcaagcctcgctaacctcgccttaccccccactattaacctactgggagaactctctgtgctagtaaccacgttctcctgatcaaatatcactctcctacttacaggactcaacatactagtcacagccctatactccctctacatatttaccacaacacaatggggctcactcacccaccacattaacaacataaaaccctcattcacacgagaaaacaccctcatgttcatacacctatcccccattctcctcctatccctcaaccccgacatcattaccgggttttcctcttgtaaatatagtttaaccaaaacatcagattgtgaatctgacaacagaggcttacgaccccttatttaccgagaaagctcacaagaactgctaactcatgcccccatgtctaacaacatggctttctcaacttttaaaggataacagctatccattggtcttaggccccaaaaattttggtgcaactccaaataaaagtaataaccatgcacactactataaccaccctaaccctgacttccctaattccccccatccttaccaccctcgttaaccctaacaaaaaaaactcatacccccattatgtaaaatccattgtcgcatccacctttattatcagtctcttccccacaacaatattcatgtgcctagaccaagaagttattatctcgaactgatactgagccacaacccaaacaacccagctctccctaagcttcaaactagactacttctccataatattcatccctgtagcattgttcgttacatggtccatcatagaattctcactgtgatatataaactcagacccaaacattaatcagttcttcaaatatctactcattttcctaattaccatactaatcttagttaccgctaacaacctattccaactgttcatcggctgagagggcgtaggaattatatccttcttgctcatcagttgatgatacgcccgagcagatgccaacacagcagccattcaagcaatcctatacaaccgtatcggcgatatcggtttcatcctcgccttagcatgatttatcctacactccaactcatgagacccacaacaaatagcccttctaaacgctaatccaagcctcaccccactactaggcctcctcctagcagcagcaggcaaatcagcccaattaggtctccacccctgactcccctcagccatagaaggccccaccccagtctcagccctactccactcaagcactatagttgtagcaggaatcttcttactcatccgcttccaccccctagcagaaaatagcccactaatccaaactctaacactatgcttaggcgctatcaccactctgttcgcagcagtctgcgcccttacacaaaatgacatcaaaaaaatcgtagccttctccacttcaagtcaactaggactcataatagttacaatcggcatcaaccaaccacacctagcattcctgcacatctgtacccacgccttcttcaaagccatactatttatgtgctccgggtccatcatccacaaccttaacaatgaacaagatattcgaaaaataggaggactactcaaaaccatacctctcacttcaacctccctcaccattggcagcctagcattagcaggaatacctttcctcacaggtttctactccaaagaccacatcatcgaaaccgcaaacatatcatacacaaacgcctgagccctatctattactctcatcgctacctccctgacaagcgcctatagcactcgaataattcttctcaccctaacaggtcaacctcgcttccccacccttactaacattaacgaaaataaccccaccctactaaaccccattaaacgcctggcagccggaagcctattcgcaggatttctcattactaacaacatttcccccgcatcccccttccaaacaacaatccccctctacctaaaactcacagccctcgctgtcactttcctaggacttctaacagccctagacctcaactacctaaccaacaaacttaaaataaaatccccactatgcacattttatttctccaacatactcggattctaccctagcatcacacaccgcacaatcccctatctaggccttcttacgagccaaaacctgcccctactcctcctagacctaacctgactagaaaagctattacctaaaacaatttcacagcaccaaatctccacctccatcatcacctcaacccaaaaaggcataattaaactttacttcctctctttcttcttcccactcatcctaaccctactcctaatcacataacctattcccccgagcaatctcaattacaatatatacaccaacaaacaatgttcaaccagtaactactactaatcaacgcccataatcatacaaagcccccgcaccaataggatcctcccgaatcaaccctgacccctctccttcataaattattcagcttcctacactattaaagtttaccacaaccaccaccccatcatactctttcacccacagcaccaatcctacctccatcgctaaccccactaaaacactcaccaagacctcaacccctgacccccatgcctcaggatactcctcaatagccatcgctgtagtatatccaaagacaaccatcattccccctaaataaattaaaaaaactattaaacccatataacctcccccaaaattcagaataataacacacccgaccacaccgctaacaatcaatactaaacccccataaataggagaaggcttagaagaaaaccccacaaaccccattactaaacccacactcaacagaaacaaagcatacatcattattctcgcacggactacaaccacgaccaatgatatgaaaaaccatcgttgtatttcaactacaagaacaccaatgaccccaatacgcaaaattaaccccctaataaaattaattaaccactcattcatcgacctccccaccccatccaacatctccgcatgatgaaacttcggctcactccttggcgcctgcctgatcctccaaatcaccacaggactattcctagccatgcactactcaccagacgcctcaaccgccttttcatcaatcgcccacatcactcgagacgtaaattatggctgaatcatccgctaccttcacgccaatggcgcctcaatattctttatctgcctcttcctacacatcgggcgaggcctatattacggatcatttctctactcagaaacctgaaacatcggcattatcctcctgcttgcaactatagcaacagccttcataggctatgtcctcccgtgaggccaaatatcattctgaggggccacagtaattacaaacttactatccgccatcccatacattgggacagacctagttcaatgaatctgaggaggctactcagtagacagtcccaccctcacacgattctttacctttcacttcatcttgcccttcattattgcagccctagcagcactccacctcctattcttgcacgaaacgggatcaaacaaccccctaggaatcacctcccattccgataaaatcaccttccacccttactacacaatcaaagacgccctcggcttacttctcttccttctctccttaatgacattaacactattctcaccagacctcctaggcgacccagacaattataccctagccaaccccttaaacacccctccccacatcaagcccgaatgatatttcctattcgcctacacaattctccgatccgtccctaacaaactaggaggcgtccttgccctattactatccatcctcatcctagcaataatccccatcctccatatatccaaacaacaaagcataatatttcgcccactaagccaatcactttattgactcctagccgcagacctcctcattctaacctgaatcggaggacaaccagtaagctacccttttaccatcattggacaagtagcatccgtactatacttcacaacaatcctaatcctaataccaactatctccctaattgaaaacaaaatactcaaatgggcctgtccttgtagtataaactaatacaccagtcttgtaaaccggagatgaaaacctttttccaaggacaaatcagagaaaaagtctttaactccaccattagcacccaaagctaagattctaatttaaactattctctgttctttcatggggaagcagatttgggtaccacccaagtattgactcacccatcaacaaccgctatgtatttcgtacattactgccagtcaccatgaatattgtacggtaccataaatacttgaccacctgtagtacataaaaacccaatccacatcaaaaccccctccccatgcttacaagcaagtacagcaatcaaccttcaactatcacacatcaactgcaactccaaagccacccctcacccactaggatatcaacaaacctatccacccttaacagtacatagtacataaaaccatttaccgtacatagcacattacagtcaaatcccttctcgcccccatggatgacccccctcagataggggtcccttgaccaccatcctccgtgaaatcaatatcccgcacaagagtgctactctcctcgctccgggcccataacacttgggggtagctaaagtgaactgtatccgacatctggttcctacttcagggtcataaagcctaaatagcccacacgttccccttaaataagacatcacgatg

SEQ ID NO: 441 - DNA, 16571 bp, Homo sapiens mitochondrial
  3109: "n" refers to a nucleotide at position 3107 of the Cambridge Reference Sequence (CRS, Anderson et al. 1981 Nature 290:457-465), later determined to be absent from the human mtDNA sequence according to the revised CRS (rCRS, Andrews et al. 1999 Nature Genetics 23:147); "n" therefore represents a single nucleotide deletion at a position corresponding to nucleotide 3107 of SEQ ID NO:1 as provided herein.
gatcacaggtctatcaccctattaaccactcacgggagctctccatgcatttggtattttcgtctggggggtgtgcacgcgatagcattgcgagacgctggagccggagcaccctatgtcgcagtatctgtctttgattcctgccccatcccattatttatcgcacctacgttcaatattacaggcgaacatacttactaaagtgtgttaattaattaatgcttgtaggacataataataacaattgaatgtctgcacagccgctttccacacagacatcataacaaaaaatttccaccaaaccccccctcccccccgcttctggccacagcacttaaacacatctctgccaaaccccaaaaacaaagaaccctaacaccagcctaaccagatttcaaattttatcttttggcggtatgcacttttaacagtcaccccccaactaacacattattttcccctcccactcccatactactaatctcatcaatacaacccccgcccatcctacccagcacacacacaccgctgctaaccccataccccgaaccaaccaaaccccaaagacaccccccacagtttatgtagcttacctcctcaaagcaatacactgaaaatgtttagacgggctcacatcaccccataaacaaataggtttggtcctagcctttctattagctcttagtaagattacacatgcaagcatccccattccagtgagttcaccctctaaatcaccacgatcaaaagggacaagcatcaagcacgcagcaatgcagctcaaaacgcttagcctagccacacccccacgggaaacagcagtgattaacctttagcaataaacgaaagtttaactaagctatactaaccccagggttggtcaatttcgtgccagccaccgcggtcacacgattaacccaagtcaatagaagccggcgtaaagagtgttttagatcaccccctccccaataaagctaaaactcacctgagttgtaaaaaactccagttgacacaaaatagactacgaaagtggctttaacatatctgaacacacaatagctaagacccaaactgggattagataccccactatgcttagccctaaacctcaacagttaaatcaacaaaactgctcgccagaacactacgagccacagcttaaaactcaaaggacctggcggtgcttcatatccctctagaggagcctgttctgtaatcgataaaccccgatcaacctcaccacctcttgctcagcctatataccgccatcttcagcaaaccctgatgaaggctacaaagtaagcgcaagtacccacgtaaagacgttaggtcaaggtgtagcccatgaggtggcaagaaatgggctacattttctaccccagaaaactacgatagcccttatgaaacttaagggtcgaaggtggatttagcagtaaactgagagtagagtgcttagttgaacagggccctgaagcgcgtacacaccgcccgtcaccctcctcaagtatacttcaaaggacatttaactaaaacccctacgcatttatatagaggagacaagtcgtaacatggtaagtgtactggaaagtgcacttggacgaaccagagtgtagcttaacacaaagcacccaacttacacttaggagatttcaacttaacttgaccgctctgagctaaacctagccccaaacccactccaccttactaccagacaaccttagccaaaccatttacccaaataaagtataggcgatagaaattgaaacctggcgcaatagatatagtaccgcaagggaaagatgaaaaattatagccaagcataatatagcaaggactaacccctataccttctgcataatgaattaactagaaataactttgcaaggagagccaaagctaagacccccgaaaccagacgagctacctaagaacagctaaaagagcacacccgtctatgtagcaaaatagtgggaagatttataggtagaggcgacaaacctaccgagcctggtgatagctggttgtccaagatagaatcttagttcaactttaaatttgcccacagaaccctctaaatccccttgtaaatttaactgttagtccaaagaggaacagctctttggacactaggaaaaaaccttgtagagagagtaaaaaatttaacacccatagtaggcctaaaagcagccaccaattaagaaagcgttcaagctcaacacccactacctaaaaaatcccaaacatataactgaactcctcacacccaattggaccaatctatcaccctatagaagaactaatgttagtataagtaacatgaaaacattctcctccgcataagcctgcgtcagattaaaacactgaactgacaattaacagcccaatatctacaatcaaccaacaagtcattattaccctcactgtcaacccaacacaggcatgctcataaggaaaggttaaaaaaagtaaaaggaactcggcaaatcttaccccgcctgtttaccaaaaacatcacctctagcatcaccagtattagaggcaccgcctgcccagtgacacatgtttaacggccgcggtaccctaaccgtgcaaaggtagcataatcacttgttccttaaatagggacctgtatgaatggctccacgagggttcagctgtctcttacttttaaccagtgaaattgacctgcccgtgaagaggcgggcatgacacagcaagacgagaagaccctatggagctttaatttattaatgcaaacagtacctaacaaacccacaggtcctaaactaccaaacctgcattaaaaatttcggttggggcgacctcggagcagaacccaacctccgagcagtacatgctaagacttcaccagtcaaagcgaactactatactcaattgatccaataacttgaccaacggaacaagttaccctagggataacagcgcaatcctattctagagtccatatcaacaatagggtttacgacctcgatgttggatcaggacatcccgatggtgcagccgctattaaaggttcgtttgttcaacgattaaagtcctacgtgatctgagttcagaccggagtaatccaggtcggtttctatctacnttcaaattcctccctgtacgaaaggacaagagaaataaggcctacttcacaaagcgccttcccccgtaaatgatatcatctcaacttagtattatacccacacccacccaagaacagggtttgttaagatggcagagcccggtaatcgcataaaacttaaaactttacagtcagaggttcaattcctcttcttaacaacatacccatggccaacctcctactcctcattgtacccattctaatcgcaatggcattcctaatgcttaccgaacgaaaaattctaggctatatacaactacgcaaaggccccaacgttgtaggcccctacgggctactacaacccttcgctgacgccataaaactcttcaccaaggagcccctaaaacccgccacatctaccatcaccctctacatcaccgccccgaccttagctctcaccatcgctcttctactatgaacccccctccccatacccaaccccctggtcaacctcaacctaggcctcctatttattctagccacctctagcctagccgtttactcaatcctctgatcagggtgagcatcaaactcaaactacgccctgatcggcgcactgcgagcagtagcccaaacaatctcatatgaagtcaccctagccatcattctactatcaacattactaataagtggctcctttaacctctccacccttatcacaacacaagaacacctctgattactcctgccatcatgacccttggccataatatgatttatctccacactagcagagaccaaccgaacccccttcgaccttgccgaaggggagtccgaactagtctcaggcttcaacatcgaatacgccgcaggccccttcgccctattcttcatagccgaatacacaaacattattataataaacaccctcaccactacaatcttcctaggaacaacatatgacgcactctcccctgaactctacacaacatattttgtcaccaagaccctacttctaacctccctgttcttatgaattcgaacagcatacccccgattccgctacgaccaactcatacacctcctatgaaaaaacttcctaccactcaccctagcattacttatatgatatgtctccatacccattacaatctccagcattccccctcaaacctaagaaatatgtctgataaaagagttactttgatagagtaaataataggagcttaaacccccttatttctaggactatgagaatcgaacccatccctgagaatccaaaattctccgtgccacctatcacaccccatcctaaagtaaggtcagctaaataagctatcgggcccataccccgaaaatgttggttatacccttcccgtactaattaatcccctggcccaacccgtcatctactctaccatctttgcaggcacactcatcacagcgctaagctcgcactgattttttacctgagcaggcctagaaataaacatgctagcttttattccagttctaaccaaaaaaataaaccctcgttccacagaagctgccatcaagtatttcctcacgcaagcaaccgcatccataatccttctaatagctatcctcttcaacaatatactctccggacaatgaaccataaccaatactaccaatcaatactcatcattaataatcataatggctatagcaataaaactaggaatagccccctttcacttctgagtcccagaggttacccaaggcacccctctgacatccggcctgcttcttctcacatgacaaaaactagcccccatctcaatcatataccaaatctctccctcactaaacgtaagccttctcctcactctctcaatcttatccatcatagcaggcagttgaggtggattaaaccaaacccagctacgcaaaatcttagcatactcctcaattacccacataggatgaataatagcagttctaccgtacaaccctaacataaccattcttaatttaactatttatattatcctaactactaccgcattcctactactcaacttaaactccagcaccacgaccctactactatctcgcacctgaaacaagctaacatgactaacacccttaattccatccaccctcctctccctaggaggcctgcccccgctaaccggctttttgcccaaatgggccattatcgaagaattcacaaaaaacaatagcctcatcatccccaccatcatagccaccatcaccctccttaacctctacttctacctacgcctaatctactccacctcaatcacactactccccatatctaacaacgtaaaaataaaatgacagtttgaacatacaaaacccaccccattcctccccacactcatcgcccttaccacgctactcctacctatctccccttttatactaataatcttatagaaatttaggttaaatacagaccaagagccttcaaagccctcagtaagttgcaatacttaatttctgtaacagctaaggactgcaaaaccccactctgcatcaactgaacgcaaatcagccactttaattaagctaagcccttactagaccaatgggacttaaacccacaaacacttagttaacagctaagcaccctaatcaactggcttcaatctacttctcccgccgccgggaaaaaaggcgggagaagccccggcaggtttgaagctgcttcttcgaatttgcaattcaatatgaaaatcacctcggagctggtaaaaagaggcctaacccctgtctttagatttacagtccaatgcttcactcagccattttacctcacccccactgatgttcgccgaccgttgactattctctacaaaccacaaagacattggaacactatacctattattcggcgcatgagctggagtcctaggcacagctctaagcctccttattcgagccgagctgggccagccaggcaaccttctaggtaacgaccacatctacaacgttatcgtcacagcccatgcatttgtaataatcttcttcatagtaatacccatcataatcggaggctttggcaactgactagttcccctaataatcggtgcccccgatatggcgtttccccgcataaacaacataagcttctgactcttacctccctctctcctactcctgctcgcatctgctatagtggaggccggagcaggaacaggttgaacagtctaccctcccttagcagggaactactcccaccctggagcctccgtagacctaaccatcttctccttacacctagcaggtgtctcctctatcttaggggccatcaatttcatcacaacaattatcaatataaaaccccctgccataacccaataccaaacgcccctcttcgtctgatccgtcctaatcacagcagtcctacttctcctatctctcccagtcctagctgctggcatcactatactactaacagaccgcaacctcaacaccaccttcttcgaccccgccggaggaggagaccccattctataccaacacctattctgatttttcggtcaccctgaagtttatattcttatcctaccaggcttcggaataatctcccatattgtaacttactactccggaaaaaaagaaccatttggatacataggtatggtctgagctatgatatcaattggcttcctagggtttatcgtgtgagcacaccatatatttacagtaggaatagacgtagacacacgagcatatttcacctccgctaccataatcatcgctatccccaccggcgtcaaagtatttagctgactcgccacactccacggaagcaatatgaaatgatctgctgcagtgctctgagccctaggattcatctttcttttcaccgtaggtggcctgactggcattgtattagcaaactcatcactagacatcgtactacacgacacgtactacgttgtagctcacttccactatgtcctatcaataggagctgtatttgccatcataggaggcttcattcactgatttcccctattctcaggctacaccctagaccaaacctacgccaaaatccatttcactatcatattcatcggcgtaaatctaactttcttcccacaacactttctcggcctatccggaatgccccgacgttactcggactaccccgatgcatacaccacatgaaacatcctatcatctgtaggctcattcatttctctaacagcagtaatattaataattttcatgatttgagaagccttcgcttcgaagcgaaaagtcctaatagtagaagaaccctccataaacctggagtgactatatggatgccccccaccctaccacacattcgaagaacccgtatacataaaatctagacaaaaaaggaaggaatcgaaccccccaaagctggtttcaagccaaccccatggcctccatgactttttcaaaaaggtattagaaaaaccatttcataactttgtcaaagttaaattataggctaaatcctatatatcttaatggcacatgcagcgcaagtaggtctacaagacgctacttcccctatcatagaagagcttatcacctttcatgatcacgccctcataatcattttccttatctgcttcctagtcctgtatgcccttttcctaacactcacaacaaaactaactaatactaacatctcagacgctcaggaaatagaaaccgtctgaactatcctgcccgccatcatcctagtcctcatcgccctcccatccctacgcatcctttacataacagacgaggtcaacgatccctcccttaccatcaaatcaattggccaccaatggtactgaacctacgagtacaccgactacggcgggctaatcttcaactcctacatacttcccccattattcctagaaccaggcgacctgcgactccttgacgttgacaatcgagtagtactcccgattgaagcccccattcgtataataattacatcacaagacgtcttgcactcatgagctgtccccacattaggcttaaaaacagatgcaattcccggacgtctaaaccaaaccactttcaccgctacacgaccgggggtatactacggtcaatgctctgaaatctgtggagcaaaccacagtttcatgcccatcgtcctagaattaattcccctaaaaatctttgaaatagggcccgtatttaccctatagcaccccctctaccccctctagagtccactgtaaagctaacttagcattaaccttttaagttaaagattaagagaaccaacacctctttacagtgaaatgccccaactaaatactaccgtatggcccaccataattacccccatactccttacactattcctcatcacccaactaaaaatattaaacacaaactaccacctacctccctcaccaaagcccataaaaataaaaaattataacaaaccctgagaaccaaaatgaacgaaaatctgttcgcttcattcattgcccccacaatcctaggcctacccgccgcagtactgatcattctatttccccctctattgatccccacctccaaatatctcatcaacaaccgactaatcaccacccaacaatgactaatcaaactaacctcaaaacaaatgataaccatacacaacactaaaggacgaacctgatctcttatactagtatccttaatcatttttattgccacaactaacctcctcggactcctgcctcactcatttacaccaaccacccaactatctataaacctagccatggccatccccttatgagcgggcgcagtgattataggctttcgctctaagattaaaaatgccctagcctacttcttaccacaaggcacacctacaccccttatccccatactagttattatcgaaaccatcagcctactcattcaaccaatagccctggccgtacgcctaaccgctaacattactgcaggccacctactcatgcacctaattggaagcaccaccctagcaatatcaaccattaaccttccctctacacttatcatcttcacaattctaattctactgactatcctagaaatcgctgtcgccttaatccaagcctacgttttcacacttctagtaagcctctacctgcacgacaacacataatgacccaccaatcacatgcctatcatatagtaaaacccagcccatgacccctaacaggggccctctcagccctcctaatgacctccggcctagccatgtgatttcacttccactccataacgctcctcatactaggcctactaaccaacacactaaccatataccaatgatggcgcgatgtaacacgagaaagcacataccaaggccaccacacaccacctgtccaaaaaggccttcgatacgggataatcctatttattacctcagaagtttttttcttcgcaggatttttctgagccttttaccactccagcctagcccctaccccccaattaggagggcactggcccccaacaggcatcaccccgctaaatcccctagaagtcccactcctaaacacatccgtattactcgcatcaggagtatcaatcacctgagctcaccatagtctaatagaaaacaaccgaaaccaaataattcaagcactgctcattacaattttactgggcctctattttaccctcctacaagcctcagagtacttcgagtctcccttcaccatttccgacggcatctacggctcaacattttttgtagccacaggcttccacggacttcacgtcattattggctcaactttcctcactatctgcttcatccgccaactaatatttcactttacatccaaacatcactttggcttcgaagccgccgcctgatactggcattttgtagatgtggtttgactatttctgtatgtctccatctattgatgagggtcttactcttttagtataaatagtaccgttaacttccaattaactagttttgacaacattcaaaaaagagtaataaacttcgccttaattttaataatcaacaccctcctagccttactactaataattattacattttgactaccacaactcaacggctacatagaaaaatccaccccttacgagtgcggcttcgaccctatatcccccgcccgcgtccctttctccataaaattcttcttagtagctattaccttcttattatttgatctagaaattgccctccttttacccctaccatgagccctacaaacaactaacctgccactaatagttatgtcatccctcttattaatcatcatcctagccctaagtctggcctatgagtgactacaaaaaggattagactgaaccgaattggtatatagtttaaacaaaacgaatgatttcgactcattaaattatgataatcatatttaccaaatgcccctcatttacataaatattatactagcatttaccatctcacttctaggaatactagtatatcgctcacacctcatgtcctccctactatgcctagaaggaataatactatcgctgttcattatagctactctcataaccctcaacacccactccctcttagccaatattgtgcctattgccatactagtctttgccgcctgcgaagcagcggtgggcctagccctactagtctcaatctccaacacatatggcctagactacgtacataacctaaacctactccaatgctaaaactaatcgtcccaacaattatattactaccactgacatgactttccaaaaaacacataatttgaatcaacacaaccacccacagcctaattattagcatcatccctctactattttttaaccaaatcaacaacaacctatttagctgttccccaaccttttcctccgaccccctaacaacccccctcctaatactaactacctgactcctacccctcacaatcatggcaagccaacgccacttatccagtgaaccactatcacgaaaaaaactctacctctctatactaatctccctacaaatctccttaattataacattcacagccacagaactaatcatattttatatcttcttcgaaaccacacttatccccaccttggctatcatcacccgatgaggcaaccagccagaacgcctgaacgcaggcacatacttcctattctacaccctagtaggctcccttcccctactcatcgcactaatttacactcacaacaccctaggctcactaaacattctactactcaccctcactgcccaagaactatcaaactcctgagccaacaacttaatatgactagcttacacaatagcttttatagtaaagatacctctttacggactccacttatgactccctaaagcccatgtcgaagcccccatcgctgggtcaatagtacttgccgcagtactcttgaaactaggcggctatggtataatacgcctcacactcattctcaaccccctgacaaaacacatagcctaccccttccttgtactatccctatgaggcataattataacaagctccatctgcctacgacaaacagacctaaaatcgctcattgcatactcttcaatcagccacatagccctcgtagtaacagccattctcatccaaaccccctgaagcttcaccggcgcagtcattctcataatcgcccacggacttacatcctcattactattctgcctagcaaactcaaactacgaacgcactcacagtcgcatcataatcctctctcaaggacttcaaactctactcccactaatagctttttgatgacttctagcaagcctcgctaacctcgccttaccccccactattaacctactgggagaactctctgtgctagtaaccacgttctcctgatcaaatatcactctcctacttacaggactcaacatactagtcacagccctatactccctctacatatttaccacaacacaatggggctcactcacccaccacattaacaacataaaaccctcattcacacgagaaaacaccctcatgttcatacacctatcccccattctcctcctatccctcaaccccgacatcattaccgggttttcctcttgtaaatatagtttaaccaaaacatcagattgtgaatctgacaacagaggcttacgaccccttatttaccgagaaagctcacaagaactgctaactcatgcccccatgtctaacaacatggctttctcaacttttaaaggataacagctatccattggtcttaggccccaagaattttggtgcaactccaaataaaagtaataaccatgcacactactataaccaccctaaccctaacttccctaattccccccatccttaccaccctcgttaaccctaacaaaaaaaactcatacccccattatgtaaaatccattgtcgcatccacctttattatcagtctcttccccacaacaatattcatgtgcctagaccaagaagttattatctcgaactgacactgagccacaacccaaacaacccagctctccctaagcttcaaactagactacttctccataatattcatccctgtagcattgttcgttacatggtccatcatagaattctcactgtgatatataaactcagacccaaacattaatcagttcttcaaatatctactcatcttcctaattaccatactaatcttagttaccgctaacaacctattccaactgttcatcggctgagagggcgtaggaattatatccttcttgctcatcagttgatgatacgcccgagcagatgccaacacagcagccattcaagcaatcctatacaaccgtatcggcgatatcggtttcatcctcgccttagcatgatttatcctacactccaactcatgagacccacaacaaatagcccttctaaacgctaatccaagcctcaccccactactaggcctcctcctagcagcagcaggcaaatcagcccaattaggtctccacccctgactcccctcagccatagaaggccccaccccagtctcagccctactccactcaagcactatagttgtagcaggaatcttcttactcatccgcttccaccccctagcagaaaatagcccactaatccaaactctaacactatgcttaggcgctatcaccactctgttcgcagcagtctgcgcccttacacaaaatgacatcaaaaaaatcgtagccttctccacttcaagtcaactaggactcataatagttacaatcggcatcaaccaaccacacctagcattcctgcacatctgtacccacgccttcttcaaagccatactatttatgtgctccgggtccatcatccacaaccttaacaatgaacaagatattcgaaaaataggaggactactcaaaaccatacctctcacttcaacctccctcaccattggcagcctagcattagcaggaatacctttcctcacaggtttctactccaaagaccacatcatcgaaaccgcaaacatatcatacacaaacgcctgagccctatctattactctcatcgctacctccctgacaagcgcctatagcactcgaataattcttctcaccctaacaggtcaacctcgcttccccacccttactaacattaacgaaaataaccccaccctactaaaccccattaaacgcctggcagccggaagcctattcgcaggatttctcattactaacaacatttcccccgcatcccccttccaaacaacaatccccctctacctaaaactcacagccctcgctgtcactttcctaggacttctaacagccctagacctcaactacctaaccaacaaacttaaaataaaatccccactatgcacattttatttctccaacatactcggattctaccctagcatcacacaccgcacaatcccctatctaggccttcttacgagccaaaacctgcccctactcctcctagacctaacctgactagaaaagctattacctaaaacaatttcacagcaccaaatctccacctccatcatcacctcaacccaaaaaggcataattaaactttacttcctctctttcttcttcccactcatcctaaccctactcctaatcacataacctattcccccgagcaatttcaattacaatatatacaccaacaaacaatgttcaaccagtaactactactaatcaacgcccataatcatacaaagcccccgcaccaataggatcctcccgaatcaaccctgacccctctccttcataaattattcagcttcctacactattaaagtttaccacaaccaccaccccatcatactctttcacccacagcaccaatcctacctccatcgctaaccccactaaaacactcaccaagacctcaacccctgacccccatgcctcaggatactcctcaatagccatcgctgtagtatatccaaagacaaccatcattccccctaaataaattaaaaaaactattaaacccatataacctcccccaaaattcagaataataacacacccgaccacaccgctaacaatcaatactaaacccccataaataggagaaggcttagaagaaaaccccacaaaccccattactaaacccacactcaacagaaacaaagcatacatcattattctcgcacggactacaaccacgaccaatgatatgaaaaaccatcgttgtatttcaactacaagaacaccaatgaccccaatacgcaaaattaaccccctaataaaattaattaaccactcactcatcgacctccccaccccatccaacatctccgcatgatgaaacttcggctcactccttggcgcctgcctgatcctccaaatcaccacaggactattcctagccatgcactactcaccagacgcctcaaccgccttttcatcaatcgcccacatcactcgagacgtaaattatggctgaatcatccgctaccttcacgccaatggcgcctcaatattctttatctgcctcttcctacacatcgggcgaggcctatattacggatcatttctctactcagaaacctgaaacatcggcattatcctcctgcttgcaactatagcaacagccttcataggctatgtcctcccgtgaggccaaatatcattctgaggggccacagtaattacaaacttactatccgccatcccatacattgggacagacctagttcaatgaatctgaggaggctactcagtagacagtcccaccctcacacgattctttacctttcacttcatcttgcccttcattattgcagccctagcggcactccacctcctattcttgcacgaaacgggatcaaacaaccccctaggaatcacctcccattccgataaaatcaccttccacccttactacacaatcaaagacgccctcggcttacttctcttccttctctccttaatgacattaacactattctcaccagacctcctaggcgacccagacaattataccctagccaaccccttaaacacccctccccacatcaagcccgaatgatatttcctattcgcctacacaattctccgatccgtccctaacaaactaggaggcgtccttgccctattactatccatcctcatcctagcgataatccccatcctccatatatccaaacaacaaagcataatatttcgcccactaagccaatcactttattgactcctagccgcagacctcctcattctaacctgaatcggaggacaaccagtaagctacccttttaccatcattggacaagtagcatccgtactatacttcacaacaatcctaatcctaataccaactatctccctaattgaaaacaaaatactcaaatgggcctgtccttgtagtataaactaatacaccagtcttgtaaaccggagatgaaaacctttttccaaggacaaatcagagaaaaagtctttaactccaccattagcacccaaagctaagattctaatttaaactattctctgttctttcatggggaagcagatttgggtaccacccaagtattgactcacccatcaacaaccgctatgtatttcgtacattactgccagccaccatgaatattgtacggtaccataaatacttgaccacctgtagtacataaaaacccaatccacatcaaaaccccctccccatgcttacaagcaagtacagcaatcaacccccaactatcacacatcaactgcaactccaaagccacccctcacccactaggataccaacaaacctacccacccttaacagtacatagcacataaagccatttaccgtacatagcacattacagtcaaatcccttctcgtccccatggatgacccccctcagataggggtcccttgaccaccatcctccgtgaaatcaatatcccgcacaagagtgctactctcctcgctccgggcccataacacttgggggtagctaaagtgaactgtatccgacatctggttcctacttcagggccataaagcctaaatagcccacacgttccccttaaataagacatcacgatg

SEQ ID NO: 442 - DNA, 16568 bp, Homo sapiens mitochondrial
  3106: "n" refers to a nucleotide at position 3107 of the Cambridge Reference Sequence (CRS, Anderson et al. 1981 Nature 290:457-465), later determined to be absent from the human mtDNA sequence according to the revised CRS (rCRS, Andrews et al. 1999 Nature Genetics 23:147); "n" therefore represents a single nucleotide deletion at a position corresponding to nucleotide 3107 of SEQ ID NO:1 as provided herein.
gatcacaggtctatcaccctattaaccactcacgggagctctccatgcatttggtattttcgtctggggggtatgcacgcgatagcattgcgagacgctggagccggagcaccctatgtcgcagtatctgtctttgattcctgcctcatcctattatttatcgcacctacgttcaatattacaggcgaacatacttactaaagtgtgttaattaattaatgcttgtaggacataataataacaattgaatgtctgcacagccgctttccacacagacatcataacaaaaaatttccaccaaaccccccctcccccgccttctggccacagcacttaaacacatctctgccaaaccccaaaaacaaagaaccctaacaccagcctaaccagatttcaaattttatcttttggcggtatgcacttttaacagtcaccccccaactaacacattattttcccctcccactcccatactactaatctcatcaatacaacccccgcccatcctacccagcacacacaccgctgctaaccccataccccgaaccaaccaaaccccaaagacaccccccacagtttatgtagcttacctcctcaaagcaatacactgaaaatgtttagacgggctcacatcaccccataaacaaataggtttggtcctagcctttctattagctcttagtaagattacacatgcaagcatccccgttccagtgagttcaccctctaaatcaccacgatcaaaagggacaagcatcaagcacgcagcaatgcagctcaaaacgcttagcctagccacacccccacgggaaacagcagtgattaacctttagcaataaacgaaagtttaactaagctatactaaccccagggttggtcaatttcgtgccagccaccgcggtcacacgattaacccaagtcaatagaagccggcgtaaagagtgttttagatcaccccctccccaataaagctaaaactcacctgagttgtaaaaaactccagttgacacaaaatagactacgaaagtggctttaacatatctgaacacacaatagctaagacccaaactgggattagataccccactatgcttagccctaaacctcaacagttaaatcaacaaaactgctcgccagaacactacgagccacagcttaaaactcaaaggacctggcggtgcttcatatccctctagaggagcctgttctgtaatcgataaaccccgatcaacctcaccacctcttgctcagcctatataccgccatcttcagcaaaccctgatgaaggctacaaagtaagcgcaagtacccacgtaaagacgttaggtcaaggtgtagcccatgaggtggcaagaaatgggctacattttctaccccagaaaactacgatagcccttatgaaacttaagggtcgaaggtggatttagcagtaaactgagagtagagtgcttagttgaacagggccctgaagcgcgtacacaccgcccgtcaccctcctcaagtatacttcaaaggacatttaactaaaacccctacgcatttatatagaggagacaagtcgtaacatggtaagtgtactggaaagtgcacttggacgaaccagagtgtagcttaacacaaagcacccaacttacacttaggagatttcaacttaacttgaccgctctgagctaaacctagccccaaacccactccaccttactaccagacaaccttagccaaaccatttacccaaataaagtataggcgatagaaattgaaacctggcgcaatagatatagtaccgcaagggaaagatgaaaaattataaccaagcataatatagcaaggactaacccctataccttctgcataatgaattaactagaaataactttgcaaggagagccaaagctaagacccccgaaaccagacgagctacctaagaacagctaaaagagcacacccgtctatgtagcaaaatagtgggaagatttataggtagaggcgacaaacctaccgagcctggtgatagctggttgtccaagatagaatcttagttcaactttaaatttgcccacagaaccctctaaatccccttgtaaatttaactgttagtccaaagaggaacagctctttggacactaggaaaaaaccttgtagagagagtaaaaaatttaacacccatagtaggcctaaaagcagccaccaattaagaaagcgttcaagctcaacacccactacctaaaaaatcccaaacatataactgaactcctcacacccaattggaccaatctatcaccctatagaagaactaatgttagtataagtaacatgaaaacattctcctccgcataagcctgcgtcagattaaaacactgaactgacaattaacagcccaatatctacaatcaaccaacaagtcattattaccctcactgtcaacccaacacaggcatgctcataaggaaaggttaaaaaaagtaaaaggaactcggcaaatcttaccccgcctgtttaccaaaaacatcacctctagcatcaccagtattagaggcaccgcctgcccagtgacacatgtttaacggccgcggtaccctaaccgtgcaaaggtagcataatcacttgttccttaaatagggacctgtatgaatggctccacgagggttcagctgtctcttacttttaaccagtgaaattgacctgcccgtgaagaggcgggcataacacagcaagacgagaagaccctatggagctttaatttattaatgcaaacagtacctaacaaacccacaggtcctaaactaccaaacctgcattaaaaatttcggttggggcgacctcggagcagaacccaacctccgagcagtacatgctaagacttcaccagtcaaagcgaactactatactcaattgatccaataacttgaccaacggaacaagttaccctagggataacagcgcaatcctattctagagtccatatcaacaatagggtttacgacctcgatgttggatcaggacatcccaatggtgcagccgctattaaaggttcgtttgttcaacgattaaagtcctacgtgatctgagttcagaccggagtaatccaggtcggtttctatctacnttcaaattcctccctgtacgaaaggacaagagaaataaggcctacttcacaaagcgccttcccccgtaaatgatatcatctcaacttagtattatacccacacccacccaagaacagggtttgttaagatggcagagcccggtaatcgcataaaacttaaaactttacagtcagaggttcaattcctcttcttaacaacatacccatggccaacctcctactcctcattgtacccattctaatcgcaatggcattcctaatgcttaccgaacgaaaaattctaggctatatacaactacgcaaaggccccaacgttgtaggcccctacgggctactacaacccttcgctgacgccataaaactcttcaccaaagagcccctaaaacccgccacatctaccatcaccctctacatcaccgccccgaccttagctctcaccatcgctcttctactatgaacccccctccccatacccaaccccctggtcaacctcaacctaggcctcctatttattctagccacctctagcctagccgtttactcaatcctctgatcagggtgagcatcaaactcaaactacgccctgatcggcgcactgcgagcagtagcccaaacaatctcatatgaagtcaccctagccatcattctactatcaacattactaataagtggctcctttaacctctccgcccttatcacaacacaagaacacctctgattactcctgccatcatgacccttggccataatatgatttatctccacactagcagagaccaaccgaacccccttcgaccttgccgaaggggagtccgaactagtctcaggcttcaacatcgaatacgccgcaggccccttcgccctattcttcatagccgaatacacaaacattattataataaacaccctcaccactacaatcttcctaggaacaacatatgacgcactctcccctgaactctacacaacatattttgtcaccaagaccctacttctaacctccctgttcttatgaattcgaacagcatacccccgattccgctacgaccaactcatacacctcctatgaaaaaacttcctaccactcaccctagcattacttatatgatatgtctccatacccattacaatctccagcattccccctcaaacctaagaaatatgtctgataaaagagttactttgatagagtaaataataggagcttaaacccccttatttctaggactatgagaatcgaacccatccctgagaatccaaaattctccgtgccacctatcacaccccatcctaaagtaaggtcagctaaataagctatcgggcccataccccgaaaatgttggttatacccttcccgtactaattaatcccctggcccaacccgtcatctactctaccatctttgcaggcacactcatcacagcgctaagctcgcactgattttttacctgagtaggcctagaaataaacatgctagcttttattccagttctaaccaaaaaaataaaccctcgttccacagaagctgccatcaagtatttcctcacgcaagcaaccgcatccataatccttctaatagctatcctcttcaacaatatactctccggacaatgaaccataaccaatactaccaatcaatactcatcattaataatcataatggctatagcaataaaactaggaatagccccctttcacttctgagtcccagaggttacccaaggcacccctctgacatccggcctgcttcttctcacatgacaaaaactagcccccatctcaatcatataccaaatctctccctcactaaacgtaagccttctcctcactctctcaatcttatccatcatagcaggcagttgaggtggattaaaccaaacccagctacgcaaaatcttagcatactcctcaattacccacataggatgaataatagcagttctaccgtacaaccctaacataaccattcttaatttaactatttatattatcctaactactaccgcattcctactactcaacttaaactccagcaccacgaccctactactatctcgcacctgaaacaagctaacatgactaacacccttaattccatccaccctcctctccctaggaggcctgcccccgctaaccggctttttgcccaaatgggccattatcgaagaattcacaaaaaacaatagcctcatcatccccaccatcatagccaccatcaccctccttaacctctacttctacctacgcctaatctactccacctcaatcacactactccccatatctaacaacgtaaaaataaaatgacagtttgaacatacaaaacccaccccattcctccccacactcatcgcccttaccacgctactcctacctatctccccttttatactaataatcttatagaaatttaggttaaatacagaccaagagccttcaaagccctcagtaagttgcaatacttaatttctgtaacagctaaggactgcaaaaccccactctgcatcaactgaacgcaaatcagccactttaattaagctaagcccttactagaccaatgggacttaaacccacaaacacttagttaacagctaagcaccctaatcaactggcttcaatctacttctcccgccgccgggaaaaaaggcgggagaagccccggcaggtttgaagctgcttcttcgaatttgcaattcaatatgaaaatcacctcggagctggtaaaaagaggcctaacccctgtctttagatttacagtccaatgcttcactcagccattttacctcacccccactgatgttcgccgaccgttgactattctctacaaaccacaaagacattggaacactatacctattattcggcgcatgagctggagtcctaggcacagctctaagcctccttattcgagccgagctgggccagccaggcaaccttctaggtaacgaccacatctacaacgttatcgtcacagcccatgcatttgtaataatcttcttcatagtaatacccatcataatcggaggctttggcaactgactagttcccctaataatcggtgcccccgatatggcgtttccccgcataaacaacataagcttctgactcttacctccctctctcctactcctgctcgcatctgctatagtggaggccggagcaggaacaggttgaacagtctaccctcccttagcagggaactactcccaccctggagcctccgtagacctaaccatcttctccttacacctagcaggtgtctcctctatcttaggggccatcaatttcatcacaacaattatcaatataaaaccccctgccataacccaataccaaacgcccctcttcgtctgatccgtcctaatcacagcagtcctacttctcctatctctcccagtcctagctgctggcatcactatactactaacagaccgcaacctcaacaccaccttcttcgaccccgccggaggaggagaccccattctataccaacacctattctgatttttcggtcaccctgaagtttatattcttatcctaccaggcttcggaataatctcccatattgtaacttactactccggaaaaaaagaaccatttggatacataggtatggtctgagctatgatatcaattggcttcctagggtttatcgtgtgagcacaccatatatttacagtaggaatagacgtagacacacgagcatatttcacctccgctaccataatcatcgctatccccaccggcgtcaaagtatttagctgactcgccacactccacggaagcaatatgaaatgatctgctgcagtgctctgagccctaggattcatctttcttttcaccgtaggtggcctgactggcattgtattagcaaactcatcactagacatcgtactacacgacacgtactacgttgtagcccacttccactatgtcctatcaataggagctgtatttgccatcataggaggcttcattcactgatttcccctattctcaggctacaccctagaccaaacctacgccaaaatccatttcactatcatattcatcggcgtaaatctaactttcttcccacaacactttctcggcctatccggaatgccccgacgttactcggactaccccgatgcatacaccacatgaaacatcctatcatctgtaggctcattcatttctctaacagcagtaatattaataattttcatgatttgagaagccttcgcttcgaagcgaaaagtcctaatagtagaagaaccctccataaacctggagtgactatatggatgccccccaccctaccacacattcgaagaacccgtatacataaaatctagacaaaaaaggaaggaatcgaaccccccaaagctggtttcaagccaaccccatggcctccatgactttttcaaaaaggtattagaaaaaccatttcataactttgtcaaagttaaattataggctaaatcctatatatcttaatggcacatgcagcgcaagtaggtctacaagacgctacttcccctatcatagaagagcttatcacctttcatgatcacgccctcataatcattttccttatctgcttcctagtcctgtatgcccttttcctaacactcacaacaaaactaactaatactaacatctcagacgctcaggaaatagaaaccgtctgaactatcctgcccgccatcatcctagtcctcatcgccctcccatccctacgcatcctttacataacagacgaggtcaacgatccctcccttaccatcaaatcaattggccaccaatggtactgaacctacgagtacaccgactacggcggactaatcttcaactcctacatacttcccccattattcctagaaccaggcgacctgcgactccttgacgttgacaatcgagtagtactcccgattgaagcccccattcgtataataattacatcacaagacgtcttgcactcatgagctgtccccacattaggcttaaaaacagatgcaattcccggacgtctaaaccaaaccactttcaccgctacacgaccgggggtatactacggtcaatgctctgaaatctgtggagcaaaccacagtttcatgcccatcgtcctagaattaattcccctaaaaatctttgaaatagggcccgtatttaccctatagcaccccctctaccccctctagagcccactgtaaagctaacttagcattaaccttttaagttaaagattaagagaaccaacacctctttacagtgaaatgccccaactaaatactaccgtatggcccaccataattacccccatactccttacactattcctcatcacccaactaaaaatattaaacacaaactaccacctacctccctcaccaaagcccataaaaataaaaaattataacaaaccctgagaaccaaaatgaacgaaaatctgttcgcttcattcattgcccccacaatcctaggcctacccgccgcagtactgatcattctatttccccctctattgatccccacctccaaatatctcatcaacaaccgactaatcaccacccaacaatgactaatcaaactaacctcaaaacaaatgataaccatacacaacactaaaggacgaacctgatctcttatactagtatccttaatcatttttattgccacaactaacctcctcggactcctgcctcactcatttacaccaaccacccaactatctataaacctagccatggccatccccttatgagcgggcgcagtgattataggctttcgctctaagattaaaaatgccctagcccacttcttaccacaaggcacacctacaccccttatccccatactagttattatcgaaaccatcagcctactcattcaaccaatagccctggccgtacgcctaaccgctaacattactgcaggccacctactcatgcacctaattggaagcgccaccctagcaatatcaaccattaaccttccctctacacttatcatcttcacaattctaattctactgactatcctagaaatcgctgtcgccttaatccaagcctacgttttcacacttctagtaagcctctacctgcacgacaacacataatgacccaccaatcacatgcctatcatatagtaaaacccagcccatgacccctaacaggggccctctcagccctcctaatgacctccggcctagccatgtgatttcacttccactccataacgctcctcatactaggcctactaaccaacacactaaccatataccaatgatggcgcgatgtaacacgagaaagcacataccaaggccaccacacaccacctgtccaaaaaggccttcgatacgggataatcctatttattacctcagaagtttttttcttcgcaggatttttctgagccttttaccactccagcctagcccctaccccccaattaggagggcactggcccccaacaggcatcaccccgctaaatcccctagaagtcccactcctaaacacatccgtattactcgcatcaggagtatcaatcacctgagctcaccatagtctaatagaaaacaaccgaaaccaaataattcaagcactgcttattacaattttactgggtctctattttaccctcctacaagcctcagagtacttcgagtctcccttcaccatttccgacggcatctacggctcaacattttttgtagccacaggcttccacggacttcacgtcattattggctcaactttcctcactatctgcttcatccgccaactaatatttcactttacatccaaacatcactttggcttcgaagccgccgcctgatactggcattttgtagatgtggtttgactatttctgtatgtctccatctattgatgagggtcttactcttttagtataaatagtaccgttaacttccaattaactagttttgacaacattcaaaaaagagtaataaacttcgccttaattttaataatcaacaccctcctagccttactactaataattattacattttgactaccacaactcaacggctacatagaaaaatccaccccttacgagtgcggcttcgaccctatatcccccgcccgcgtccctttctccataaaattcttcttagtagctattaccttcttattatttgatctagaaattgccctccttttacccctaccatgagccctacaaacaactaacctgccactaatagttatgtcatccctcttattaatcatcatcctagccctaagtctggcctatgagtgactacaaaaaggattagactgaaccgaattggtatatagtttaaacaaaacgaatgatttcgactcattaaattatgataatcatatttaccaaatgcccctcatttacataaatattatactagcatttaccatctcacttctaggaatactagtatatcgctcacacctcatatcctccctactatgcctagaaggaataatactatcgctgttcattatagctactctcataaccctcaacacccactccctcttagccaatattgtgcctattgccatactagtctttgccgcctgcgaagcagcggtgggcctagccctactagtctcaatctccaacacatatggcctagactacgtacataacctaaacctactccaatgctaaaactaatcgtcccaacaattatattactaccactgacatgactttccaaaaaacacataatttgaatcaacacaaccacccacagcctaattattagcatcatccctctactattttttaaccaaatcaacaacaacctatttagctgttccccaaccttttcctccgaccccctaacaacccccctcctaatactaactacctgactcctacccctcacaatcatggcaagccaacgccacttatccagtgaaccactatcacgaaaaaaactctacctctctatactaatctccctacaaatctccttaattataacattcacagccacagaactaatcatattttatatcttcttcgaaaccacacttatccccaccttggctatcatcacccgatgaggcaaccagccagaacgcctgaacgcaggcacatacttcctattctacaccctagtaggctcccttcccctactcatcgcactaatttacactcacaacaccctaggctcactaaacattctactactcactctcactgcccaagaactatcaaactcctgagccaacaacttaatatgactagcttacacaatagcttttatagtaaagatacctctttacggactccacttatgactccctaaagcccatgtcgaagcccccatcgctgggtcaatagtacttgccgcagtactcttaaaactaggcggctatggtataatacgcctcacactcattctcaaccccctgacaaaacacatagcctaccccttccttgtactatccctatgaggcataattataacaagctccatctgcctacgacaaacagacctaaaatcgctcattgcatactcttcaatcagccacatagccctcgtagtaacagccattctcatccaaaccccctgaagcttcaccggcgcagtcattctcataatcgcccacgggcttacatcctcattactattctgcctagcaaactcaaactacgaacgcactcacagtcgcatcataatcctctctcaaggacttcaaactctactcccactaatagctttttgatgacttctagcaagcctcgctaacctcgccttaccccccactattaacctactgggagaactctctgtgctagtaaccacgttctcctgatcaaatatcactctcctacttacaggactcaacatactagtcacagccctatactccctctacatatttaccacaacacaatggggctcactcacccaccacattaacaacataaaaccctcattcacacgagaaaacaccctcatgttcatacacctatcccccattctcctcctatccctcaaccccgacatcattaccgggttttcctcttgtaaatatagtttaaccaaaacatcagattgtgaatctgacaacagaggcttacgaccccttatttaccgagaaagctcacaagaactgctaactcatgcccccatgtctaacaacatggctttctcaacttttaaaggataacagctatccattggtcttaggccccaaaaattttggtgcaactccaaataaaagtaataaccatgcacactactataaccaccctaaccctgacttccctaattccccccatccttaccaccctcgttaaccctaacaaaaaaaactcatacccccattatgtaaaatccattgtcgcatccacctttattatcagtctcttccccacaacaatattcatgtgcctagaccaagaagttattatctcgaactgacactgagccacaacccaaacaacccagctctccctaagcttcaaactagactacttctccataatattcatccctgtagcattgttcgttacatggtccatcatagaattctcactgtgatatataaactcagacccaaacattaatcagttcttcaaatatctactcatcttcctaattaccatactaatcttagttaccgctaacaacctattccaactgttcatcggctgagagggcgtaggaattatatccttcttgctcatcagttgatgatacgcccgagcagatgccaacacagcagccattcaagcaatcctatacaaccgtatcggcgatatcggtttcatcctcgccttagcatgatttatcctacactccaactcatgagacccacaacaaatagcccttctaaacgctaatccaagcctcaccccactactaggcctcctcctagcagcagcaggcaaatcagcccaattaggtctccacccctgactcccctcagccatagaaggccccaccccagtctcagccctactccactcaagcactatagttgtagcaggaatcttcttactcatccgcttccaccccctagcagaaaatagcccactaatccaaactctaacactatgcttaggcgctatcaccactctgttcgcagcagtctgcgcccttacacaaaatgacatcaaaaaaatcgtagccttctccacttcaagtcaactaggactcataatagttacaatcggcatcaaccaaccacacctagcattcctgcacatctgtacccacgccttcttcaaagccatactatttatgtgctccgggtccatcatccacaaccttaacaatgaacaagatattcgaaaaataggaggactactcaaaaccatacctctcacttcaacctccctcaccattggcagcctagcattagcaggaatacctttcctcacaggtttctactccaaagaccacatcatcgaaaccgcaaacatatcatacacaaacgcctgagccctatctattactctcatcgctacctccctgacaagcgcctatagcactcgaataattcttctcaccctaacaggtcaacctcgcttccccacccttactaacattaacgaaaataaccccaccctactaaaccccattaaacgcctggcagccggaagcctattcgcaggatttctcattactaacaacatttcccccgcatcccccttccaaacaacaatccccctctacctaaaactcacagccctcgctgtcactttcctaggacttctaacagccctagacctcaactacctaaccaacaaacttaaaataaaatccccactatgcacattttatttctccaacatactcggattctaccctagcatcacacaccgcacaatcccctatctaggccttcttacgagccaaaacctgcccctactcctcctagacctaacctgactagaaaagctattacctaaaacaatttcacagcaccaaatctccacctccatcatcacctcaacccaaaaaggcataattaaactttacttcctctctttcttcttcccactcatcctaaccctactcctaatcacataacctattcccccgagcaatctcaattacaatatatacaccaacaaacaatgttcaaccagtaactactactaatcaacgcccataatcatacaaagcccccgcaccaataggatcctcccgaatcaaccctgacccctctccttcataaattattcagcttcctacactattaaagtttaccacaaccaccaccccatcatactctttcacccacagcaccaatcctacctccatcgctaaccccactaaaacactcaccaagacctcaacccctgacccccatgcctcaggatactcctcaatagccatcgctgtagtatatccaaagacaaccatcattccccctaaataaattaaaaaaactattaaacccatataacctcccccaaaattcagaataataacacacccgaccacaccgctaacaatcaatactaaacccccataaataggagaaggcttagaagaaaaccccacaaaccccattactaaacccacactcaacagaaacaaagcatacatcattattctcgcacggactacaaccacgaccaatgatatgaaaaaccatcgttgtatttcaactacaagaacaccaatgaccccaatacgcaaaactaaccccctaataaaattaattaaccactcattcatcgacctccccaccccatccaacatctccgcatgatgaaacttcggctcactccttggcgcctgcctgatcctccaaatcaccacaggactattcctagccatgcactactcaccagacgcctcaaccgccttttcatcaatcgcccacatcactcgagacgtaaattatggctgaatcatccgctaccttcacgccaatggcgcctcaatattctttatctgcctcttcctacacatcgggcgaggcctatattacggatcatttctctactcagaaacctgaaacatcggcattatcctcctgcttgcaactatagcaacagccttcataggctatgtcctcccgtgaggccaaatatcattctgaggggccacagtaattacaaacttactatccgccatcccatacattgggacagacctagttcaatgaatctgaggaggctactcagtagacagtcccaccctcacacgattctttacctttcacttcatcttgcccttcattattgcagccctagcagcactccacctcctattcttgcacgaaacgggatcaaacaaccccctaggaatcacctcccattccgataaaatcaccttccacccttactacacaatcaaagacgccctcggcttacttctcttccttctctccttaatgacattaacactattctcaccagacctcctaggcgacccagacaattataccctagccaaccccttaaacacccctccccacatcaagcccgaatgatatttcctattcgcctacacaattctccgatccgtccctaacaaactaggaggcgtccttgccctattactatccatcctcatcctagcaataatccccatcctccatatatccaaacaacaaagcataatatttcgcccactaagccaatcactttattgactcctagccgcagacctcctcattctaacctgaatcggaggacaaccagtaagctacccttttaccatcattggacaagtagcatccgtactatacttcacaacaatcctaatcctaataccaactatctccctaattgaaaacaaaatactcaaatgggcctgtccttgtagtataaactaatacaccagtcttgtaagccggagatgaaaacctttttccaaggacaaatcagagaaaaagtctttaactccaccattagcacccaaagctaagattctaatttaaactattctctgttctttcatggggaagcagatttgggtaccacccaagtattgactcacccatcaacaaccgctatgtatttcgtacattactgccagccaccatgaatattgtacggtaccataaatacttgaccacctgtagtacataaaaacccaatccacatcaaaaccccccccccatgcttacaagcaagtacagcaatcaaccctcaactatcacacatcaactgcaactccaaagccacccctcacccactaggataccaacaaacctacccacccttaacagtacatagtacataaagccatttaccgtacatagcacattacagtcaaatcccctctcgcccccatggatgacccccctcagataggggtcccttgaccaccatcctccgtgaaatcaatatcccgcacaagagtgctactctcctcgctccgggcccataacacttgggggtagctaaagtgaactgtatccgacatctggttcctacttcagggccataaagcctaaatagcccacacgttccccttaaataagacatcacgatg

SEQ ID NO: 443 - DNA, 16576 bp, Homo sapiens mitochondrial
  3114: "n" refers to a nucleotide at position 3107 of the Cambridge Reference Sequence (CRS, Anderson et al. 1981 Nature 290:457-465), later determined to be absent from the human mtDNA sequence according to the revised CRS (rCRS, Andrews et al. 1999 Nature Genetics 23:147); "n" therefore represents a single nucleotide deletion at a position corresponding to nucleotide 3107 of SEQ ID NO:1 as provided herein.
gatcacaggtctatcaccctattaaccactcacgggagctctccatgcatttggtattttcgtctggggggtgtgcacgcgatagcattgcgagacgctggagccggagcaccctatgtcgcagtatctgtctttgattcctgcctcatcccattatttatcgcacctacgttcaatattacaggcgaacatacttaccaaagcgtattaattaattaatgcttgtaggacataataataacaattgaacgtctgcacagccgctttccacacagacatcataacaaaaaatttccaccaaaccccccctcccccccgcttctggccacagcacttaaacacatctctgccaaaccccaaaaacaaagaaccctaacaccagcctaaccagatttcaaattttatcttttggcggtatgcacttttaacagtcaccccccaactaacacattattttcccctcccactcccatactactaatctcatcaatacaacccccgcccatcctacccagcacacacacaccgctgctaaccccataccccgaaccaaccaaaccccaaagacaccccccaccccccagtttatgtagcttacctcctcaaagcaatacactgaaaatgtttagacgggctcacatcaccccataaacaaataggtttggtcctagcctttctattagctcttagtaagattacacatgcaagcatccccgttccagtgagttcaccctctaaatcaccacgatcaaaagggacaagcatcaagcacgcagcaatgcagctcaaaacgcttagcctagccacacccccacgggaaacagcagtgattaacctttagcaataaacgaaagtttaactaagctatactaaccccagggttggtcaatttcgtgccagccaccgcggtcacacgattaacccaagtcaatagaagccggcgtaaagagtgttttagatcaccccctccccaataaagctaaaactcacctgagttgtaaaaaactccagttgacacaaaatagactacgaaagtggctttaacatatctgaacacacaatagctaagacccaaactgggattagataccccactatgcttagccctaaacctcaacagttaaatcaacaaaactgctcgccagaacactacgagccacagcttaaaactcaaaggacctggcggtgcttcatatccctctagaggagcctgttctgtaatcgataaaccccgatcaacctcaccacctcttgctcagcctatataccgccatcttcagcaaaccctgatgaaggctacaaagtaagcgcaagtacccacgtaaagacgttaggtcaaggtgtagcccatgaggtggcaagaaatgggctacattttctaccccagaaaactacgatagcccttatgaaacttaagggtcgaaggtggatttagcagtaaactgagagtagagtgcttagttgaacagggccctgaagcgcgtacacaccgcccgtcaccctcctcaagtatacttcaaaggacatttaactaaaacccctacgcatttatatagaggagacaagtcgtaacatggtaagtgtactggaaagtgcacttggacgaaccagagtgtagcttaacacaaagcacccaacttacacttaggagatttcaacttaacttgaccgctctgagctaaacctagccccaaacccactccaccttactaccagacaaccttaaccaaaccatttacccaaataaagtataggcgatagaaattgaaacctggcgcaatagatatagtaccgcaagggaaagatgaaaaattataaccaagcataatatagcaaggactaacccctataccttctgcataatgaattaactagaaataactttgcaaggagagccaaagctaagacccccgaaaccagacgagctacctaagaacagctaaaagagcacacccgtctatgtagcaaaatagtgggaagatttataggtagaggcgacaaacctaccgagcctggtgatagctggttgtccaagatagaatcttagttcaactttaaatttgcccacagaaccctctaaatccccttgtaaatttaactgttagtccaaagaggaacagctctttggacactaggaaaaaaccttgtagagagagtaaaaaatttaacacccatagtaggcctaaaagcagccaccaattaagaaagcgttcaagctcaacacccactacctaaaaaatcccaaacatataactgaactcctcacacccaattggaccaatctatcaccctatagaagaactaatgttagtataagtaacatgaaaacattctcctccgcataagcctgcgtcagattaaaacactgaactgacaattaacagcccaatatctacaatcaaccaacaagtcattattaccctcactgtcaacccaacacaggcatgctcataaggaaaggttaaaaaaagtaaaaggaactcggcaaatcttaccccgcctgtttaccaaaaacatcacctctagcatcaccagtattagaggcaccgcctgcccagtgacacatgtttaacggccgcggtaccctaaccgtgcaaaggtagcataatcacttgttccttaaatagggacctgtatgaatggctccacgagggttcagctgtctcttacttttaaccagtgaaattgacctgcccgtgaagaggcgggcatgacacagcaagacgagaagaccctatggagctttaatttattaatgcaaacagtacctaacaaacccacaggtcctaaactaccaaacctgcattaaaaatttcggttggggcgacctcggagcagaacccaacctccgagcagtacatgctaagacttcaccagtcaaagcgaactactatactcaattgatccaataacttgaccaacggaacaagttaccctagggataacagcgcaatcctattctagagtccatatcaacaatagggtttacgacctcgatgttggatcaggacatcccgatggtgcagccgctattaaaggttcgtttgttcaacgattaaagtcctacgtgatctgagttcagaccggagtaatccaggtcggtttctatctacnttcaaattcctccctgtacgaaaggacaagagaaataaggcctacttcacaaagcgccttcccccgtaaatgatatcatctcaacttagtattatacccacacccacccaagaacagggtttgttaagatggcagagcccggtaatcgcataaaacttaaaactttacagtcagaggttcaattcctcttcttaacaacatacccatggccaacctcctactcctcattgtacccattctaatcgcaatggcattcctaatgcttaccgaacgaaaaattctaggctatatacaactacgcaaaggccccaacgttgtaggcccctacgggctactacaacccttcgctgacgccataaaactcttcaccaaagagcccctaaaacccgccacatctaccatcaccctctacatcaccgccccgaccttagctctcaccatcgctcttctactatgaacccccctccccatacccaaccccctggtcaacctcaacctaggcctcctatttattctagccacctctagcctagccgtttactcaatcctctgatcagggtgagcatcaaactcaaactacgccctgatcggcgcactgcgagcagtagcccaaacaatctcatatgaagtcaccctagccatcattctactatcaacattactaataagtggctcctttaacctctccacccttatcacaacacaagaacacctctgattactcctgccatcatgacccttggccataatatgatttatctccacactagcagagaccaaccgaacccccttcgaccttgccgaaggggagtccgaactagtctcaggcttcaacatcgaatacgccgcaggccccttcgccctattcttcatagccgaatacacaaacattattataataaacaccctcaccactacaatcttcctaggaacaacatatgacgcactctcccctgaactctacacaacatattttgtcaccaagaccctacttctaacctccctgttcttatgaattcgaacagcatacccccgattccgctacgaccaactcatacacctcctatgaaaaaacttcctaccactcaccctagcattacttatatgatatgtctccatacccattacaatctccagcattccccctcaaacctaagaaatatgtctgataaaagagttactttgatagagtaaataataggagcttaaacccccttatttctaggactatgagaatcgaacccatccctgagaatccaaaattctccgtgccacctatcacaccccatcctaaagtaaggtcagctaaataagctatcgggcccataccccgaaaatgttggttatacccttcccgtactaattaatcccctggcccaacccgtcatctactctaccatctttgcaggcacactcatcactgcgctaagctcgcactgattttttacctgagtaggcctagaaataaacatgctagcttttattccagttctaaccaaaaaaataaaccctcgttccacagaagctgccatcaagtatttcctcacgcaagcaaccgcatccataatccttctaatagctatcctcttcaacaatatactctccggacaatgaaccataaccaatactaccaatcaatactcatcattaataatcataatggctatagcaataaaactaggaatagccccctttcacttctgagtcccagaggttacccaaggcacccctctgacatccggcctgcttcttctcacatgacaaaaactagcccccatctcaatcatataccaaatctctccctcactaaacgtaagccttctcctcactctctcaatcttatccatcatagcaggcagttgaggtggattaaaccaaacccagctacgcaaaatcttagcatactcctcaattacccacataggatgaataatagcagttctaccgtacaaccctaacataaccattcttaatttaactatttatattatcctaactactaccgcattcctactactcaacttaaactccagcaccacgaccctactactatctcgcacctgaaacaagctaacatgactaacacccttaattccatccaccctcctctccctaggaggcctgcccccgctaaccggctttttgcccaaatgggccattatcgaagaattcacaaaaaacaatagcctcatcatccccaccatcatagccaccatcaccctccttaacctctacttctacctacgcctaatctactccacctcaatcacactactccccatatctaacaacgtaaaaataaaatgacagtttgaacatacaaaacccaccccattcctccccacactcatcgcccttaccacgctactcctacctatctccccttttatactaataatcttatagaaatttaggttaaatacagaccaagagccttcaaagccctcagtaagttgcaatacttaatttctgtaacagctaaggactgcaaaaccccactctgcatcaactgaacgcaaatcagccactttaattaagctaagcccttactagaccaatgggacttaaacccacaaacacttagttaacagctaagcaccctaatcaactggcttcaatctacttctcccgccgccgggaaaaaaggcgggagaagccccggcaggtttgaagctgcttcttcgaatttgcaattcaatatgaaaatcacctcggagctggtaaaaagaggcctaacccctgtctttagatttacagtccaatgcttcactcagccattttacctcacccccactgatgttcgccgaccgttgactattctctacaaaccacaaagacattggaacactatacctattattcggcgcatgagctggagtcctaggcacagctctaagcctccttattcgagccgagctgggccagccaggcaaccttctaggtaacgaccacatctacaacgttatcgtcacagcccatgcatttgtaataatcttcttcatagtaatacccatcataatcggaggctttggcaactgactagttcccctaataatcggtgcccccgatatggcgtttccccgcataaacaacataagcttctgactcttacctccctctctcctactcctgctcgcatctgctatagtggaggccggagcaggaacaggttgaacagtctaccctcccttagcagggaactactcccaccctggagcctccgtagacctaaccatcttctccttacacctagcaggtgtctcctctatcttaggggccatcaatttcatcacaacaattatcaatataaaaccccctgccataacccaataccaaacgcccctcttcgtctgatccgtcctaatcacagcaatcctacttctcctatctctcccagtcctagctgctggcatcactatactactaacagaccgcaacctcaacaccaccttcttcgaccccgccggaggaggagaccccattctataccaacacctattctgatttttcggtcaccctgaagtttatattcttatcctaccaggcttcggaataatctcccatattgtaacttactactccggaaaaaaagaaccatttggatacataggtatggtctgagctatgatatcaattggcttcctagggtttatcgtgtgagcacaccatatatttacagtaggaatagacgtagacacacgagcatatttcacctccgctaccataatcatcgctatccccaccggcgtcaaagtatttagctgactcgccacactccacggaagcaatatgaaatgatctgctgcagtgctctgagccctaggattcatctttcttttcaccgtaggtggcctgactggcattgtattagcaaactcatcactagacatcgtactacacgacacgtactacgttgtagctcacttccactatgtcctatcaataggagctgtatttgccatcataggaggcttcattcactgatttcccctattctcaggctacaccctagaccaaacctacgccaaaatccatttcactatcatattcatcggcgtaaatctaactttcttcccacaacactttctcggcctatccggaatgccccgacgttactcggactaccccgatgcatacaccacatgaaacatcctatcatctgtaggctcattcatttctctaacagcagtaatattaataattttcatgatttgagaagccttcgcttcgaagcgaaaagtcctaatagtagaagaaccctccataaacctggagtgactatatggatgccccccaccctaccacacattcgaagaacccgtatacataaaatctagacaaaaaaggaaggaatcgaaccccccaaagctggtttcaagccaaccccatggcctccatgactttttcaaaaaggtattagaaaaaccatttcataactttgtcaaagttaaattataggctaaatcctatatatcttaatggcacatgcagcgcaagtaggtctacaagacgctacttcccctatcatagaagagcttatcacctttcatgatcacgccctcataatcattttccttatctgcttcctagtcctgtatgcccttttcctaacactcacaacaaaactaactaatactaacatctcagacgctcaggaaatagaaaccgtctgaactatcctgcccgccatcatcctagtcctcatcgccctcccatccctacgcatcctttacataacagacgaggtcaacgatccctcccttaccatcaaatcaattggccaccaatggtactgaacctacgagtacaccgactacggcggactaatcttcaactcctacatacttcccccattattcctagaaccaggcgacctgcgactccttgacgttgacaatcgagtagtactcccgattgaagcccccattcgtataataattacatcacaagacgtcttgcactcatgagctgtccccacattaggcttaaaaacagatgcaattcccggacgtctaaaccaaaccactttcaccgctacacgaccgggggtatactacggtcaatgctctgaaatctgtggagcaaaccacagtttcatgcccatcgtcctagaattaattcccctaaaaatctttgaaataggacccgtatttaccctatagcaccccctctaccccctctagagcccactgtaaagctaacttagcattaaccttttaagttaaagattaagagaaccaacacctctttacagtgaaatgccccaactaaatactaccgtatggcccaccataattacccccatactccttacactattcctcatcacccaactaaaaatattaaacacaaactaccacctacctccctcaccaaagcccataaaaataaaaaattataacaaaccctgagaaccaaaatgaacgaaaatctgttcgcttcattcattgcccccacaatcctaggcctacccgccgcagtactgatcattctatttccccctctattgatccccacctccaaatatctcatcaacaaccgactaatcaccacccaacaatgactaatcaaactaacctcaaaacaaatgataaccatacacaacactaaaggacgaacctgatctcttatactagtatccttaatcatttttattgccacaactaacctcctcggactcctgcctcactcatttacaccaaccacccaactatctataaacctagccatggccatccccttatgagcgggcgcagtgattataggctttcgctctaagattaaaaatgccctagcccacttcttaccacaaggcacacctacaccccttatccccatactagttattatcgaaaccatcagcctactcattcaaccaatagccctggccgtacgcctaaccgctaacattactgcaggccacctactcatgcacctaattggaagcgccaccctagcaatatcaaccattaaccttccctctacacttatcatcttcacaattctaattctactgactatcctagaaatcgctgtcgccttaatccaagcctacgttttcacacttctagtaagcctctacctgcacgacaacacataatgacccaccaatcacatgcctatcatatagtaaaacccagcccatgacccctaacaggggccctctcagccctcctaatgacctccggcctagccatgtgatttcacttccactccataacgctcctcatactaggcctactaaccaacacactaaccatataccaatgatggcgcgatgtaacacgagaaagcacataccaaggccaccacacaccacctgtccaaaaaggccttcgatacgggataatcctatttattacctcagaagtttttttcttcgcaggatttttctgagccttttaccactccagcctagcccctaccccccaattaggagggcactggcccccaacaggcatcaccccgctaaatcccctagaagtcccactcctaaacacatccgtattactcgcatcaggagtatcaatcacctgagctcaccatagtctaatagaaaacaaccgaaaccaaataattcaagcactgcttattacaattttactgggtctctattttaccctcctacaagcctcagagtacttcgagtctcccttcaccatttccgacggcatctacggctcaacattttttgtagccacaggcttccacggacttcacgtcattattggctcaactttcctcactatctgcttcatccgccaactaatatttcactttacatccaaacatcactttggcttcgaagccgccgcctgatactggcattttgtagatgtggtttgactatttctgtatgtctccatctattgatgagggtcttactcttttagtataaatagtaccgttaacttccaattaactagctttgacaacattcaaaaaagagtaataaacttcgccttaattttaataatcaacaccctcctagccttactactaataattattacattttgactaccacaactcaacggctacatagaaaaatccaccccttacgagtgcggcttcgaccctatatcccccgcccgcgtccctttctccataaaattcttcttagtagctatcaccttcttattatttgatctagaaattgccctccttttacccctaccatgagccctacaaacaactaacctgccactaatagttatgtcatccctcttattaatcatcatcctagccctaagtctggcctatgagtgactacaaaaaggattagactgagccgaattggtatatagtttaaacaaaacgaatgatttcgactcattaaattatgataatcatatttaccaaatgcccctcatttacataaatattatactagcatttaccatctcacttctaggaatactagtatatcgctcacacctcatatcctccctactatgcctagaaggaataatactatcgctgttcattatagctactctcataaccctcaacacccactccctcttagccaatattgtgcctattgccatactagtctttgccgcctgcgaagcagcggtgggcctagccctactagtctcaatctccaacacatatggcctagactacgtacataacctaaacctactccaatgctaaaactaatcgtcccaacaattatattactaccactgacatgactttccaaaaaacacataatttgaatcaacacaaccacccacagcctaattattagcatcatccctctactattttttaaccaaatcaacaacaacctatttagctgttccccaaccttttcctccgaccccctaacaacccccctcctaatactaactacctgactcctacccctcacaatcatggcaagccaacgccacttatccagtgaaccactatcacgaaaaaaactctacctctctatactaatctccctacaaatctccttaattataacattcacagccacagaactaatcatattttatatcttcttcgaaaccacacttatccccaccttggctatcatcacccgatgaggcaaccagccagaacgcctgaacgcaggcacatacttcctattctacaccctagtaggctcccttcccctactcatcgcactaatttacactcacaacaccctaggctcactaaacattctactactcactctcactgcccaagaactatcaaactcctgagccaacaacttaatatgactagcttacacaatagcttttatagtaaagatacctctttacggactccacttatgactccctaaagcccatgtcgaagcccccatcgctgggtcaatagtacttgccgcagtactcttaaaactaggcggctatggtataatacgcctcacactcattctcaaccccctgacaaaacacatagcctaccccttccttgtactatccctatgaggcataattataacaagctccatctgcctacgacaaacagacctaaaatcgctcattgcatactcttcaatcagccacatagccctcgtagtaacagccattctcatccaaaccccctgaagcttcaccggcgcagtcattctcataatcgcccacggacttacatcctcattactattctgcctagcaaactcaaactacgaacgcactcacagtcgcatcataatcctctctcaaggacttcaaactctactcccactaatagctttttgatgacttctagcaagcctcgctaacctcgccttaccccccactattaacctactgggagaactctctgtgctagtaaccacgttctcctgatcaaatatcactctcctacttacaggactcaacatactagtcacagccctatactccctctacatatttaccacaacacaatggggctcactcacccaccacattaacaacataaaaccctcattcacacgagaaaacaccctcatgttcatacacctatcccccattctcctcctatccctcaaccccgacatcattaccgggttttcctcttgtaaatatagtttaaccaaaacatcagattgtgaatctgacaacagaggcttacgaccccttatttaccgagaaagctcacaagaactgctaactcatgcccccatgtctaacaacatggctttctcaacttttaaaggataacagctatccattggtcttaggccccaaaaattttggtgcaactccaaataaaagtaataaccatgcacactactataaccaccctaaccctgacttccctaattccccccatccttaccaccctcgttaaccctaacaaaaaaaactcatacccccattatgtaaaatccattgtcgcatccacctttattatcagtctcttccccacaacaatattcatatgcctagaccaagaagttattatctcgaactgacactgagccacaacccaaacaacccagctctccctaagcttcaaactagactacttctccataatattcatccctgtagcattgttcgttacatggtccatcatagaattctcactgtgatatataaactcagacccaaacattaatcagttcttcaaatatctactcattttcctaattaccatactaatcttagttaccgctaacaacctattccaactgttcatcggctgagagggcgtaggaattatatccttcttgctcatcagttgatgatacgcccgagcagatgccaacacagcagccattcaagcaatcctatacaaccgtatcggcgatatcggtttcatcctcgccttagcatgatttatcctacactccaactcatgagacccacaacaaatagcccttctaaacgctaatccaagcctcaccccactactaggcctcctcctagcagcagcaggcaaatcagcccaattaggtctccacccctgactcccctcagccatagaaggccccaccccagtctcagccctactccactcaagcactatagttgtagcaggaatcttcttactcatccgcttccaccccctagcagaaaatagcccactaatccaaactctaacactatgcttaggcgctatcaccactctgttcgcagcagtctgcgcccttacacaaaatgacatcaaaaaaatcgtagccttctccacttcaagtcaactaggactcataatagttacaatcggcatcaaccaaccacacctagcattcctgcacatctgtacccacgccttcttcaaagccatactatttatgtgctccgggtccatcatccacaaccttaacaatgaacaagatattcgaaaaataggaggactactcaaaaccatacctctcacttcaacctccctcaccattggcagcctagcattagcaggaatacctttcctcacaggtttctactccaaagaccacatcatcgaaaccgcaaacatatcatacacaaacgcctgagccctatctattactctcatcgctacctccctgacaagcgcctatagcactcgaataattcttctcaccctaacaggtcaacctcgcttccccacccttactaacattaacgaaaataaccccaccctactaaaccccattaaacgcctggcagccggaagcctattcgcaggatttctcattactaacaacatttcccccgcatcccccttccaaacaacagtccccctctacctaaaactcacagccctcgctgtcactttcctaggacttctaacagccctagacctcaactacctaaccaacaaacttaaaataaaatccccactatgcacattttatttctccaacatactcggattctaccctagcatcacacaccgcacaatcccctatctaggccttcttacgagccaaaacctgcccctactcctcctagacctaacctgactagaaaagctattacctaaaacaatttcacagcaccaaatctccacctccatcatcacctcaacccaaaaaggcataattaaactttacttcctctctttcttcttcccactcatcctaaccctactcctaatcacataacctattcccccgagcaatctcaattacaatatatacaccaacaaacaatgttcaaccagtaactactactaatcaacgcccataatcatacaaagcccccgcaccaataggatcctcccgaatcaaccctgacccctctccttcataaattattcagcttcctacactattaaagtttaccacaaccaccaccccatcatactctttcacccacagcaccaatcctacctccatcgctaaccccactaaaacactcaccaagacctcaacccctgacccccatgcctcaggatactcctcaatagccatcgctgtagtatatccaaagacaaccatcattccccctaaataaattaaaaaaactattaaacccatataacctcccccaaaattcagaataataacacacccgaccacaccgctaacaatcaatactaaacccccataaataggagaaggcttagaagaaaaccccacaaaccccattactaaacccacactcaacagaaacaaagcatacatcattattctcgcacggactacaaccacgaccaatgatatgaaaaaccatcgttgtatttcaactacaagaacaccaatgaccccaatacgcaaaactaaccccctaataaaattaattaaccactcattcatcgacctccccaccccatccaacatctccgcatgatgaaacttcggctcactccttggcgcctgcctgatcctccaaatcaccacaggactattcctagccatgcactactcaccagacgcctcaaccgccttttcatcaatcgcccacatcactcgagacgtaaattatggctgaatcatccgctaccttcacgccaatggcgcctcaatattctttatctgcctcttcctacacatcggacgaggcctatattacggatcatttctctactcagaaacctgaaacatcggcattatcctcctgcttgcaactatagcaacagccttcataggctatgtcctcccgtgaggccaaatatcattctgaggggccacagtaattacaaacttactatccgccatcccatacattgggacagacctagttcaatgaatctgaggaggctactcagtagacagtcccaccctcacacgattctttacctttcacttcatcttgcccttcattattgcagccctagcagcactccacctcctattcttgcacgaaacgggatcaaacaaccccctaggaatcacctcccattccgataaaatcaccttccacccttactacacaatcaaagacgccctcggcttacttctcttccttctctccttaatgacattaacactattctcaccagacctcctaggcgacccagacaattataccctagccaaccccttaaacacccctccccacatcaagcccgaatgatatttcctattcgcctacacaattctccgatccgtccctaacaaactaggaggcgtccttgccctattactatccatcctcatcctagcaataatccccatcctccatatatccaaacaacaaagcataatatttcgcccactaagccaatcactttattgactcctagccgcagacctcctcattctaacctgagtcggaggacaaccagtaagctacccttttaccatcattggacaagtagcatccgtactatacttcacaacaatcctaatcctaataccaactatctccctaattgaaaacaaaatactcaaatgggcctgtccttgtagtataaactaatacaccagtcttgtaagccggagatgaaaacctttttccaaggacaaatcagagaaaaagtctttaactccaccattagcacccaaagctaagattctaatttaaactattctctgttctttcatggggaagcagatttgggtaccacccaagtattgactcacccatcaacaaccgctatgtatttcgtacattactgccagccaccatgaatattgtacagtaccataaatacttgaccacctgtagtacataaaaacccaatccacatcaaaaccccctccccatgcttacaagcaagtacagcaatcaaccttcaactatcacacatcaactgcaactccaaagccacccctcacccactaggataccaacaaacctacccacccttaacagtacatagtacataaagccatttaccgtacatagcacattacagtcaaatcccttctcgtccccatggatgacccccctcagatagggatcccttgaccaccatcctccgtgaaatcaatatcccgcacaagagtgctactctcctcgctccgggcccataacacttgggggtagctaaagtgaactgtatccgacatctggttcctacttcagggccataaagcctaaatagcccacacgttccccttaaataagacatcacgatg

SEQ ID NO: 444 - DNA, 16570 bp, Homo sapiens mitochondrial
  3108: "n" refers to a nucleotide at position 3107 of the Cambridge Reference Sequence (CRS, Anderson et al. 1981 Nature 290:457-465), later determined to be absent from the human mtDNA sequence according to the revised CRS (rCRS, Andrews et al. 1999 Nature Genetics 23:147); "n" therefore represents a single nucleotide deletion at a position corresponding to nucleotide 3107 of SEQ ID NO:1 as provided herein.
gatcacaggtctatcaccctattaaccactcacgggagctctccatgcatttggtattttcgtctggggggtatgcacgcgatagcattgcgagacgctggagccggagcaccctatgtcgcagtatctgtctttgattcctgcctcatcccattatttatcgcacctacgttcaatattacaggcgaacatacttactaaagtgtgttaattaattaatgcttgtaggacataataataacaattgaatgtctgcacagccgctttccacacagacatcataacaaaaaatttccaccaaaccccccctcccccgccttctggccacagcacttaaacacatctctgccaaaccccaaaaacaaagaaccctaacaccagcctaaccagatttcaaattttatcttttggcggtatgcacttttaacagtcaccccccaactaacacattattttcccctcccactcccatactactaatctcatcaatacaacccccgcccatcctacccagcacacacacaccgctgctaaccccataccccgaaccaaccaaaccccaaagacaccccccacagtttatgtagcttacctcctcaaagcaatacactgaaaatgtttagacgggctcacatcaccccataaacaaataggtttggtcctagcctttctattagctcttagtaagattacacatgcaagcatccccgttccagtgagttcaccctctaaatcaccacgatcaaaagggacaagcatcaagcacgcagcaatgcagctcaaaacgcttagcctagccacacccccacgggaaacagcagtgattaacctttagcaataaacgaaagtttaactaagctatactaaccccagggttggtcaatttcgtgccagccaccgcggtcacacgattaacccaagtcaatagaagccggcgtaaagagtgttttagatcaccccctccccaataaagctaaaactcacctgagttgtaaaaaactccagttgacacaaaatagactacgaaagtggctttaacatatctgaacacacaatagctaagacccaaactgggattagataccccactatgcttagccctaaacctcaacagttaaatcaacaaaactgctcgccagaacactacgagccacagcttaaaactcaaaggacctggcggtgcttcatatccctctagaggagcctgttctgtaatcgataaaccccgatcaacctcaccacctcttgctcagcctatataccgccatcttcagcaaaccctgatgaaggctacaaagtaagcgcaagtacccacgtaaagacgttaggtcaaggtgtagcccatgaggtggcaagaaatgggctacattttctaccccagaaaactacgatagcccttatgaaacttaagggtcgaaggtggatttagcagtaaactgagagtagagtgcttagttgaacagggccctgaagcgcgtacacaccgcccgtcaccctcctcaagtatacttcaaaggacatttaactaaaacccctacgcatttatatagaggagacaagtcgtaacatggtaagtgtactggaaagtgcacttggacgaaccagagtgtagcttaacacaaagcacccaacttacacttaggagatttcaacttaacttgaccgctctgagctaaacctagccccaaacccactccaccttactaccagacaaccttagccaaaccatttacccaaataaagtataggcgatagaaattgaaacctggcgcaatagatatagtaccgcaagggaaagatgaaaaattataaccaagcataatatagcaaggactaacccctataccttctgcataatgaattaactagaaataactttgcaaggagagccaaagctaagacccccgaaaccagacgagctacctaagaacagctaaaagagcacacccgtctatgtagcaaaatagtgggaagatttataggtagaggcgacaaacctaccgagcctggtgatagctggttgtccaagatagaatcttagttcaactttaaatttgcccacagaaccctctaaatccccttgtaaatttaactgttagtccaaagaggaacagctctttggacactaggaaaaaaccttgtagagagagtaaaaaatttaacacccatagtaggcctaaaagcagccaccaattaagaaagcgttcaagctcaacacccactacctaaaaaatcccaaacatataactgaactcctcacacccaattggaccaatctatcaccctatagaagaactaatgttagtataagtaacatgaaaacattctcctccgcataagcctgcgtcagattaaaacactgaactgacaattaacagcccaatatctacaatcaaccaacaagtcattattaccctcactgtcaacccaacacaggcatgctcataaggaaaggttaaaaaaagtaaaaggaactcggcaaatcttaccccgcctgtttaccaaaaacatcacctctagcatcaccagtattagaggcaccgcctgcccagtgacacatgtttaacggccgcggtaccctaaccgtgcaaaggtagcataatcacttgttccttaaatagggacctgtatgaatggctccacgagggttcagctgtctcttacttttaaccagtgaaattgacctgcccgtgaagaggcgggcataacacagcaagacgagaagaccctatggagctttaatttattaatgcaaacagtacctaacaaacccacaggtcctaaactaccaaacctgcattaaaaatttcggttggggcgacctcggagcagaacccaacctccgagcagtacatgctaagacttcaccagtcaaagcgaactactatactcaattgatccaataacttgaccaacggaacaagttaccctagggataacagcgcaatcctattctagagtccatatcaacaatagggtttacgacctcgatgttggatcaggacatcccaatggtgcagccgctattaaaggttcgtttgttcaacgattaaagtcctacgtgatctgagttcagaccggagtaatccaggtcggtttctatctacnttcaaattcctccctgtacgaaaggacaagagaaataaggcctacttcacaaagcgccttcccccgtaaatgatatcatctcaacttagtattatacccacacccacccaagaacagggtttgttaagatggcagagcccggtaatcgcataaaacttaaaactttacagtcagaggttcaattcctcttcttaacaacatacccatggccaacctcctactcctcattgtacccattctaatcgcaatggcattcctaatgcttaccgaacgaaaaattctaggctatatacaactacgcaaaggccccaacgttgtaggcccctacgggctactacaacccttcgctgacgccataaaactcttcaccaaagagcccctaaaacccgccacatctaccatcaccctctacatcaccgccccgaccttagctctcaccatcgctcttctactatgaacccccctccccatacccaaccccctggtcaacctcaacctaggcctcctatttattctagccacctctagcctagccgtttactcaatcctctgatcagggtgagcatcaaactcaaactacgccctgatcggcgcactgcgagcagtagcccaaacaatctcatatgaagtcaccctagccatcattctactatcaacattactaataagtggctcctttaacctctccacccttatcacaacacaagaacacctctgattactcctgccatcatgacccttggccataatatgatttatctccacactagcagagaccaaccgaacccccttcgaccttgccgaaggggagtccgaactagtctcaggcttcaacatcgaatacgccgcaggccccttcgccctattcttcatagccgaatacacaaacattattataataaacaccctcaccactacaatcttcctaggaacaacatatgacgcactctcccctgaactctacacaacatattttgtcaccaagaccctacttctaacctccctgttcttatgaattcgaacagcatacccccgattccgctacgaccaactcatacacctcctatgaaaaaacttcctaccactcaccctagcattacttatatgatatgtctccatacccattacaatctccagcattccccctcaaacctaagaaatatgtctgataaaagagttactttgatagagtaaataataggagcttaaacccccttatttctaggactatgagaatcgaacccatccctgagaatccaaaattctccgtgccacctatcacaccccatcctaaagtaaggtcagctaaataagctatcgggcccataccccgaaaatgttggttatacccttcccgtactaattaatcccctggcccaacccgtcatctactctaccatctttgcaggcacactcatcacagcgctaagctcgcactgattttttacctgagtaggcctagaaataaacatgctagcttttattccagttctaaccaaaaaaataaaccctcgttccacagaagctgccatcaagtatttcctcacgcaagcaaccgcatccataatccttctaatagctatcctcttcaacaatatactctccggacaatgaaccataaccaatactaccaatcaatactcatcattaataatcataatggctatagcaataaaactaggaatagccccctttcacttctgagtcccagaggttacccaaggcacccctctgacatccggcctgcttcttctcacatgacaaaaactagcccccatctcaatcatataccaaatctctccctcactaaacgtaagccttctcctcactctctcaatcttatccatcatagcaggcagttgaggtggattaaaccaaacccagctacgcaaaatcttagcatactcctcaattacccacataggatgaataatagcagttctaccgtacaaccctaacataaccattcttaatttaactatttatattatcctaactactaccgcattcctactactcaacttaaactccagcaccacgaccctactactatctcgcacctgaaacaagctaacatgactaacacccttaattccatccaccctcctctccctaggaggcctgcccccgctaaccggctttttgcccaaatgggccattatcgaagaattcacaaaaaacaatagcctcatcatccccaccatcatagccaccatcaccctccttaacctctacttctacctacgcctaatctactccacctcaatcacactactccccatatctaacaacgtaaaaataaaatgacagtttgaacatacaaaacccaccccattcctccccacactcatcgcccttaccacgctactcctacctatctccccttttatactaataatcttatagaaatttaggttaaatacagaccaagagccttcaaagccctcagtaagttgcaatacttaatttctgtaacagctaaggactgcaaaaccccactctgcatcaactgaacgcaaatcagccactttaattaagctaagcccttactagaccaatgggacttaaacccacaaacacttagttaacagctaagcaccctaatcaactggcttcaatctacttctcccgccgccgggaaaaaaggcgggagaagccccggcaggtttgaagctgcttcttcgaatttgcaattcaatatgaaaatcacctcggagctggtaaaaagaggcctaacccctgtctttagatttacagtccaatgcttcactcagccattttacctcacccccactgatgttcgccgaccgttgactattctctacaaaccacaaagacattggaacactatacctattattcggcgcatgagctggagtcctaggcacagctctaagcctccttattcgagccgagctgggccagccaggcaaccttctaggtaacgaccacatctacaacgttatcgtcacagcccatgcatttgtaataatcttcttcatagtaatacccatcataatcggaggctttggcaactgactagttcccctaataatcggtgcccccgatatggcgtttccccgcataaacaacataagcttctgactcttacctccctctctcctactcatgctcgcatctgctatagtggaggccggagcaggaacaggttgaacagtctaccctcccttagcagggaactactcccaccctggagcctccgtagacctaaccatcttctccttacacctagcaggtgtctcctctatcttaggggccatcaatttcatcacaacaattatcaatataaaaccccctgccataacccaataccaaacgcccctcttcgtctgatccgtcctaatcacagcagtcctacttctcctatctctcccagtcctagctgctggcatcactatactactaacagaccgcaacctcaacaccaccttcttcgaccccgccggaggaggagaccccattctataccaacacctattctgatttttcggtcaccctgaagtttatattcttatcctaccaggcttcggaataatctcccatattgtaacttactactccggaaaaaaagaaccatttggatacataggtatggtctgagctatgatatcaattggcttcctagggtttatcgtgtgagcacaccatatatttacagtaggaatagacgtagacacacgagcatatttcacctccgctaccataatcatcgctatccccaccggcgtcaaagtatttagctgactcgccacactccacggaagcaatatgaaatgatctgctgcagtgctctgagccctaggattcatctttcttttcaccgtaggtggcctgactggcattgtattagcaaactcatcactagacatcgtactacacgacacgtactacgttgtagcccacttccactatgtcctatcaataggagctgtatttgccatcataggaggcttcattcactgatttcccctattctcaggctacaccctagaccaaacctacgccaaaatccatttcactatcatattcatcggcgtaaatctaactttcttcccacaacactttctcggcctatccggaatgccccgacgttactcggactaccccgatgcatacaccacatgaaacatcctatcatctgtaggctcattcatttctctaacagcagtaatattaataattttcatgatttgagaagccttcgcttcgaagcgaaaagtcctaatagtagaagaaccctccataaacctggagtgactatatggatgccccccaccctaccacacattcgaagaacccgtatacataaaatctagacaaaaaaggaaggaatcgaaccccccaaagctggtttcaagccaaccccatggcctccatgactttttcaaaaaggtattagaaaaaccatttcataactttgtcaaagttaaattataggctaaatcctatatatcttaatggcacatgcagcgcaagtaggtctacaagacgctacttcccctatcatagaagagcttatcacctttcatgatcacgccctcataatcattttccttatctgcttcctagtcctgtatgcccttttcctaacactcacaacaaaactaactaatactaacatctcagacgctcaggaaatagaaaccgtctgaactatcctgcccgccatcatcctagtcctcatcgccctcccatccctacgcatcctttacataacagacgaggtcaacgatccctcccttaccatcaaatcaattggccaccaatggtactgaacctacgagtacaccgactacggcggactaatcttcaactcctacatacttcccccattattcctagaaccaggcgacctgcgactccttgacgttgacaatcgagtagtactcccgattgaagcccccattcgtataataattacatcacaagacgtcttgcactcatgagctgtccccacattaggcttaaaaacagatgcaattcccggacgtctaaaccaaaccactttcaccgctacacgaccgggggtatactacggtcaatgctctgaaatctgtggagcaaaccacagtttcatgcccatcgtcctagaattaattcccctaaaaatctttgaaatagggcccgtatttaccctatagcaccccctctaccccctctagagcccactgtaaagctaacttagcattaaccttttaagttaaagattaagagaaccaacacctctttacagtgaaatgccccaactaaatactaccgtatggcccaccataattacccccatactccttacactattcctcatcacccaactaaaaatattaaacacaaactaccacctacctccctcaccaaagcccataaaaataaaaaattattacaaaccctgagaaccaaaatgaacgaaaatctgttcgcttcattcattgcccccacaatcctaggcctacccgccgcagtactgatcattctatttccccctctattgatccccacctccaaatatctcatcaacaaccgactaatcaccacccaacaatgactaatcaaactaacctcaaaacaaatgataaccatacacaacactaaaggacgaacctgatctcttatactagtatccttaatcatttttattgccacaactaacctcctcggactcctgcctcactcatttacaccaaccacccaactatctataaacctagccatggccatccccttatgagcgggcgcagtgattataggctttcgctctaagattaaaaatgccctagcccacttcttaccacaaggcacacctacaccccttatccccatactagttattatcgaaaccatcagcctactcattcaaccaatagccctggccgtacgcctaaccgctaacattactgcaggccacctactcatgcacctaattggaagcgccaccctagcaatatcaaccattaaccttccctctacacttatcatcttcacaattctaattctactgactatcctagaaatcgctgtcgccttaatccaagcctacgttttcacacttctagtaagcctctacctgcacgacaacacataatgacccaccaatcacatgcctatcatatagtaaaacccagcccatgacccctaacaggggccctctcagccctcctaatgacctccggcctaaccatgtgatttcacttccactccataacgctcctcatactaggcctactaaccaacacactaaccatataccaatgatggcgcgatgtaacacgagaaagcacataccaaggccaccacacaccacctgtccaaaaaggccttcgatacgggataatcctatttattacctcagaagtttttttcttcgcaggatttttctgagccttttaccactccagcctagcccctaccccccaattaggagggcactggcccccaacaggcatcaccccgctaaatcccctagaagtcccactcctaaacacatccgtattactcgcatcaggagtatcaatcacctgagctcaccatagtctaatagaaaacaaccgaaaccaaataattcaagcactgcttattacaattttactgggtctctattttaccctcctacaagcctcagagtacttcgagtctcccttcaccatttccgacggcatctacggctcaacattttttgtagccacaggcttccacggacttcacgtcattattggctcaactttcctcactatctgcttcatccgccaactaatatttcactttacatccaaacatcactttggcttcgaagccgccgcctgatactggcattttgtagatgtggtttgactatttctgtatgtctccatctattgatgagggtcttactcttttagtataaatagtaccgttaacttccaattaactagttttgacaacattcaaaaaagagtaataaacttcgccttaattttaataatcaacaccctcctagccttactactaataattattacattttgactaccacaactcaacggctacatagaaaaatccaccccttacgagtgcggcttcgaccctatatcccccgcccgcgtccctttctccataaaattcttcttagtagctattaccttcttattatttgatctagaaattgccctccttttacccctaccatgagccctacaaacaactaacctgccactaatagttatgtcatccctcttattaatcatcatcctagccctaagtctggcctatgagtgactacaaaaaggattagactgaaccgaattggtatatagtttaaacaaaacgaatgatttcgactcattaaattatgataatcatatttaccaaatgcccctcatttacataaatattatactagcatttaccatctcacttctaggaatactagtatatcgctcacacctcatatcctccctactatgcctagaaggaataatactatcgctgttcattatagctactctcataaccctcaacacccactccctcttagccaatattgtgcctattgccatactagtctttgccgcctgcgaagcagcggtgggcctagccctactagtctcaatctccaacacatatggcctagactacgtacataacctaaacctactccaatgctaaaactaatcgtcccaacaattatattactaccactgacatgactttccaaaaaacacataatttgaatcaacacaaccacccacagcctaattattagcatcatccctctactattttttaaccaaatcaacaacaacctatttagctgttccccaaccttttcctccgaccccctaacaacccccctcctaatactaactacctgactcctacccctcacaatcatggcaagccaacgccacttatccagtgaaccactatcacgaaaaaaactctacctctctatactaatctccctacaaatctccttaattataacattcacagccacagaactaatcatattttatatcttcttcgaaaccacacttatccccaccttggctatcatcacccgatgaggcaaccagccagaacgcctgaacgcaggcacatacttcctattctacaccctagtaggctcccttcccctactcatcgcactaatttacactcacaacaccctaggctcactaaacattctactactcactctcactgcccaagaactatcaaactcctgagccaacaacttaatatgactagcttacacaatagcttttatagtaaagatacctctttacggactccacttatgactccctaaagcccatgtcgaagcccccatcgctgggtcaatagtacttgccgcagtactcttaaaactaggcggctatggtataatacgcctcacactcattctcaaccccctgacaaaacacatagcctaccccttccttgtactatccctatgaggcataattataacaagctccatctgcctacgacaaacagacctaaaatcactcattgcatactcttcaatcagccacatagccctcgtagtaacagccattctcatccaaaccccctgaagcttcaccggcgcagtcattctcataatcgcccacgggcttacatcctcattactattctgcctagcaaactcaaactacgaacgcactcacagtcgcatcataatcctctctcaaggacttcaaactctactcccactaatagctttttgatgacttctagcaagcctcgctaacctcgccttaccccccactattaacctactgggagaactctctgtgctagtaaccacgttctcctgatcaaatatcactctcctacttacaggactcaacatactagtcacagccctatactccctctacatatttaccacaacacaatggggctcactcacccaccacattaacaacataaaaccctcattcacacgagaaaacaccctcatgttcatacacctatcccccattctcctcctatccctcaaccccgacatcattaccgggttttcctcttgtaaatatagtttaaccaaaacatcagattgtgaatctgacaacagaggcttacgaccccttatttaccgagaaagctcacaagaactgctaactcatgcccccatgtctaacaacatggctttctcaacttttaaaggataacagctatccattggtcttaggccccaaaaattttggtgcaactccaaataaaagtaataaccatgcacactactataaccaccctaaccctgacttccctaattccccccatccttaccaccctcgttaaccctaacaaaaaaaactcatacccccattatgtaaaatccattgtcgcatccacctttattatcagtctcttccccacaacaatattcatgtgcctagaccaagaagttattatctcgaactgacactgagccacaacccaaacaacccagctctccctaagcttcaaactagactacttctccataatattcatccctgtagcattgttcgttacatggtccatcatagaattctcactgtgatatataaactcagacccaaacattaatcagttcttcaaatatctactcatcttcctaattaccatactaatcttagttaccgctaacaacctattccaactgttcatcggctgagagggcgtaggaattatatccttcttgctcatcagttgatgatacgcccgagcagatgccaacacagcagccattcaagcaatcctatacaaccgtatcggcgatatcggtttcatcctcgccttagcatgatttatcctacactccaactcatgagacccacaacaaatagcccttctaaacgctaatccaagcctcaccccactactaggcctcctcctagcagcagcaggcaaatcagcccaattaggtctccacccctgactcccctcagccatagaaggccccaccccagtctcagccctactccactcaagcactatagttgtagcaggaatcttcttactcatccgcttccaccccctagcagaaaatagcccactaatccaaactctaacactatgcttaggcgctatcaccactctgttcgcagcagtctgcgcccttacacaaaatgacatcaaaaaaatcgtagccttctccacttcaagtcaactaggactcataatagttacaatcggcatcaaccaaccacacctagcattcctgcacatctgtacccacgccttcttcaaagccatactatttatgtgctccgggtccatcatccacaaccttaacaatgaacaagatattcgaaaaataggaggactactcaaaaccatacctctcacttcaacctccctcaccattggcagcctagcattagcaggaatacctttcctcacaggtttctactccaaagaccacatcatcgaaaccgcaaacatatcatacacaaacgcctgagccctatctattactctcatcgctacctccctgacaagcgcctatagcactcgaataattcttctcaccctaacaggtcaacctcgcttccccacccttactaacattaacgaaaataaccccaccctactaaaccccattaaacgcctggcagccggaagcctattcgcaggatttctcattactaacaacatttcccccgcatcccccttccaaacaacaatccccctctacctaaaactcacagccctcgctgtcactttcctaggacttctaacagccctagacctcaactacctaaccaacaaacttaaaataaaatccccactatgcacattttatttctccaacatactcggattctaccctagcatcacacaccgcacaatcccctatctaggccttcttacgagccaaaacctgcccctactcctcctagacctaacctgactagaaaagctattacctaaaacaatttcacagcaccaaatctccacctccatcatcacctcaacccaaaaaggcataattaaactttacttcctctctttcttcttcccactcatcctaaccctactcctaatcacataacctattcccccgagcaatctcaattacaatatatacaccaacaaacaatgttcaaccagtaactactactaatcaacgcccataatcatacaaagcccccgcaccaataggatcctcccgaatcaaccctgacccctctccttcataaattattcagcttcctacactattaaagtttaccacaaccaccaccccatcatactctttcacccacagcaccaatcctacctccatcgctaaccccactaaaacactcaccaagacctcaacccctgacccccatgcctcaggatactcctcaatagccatcgctgtagtatatccaaagacaaccatcattccccctaaataaattaaaaaaactattaaacccatataacctcccccaaaattcagaataataacacacccgaccacaccgctaacaatcaatactaaacccccataaataggagaaggcttagaagaaaaccccacaaaccccattactaaacccacactcaacagaaacaaagcatacatcattattctcgcacggactacaaccacgaccaatgatatgaaaaaccatcgttgtatttcaactacaagaacaccaatgaccccaatacgcaaaactaaccccctaataaaattaattaaccactcattcatcgacctccccaccccatccaacatctccgcatgatgaaacttcggctcactccttggcgcctgcctgatcctccaaatcaccacaggactattcctagccatgcactactcaccagacgcctcaaccgccttttcatcaatcgcccacatcactcgagacgtaaattatggctgaatcatccgctaccttcacgccaatggcgcctcaatattctttatctgcctcttcctacacatcgggcgaggcctatattacggatcatttctctactcagaaacctgaaacatcggcattatcctcctgcttacaactatagcaacagccttcataggctatgtcctcccgtgaggccaaatatcattctgaggggccacagtaattacaaacttactatccgccatcccatacattgggacagacctagttcaatgaatctgaggaggctactcagtagacagtcccaccctcacacgattctttacctttcacttcatcttgcccttcattattgcagccctagcagcactccacctcctattcttgcacgaaacgggatcaaacaaccccctaggaatcacctcccattccgataaaatcaccttccacccttactacacaatcaaagacgccctcggcttacttctcttccttctctccttaatgacattaacactattctcaccagacctcctaggcgacccagacaattataccctagccaaccccttaaacacccctccccacatcaagcccgaatgatatttcctattcgcctacacaattctccgatccgtccctaacaaactaggaggcgtccttgccctattactatccatcctcatcctagcaataatccccatcctccatatatccaaacaacaaagcataatatttcgcccactaagccaatcactttattgactcctagccgcagacctcctcattctaacctgaatcggaggacaaccagtaagctacccttttaccatcattggacaagtagcatccgtactatacttcacaacaatcctaatcctaataccaactatctccctaattgaaaacaaaatactcaaatgggcctgtccttgtagtataaactaatacaccagtcttgtaaaccggagatgaaaacctttttccaaggacaaatcagagaaaaagtctttaactccaccattagcacccaaagctaagattctaatttaaactattctctgttctttcatggggaagcagatttgggtaccacccaagtattgactcacccatcaacaaccgctatgtatttcgtacattactgccagccaccatgaatattgtacggtaccataaatacttgaccacctgtagtacataaaaacccaatccacatcaaaaccccctccccatgcttacaagcaagtacagcaatcaaccctcaactatcacacatcaactgcaactccaaagccacccctcacccactaggataccaacaaacctacccacccttaacagtacatagtacataaagccatttaccgtacatagcacattacagtcaaatcccttctcgtccccatggatgacccccctcagataggggtcccttgaccaccatcctccgtgaaatcaatatcccgcacaagagtgctactctcctcgctccgggcccataacacttgggggtagctaaagtgaactgtatccgacatctggttcctacttcagggccataaagcctaaatagcccacacgttccccttaaataagacatcacgatg

SEQ ID NO: 445 - DNA, 16571 bp, Homo sapiens mitochondrial
  3109: "n" refers to a nucleotide at position 3107 of the Cambridge Reference Sequence (CRS, Anderson et al. 1981 Nature 290:457-465), later determined to be absent from the human mtDNA sequence according to the revised CRS (rCRS, Andrews et al. 1999 Nature Genetics 23:147); "n" therefore represents a single nucleotide deletion at a position corresponding to nucleotide 3107 of SEQ ID NO:1 as provided herein.
gatcacaggtctatcaccctattaaccactcacgggagctctccatgcatttggtattttcgtctggggggtgtgcacgcgatagcattgcgagacgctggagccggagcaccctatgtcgcagtatctgtctttgattcctgccccatcctattatttatcgcacctacgttcaatattacaggcgaacatacttactaaagtgtgttaattaattaatgcttgtaggacataataataacaattgaatgtctgcacagccgctttccacacagacatcataacaaaaaatttccaccaaaccccccctcccccccgcttctggccacagcacttaaacacatctctgccaaaccccaaaaacaaagaaccctaacaccagcctaaccagatttcaaattttatcttttggcggtatgcacttttaacagtcaccccccaactaacacattattttcccctcccactcccatactactaatctcatcaatacaacccccgcccatcctacccagcacacacacaccgctgctaaccccataccccgaaccaaccaaaccccaaagacaccccccacagtttatgtagcttacctcctcaaagcaatacactgaaaatgtttagacgggctcacatcaccccataaacaaataggtttggtcctagcctttctattagctcttagtaagattacacatgcaagcatccccgttccagtgagttcaccctctaaatcaccacgatcaaaagggacaagcatcaagcacgcagcaatgcagctcaaaacgcttagcctagccacacccccacgggaaacagcagtgattaacctttagcaataaacgaaagtttaactaagctatactaaccccagggttggtcaatttcgtgccagccaccgcggtcacacgattaacccaagtcaatagaagccggcgtaaagagtgttttagatcaccccctccccaataaagctaaaactcacctgagttgtaaaaaactccagttgacacaaaatagactacgaaagtggctttaacatatctgaacacacaatagctaagacccaaactgggattagataccccactatgcttagccctaaacctcaacagttaaatcaacaaaactgctcgccagaacactacgagccacagcttaaaactcaaaggacctggcggtgcttcatatccctctagaggagcctgttctgtaatcgataaaccccgatcaacctcaccacctcttgctcagcctatataccgccatcttcagcaaaccctgatgaaggctacaaagtaagcgcaagtacccacgtaaagacgttaggtcaaggtgtagcccatgaggtggcaagaaatgggctacattttctaccccagaaaactacgatagcccttatgaaacttaagggtcgaaggtggatttagcagtaaactgagagtagagtgcttagttgaacagggccctgaagcgcgtacacaccgcccgtcaccctcctcaagtatacttcaaaggacatttaactaaaacccctacgcatttatatagaggagacaagtcgtaacatggtaagtgtactggaaagtgcacttggacgaaccagagtgtagcttaacacaaagcacccaacttacacttaggagatttcaacttaacttgaccgctctgagctaaacctagccccaaacccactccaccttactaccagacaaccttagccaaaccatttacccaaataaagtataggcgatagaaattgaaacctggcgcaatagatatagtaccgcaagggaaagatgaaaaattataaccaagcataatatagcaaggactaacccctataccttctgcataatgaattaactagaaataactttgcaaggagagccaaagctaagacccccgaaaccagacgagctacctaagaacagctaaaagagcacacccgtctatgtagcaaaatagtgggaagatttataggtagaggcgacaaacctaccgagcctggtgatagctggttgtccaagatagaatcttagttcaactttaaatttgcccacagaaccctctaaatccccttgtaaatttaactgttagtccaaagaggaacagctctttggacactaggaaaaaaccttgtagagagagtaaaaaatttaacacccatagtaggcctaaaagcagccaccaattaagaaagcgttcaagctcaacacccactacctaaaaaatcccaaacatataactgaactcctcacacccaattggaccaatctatcaccctatagaagaactaatgttagtataagtaacatgaaaacattctcctccgcataagcctgcgtcagattaaaacactgaactgacaattaacagcccaatatctacaatcaaccaacaagtcattattaccctcactgtcaacccaacacaggcatgctcataaggaaaggttaaaaaaagtaaaaggaactcggcaaatcttaccccgcctgtttaccaaaaacatcacctctagcatcaccagtattagaggcaccgcctgcccagtgacacatgtttaacggccgcggtaccctaaccgtgcaaaggtagcataatcacttgttccttaaatagggacctgtatgaatggctccacgagggttcagctgtctcttacttttaaccagtgaaattgacctgcccgtgaagaggcgggcataacacagcaagacgagaagaccctatggagctttaatttattaatgcaaacagtacctaacaaacccacaggtcctaaactaccaaacctgcattaaaaatttcggttggggcgacctcggagcagaacccaacctccgagcagtacatgctaagacttcaccagtcaaagcgaactactatactcaattgatccaataacttgaccaacggaacaagttaccctagggataacagcgcaatcctattctagagtccatatcaacaatagggtttacgacctcgatgttggatcaggacatcccaatggtgcagccgctattaaaggttcgtttgttcaacgattaaagtcctacgtgatctgagttcagaccggagtaatccaggtcggtttctatctacnttcaaattcctccctgtacgaaaggacaagagaaataaggcctacttcacaaagcgccttcccccgtaaatgatatcatctcaacttagtattatacccacacccacccaagaacagggtttgttaagatggcagagcccggtaatcgcataaaacttaaaactttacagtcagaggttcaattcctcttcttaacaacatacccatggccaacctcctactcctcattgtacccattctaatcgcaatggcattcctaatgcttaccgaacgaaaaattctaggctatatacaactacgcaaaggccccaacgttgtaggcccctacgggctactacaacccttcgctgacgccataaaactcttcaccaaagagcccctaaaacccgccacatctaccatcaccctctacatcaccgccccgaccttagctctcaccatcgctcttctactatgaacccccctccccatacccaaccccctggtcaacctcaacctaggcctcctatttattctagccacctctagcctagccgtttactcaatcctctgatcagggtgagcatcaaactcaaactacgccctgatcggcgcactgcgagcagtagcccaaacaatctcatatgaagtcaccctagccatcattctactatcaacattactaataagtggctcctttaacctctccacccttatcacaacacaagaacacctctgattactcctgccatcatgacccttggccataatatgatttatctccacactagcagagaccaaccgaacccccttcgaccttgccgaaggggagtccgaactagtctcaggcttcaacatcgaatacgccgcaggccccttcgccctattcttcatagccgaatacacaaacattattataataaacaccctcaccactacaatcttcctaggaacaacatatgacgcactctcccctgaactctacacaacatattttgtcaccaagaccctacttctaacctccctgttcttatgaattcgaacagcatacccccgattccgctacgaccaactcatacacctcctatgaaaaaacttcctaccactcaccctagcattacttatatgatatgtctccatacccattacaatctccagcattccccctcaaacctaagaaatatgtctgataaaagagttactttgatagagtaaataataggagcttaaacccccttatttctaggactatgagaatcgaacccatccctgagaatccaaaattctccgtgccacctatcacaccccatcctaaagtaaggtcagctaaataagctatcgggcccataccccgaaaatgttggttatacccttcccgtactaattaatcccctggcccaacccgtcatctactctaccatctttgcaggcacactcatcacagcgctaagctcgcactgattttttacctgagtaggcctagaaataaacatgctagcttttattccagttctaaccaaaaaaataaaccctcgttccacagaagctgccatcaagtatttcctcacgcaagcaaccgcatccataatccttctaatagctatcctcttcaacaatatactctccggacaatgaaccataaccaatactaccaatcaatactcatcattaataatcataatggctatagcaataaaactaggaatagccccctttcacttctgagtcccagaggttacccaaggcacccctctgacatccggcctgcttcttctcacatgacaaaaactagcccccatctcaatcatataccaaatctctccctcactaaacgtaagccttctcctcactctctcaatcttatccatcatagcaggcagttgaggtggattaaaccaaacccagctacgcaaaatcttagcatactcctcaattacccacataggatgaataatagcagttctaccgtacaaccctaacataaccattcttaatttaactatttatattatcctaactactaccgcattcctactactcaacttaaactccagcaccacgaccctactactatctcgcacctgaaacaagctaacatgactaacacccttaattccatccaccctcctctccctaggaggcctgcccccgctaaccggctttttgcccaaatgggccattatcgaagaattcacaaaaaacaatagcctcatcatccccaccatcatagccaccatcaccctccttaacctctacttctacctacgcctaatctactccacctcaatcacactactccccatatctaacaacgtaaaaataaaatgacagtttgaacatacaaaacccaccccattcctccccacactcatcgcccttaccacgctactcctacctatctccccttttatactaataatcttatagaaatttaggttaaatacagaccaagagccttcaaagccctcagtaagttgcaatacttaatttctgtaacagctaaggactgcaaaaccccactctgcatcaactgaacgcaaatcagccactttaattaagctaagcccttactagaccaatgggacttaaacccacaaacacttagttaacagctaagcaccctaatcaactggcttcaatctacttctcccgccgccgggaaaaaaggcgggagaagccccggcaggtttgaagctgcttcttcgaatttgcaattcaatatgaaaatcacctcggagctggtaaaaagaggcctaacccctgtctttagatttacagtccaatgcttcactcagccattttacctcacccccactgatgttcgccgaccgttgactattctctacaaaccacaaagacattggaacactatacctattattcggcgcatgagctggagtcctaggcacagctctaagcctccttattcgagccgagctgggccagccaggcaaccttctaggtaacgaccacatctacaacgttatcgtcacagcccatgcatttgtaataatcttcttcatagtaatacccatcataatcggaggctttggcaactgactagttcccctaataatcggtgcccccgatatggcgtttccccgcataaacaacataagcttctgactcttacctccctctctcctactcctgctcgcatctgctatagtggaggccggagcaggaacaggttgaacagtctaccctcccttagcagggaactactcccaccctggagcctccgtagacctaaccatcttctccttacacctagcaggtgtctcctctatcttaggggccatcaatttcatcacaacaattatcaatataaaaccccctgccataacccaataccaaacgcccctcttcgtctgatccgtcctaatcacagcagtcctacttctcctatctctcccagtcctagctgctggcatcactatactactaacagaccgcaacctcaacaccaccttcttcgaccccgccggaggaggagaccccattctataccaacacctattctgatttttcggtcaccctgaagtttatattcttatcctaccaggcttcggaataatctcccatattgtaacttactactccggaaaaaaagaaccatttggatacataggtatggtctgagctatgatatcaattggcttcctagggtttatcgtgtgagcacaccatatatttacagtaggaatagacgtagacacacgagcatatttcacctccgctaccataatcatcgctatccccaccggcgtcaaagtatttagctgactcgccacactccacggaagcaatatgaaatgatctgctgcagtgctctgagccctaggattcatctttcttttcaccgtaggtggcctgactggcattgtattagcaaactcatcactagacatcgtactacacgacacgtactacgttgtagcccacttccactatgtcctatcaataggagctgtatttgccatcataggaggcttcattcactgatttcccctattctcaggctacaccctagaccaaacctacgccaaaatccatttcactatcatattcatcggcgtaaatctaactttcttcccacaacactttctcggcctatccggaatgccccgacgttactcggactaccccgatgcatacaccacatgaaacatcctatcatctgtaggctcattcatttctctaacagcagtaatattaataattttcatgatttgagaagccttcgcttcgaagcgaaaagtcctaatagtagaagaaccctccataaacctggagtgactatatggatgccccccaccctaccacacattcgaagaacccgtatacataaaatctagacaaaaaaggaaggaatcgaaccccccaaagctggtttcaagccaaccccatggcctccatgactttttcaaaaaggtattagaaaaaccatttcataactttgtcaaagttaaattataggctaaatcctatatatcttaatggcacatgcagcgcaagtaggtctacaagacgctacttcccctatcatagaagagcttatcacctttcatgatcacgccctcataatcattttccttatctgcttcctagtcctgtatgcccttttcctaacactcacaacaaaactaactaatactaacatctcagacgctcaggaaatagaaaccgtctgaactatcctgcccgccatcatcctagtcctcatcgccctcccatccctacgcatcctttacataacagacgaggtcaacgatccctcccttaccatcaaatcaattggccaccaatggtactgaacctacgagtacaccgactacggcggactaatcttcaactcctacatacttcccccattattcctagaaccaggcgacctgcgactccttgacgttgacaatcgagtagtactcccgattgaagcccccattcgtataataattacatcacaagacgtcttgcactcatgagctgtccccacattaggcttaaaaacagatgcaattcccggacgtctaaaccaaaccactttcaccgctacacgaccgggggtatactacggtcaatgctctgaaatctgtggagcaaaccacagtttcatgcccatcgtcctagaattaattcccctaaaaatctttgaaatagggcccgtatttaccctatagcaccccctctaccccctctagagcccactgtaaagctaacttagcattaaccttttaagttaaagattaagagaaccaacacctctttacagtgaaatgccccaactaaatactaccgtatggcccaccataattacccccatactccttacactattcctcatcacccaactaaaaatattaaacacaaactaccacctacctccctcaccaaagcccataaaaataaaaaattataacaaaccctgagaaccaaaatgaacgaaaatctgttcgcttcattcattgcccccacaatcctaggcctacccgccgcagtactgatcattctatttccccctctattgatccccacctccaaatatctcatcaacaaccgactaatcaccacccaacaatgactaatcaaactaacctcaaaacaaatgataaccatacacaacactaaaggacgaacctgatctcttatactagtatccttaatcatttttattgccacaactaacctcctcggactcctgcctcactcatttacaccaaccacccaactatctataaacctagccatggccatccccttatgagcgggcgcagtgattataggctttcgctctaagattaaaaatgccctagcccacttcttaccacaaggcacacctacaccccttatccccatactagttattatcgaaaccatcagcctactcattcaaccaatagccctggccgtacgcctaaccgctaacattactgcaggccacctactcatgcacctaattggaagcgccaccctagcaatatcaaccattaaccttccctctacacttatcatcttcacaattctaattctactgactatcctagaaatcgctgtcgccttaatccaagcctacgttttcacacttctagtaagcctctacctgcacgacaacacataatgacccaccaatcacatgcctatcatatagtaaaacccagcccatgacccctaacaggggccctctcagccctcctaatgacctccggcctagccatgtgatttcacttccactccataacgctcctcatactaggcctactaaccaacacactaaccatataccaatgatggcgcgatgtaacacgagaaagcacataccaaggccaccacacaccacctgtccaaaaaggccttcgatacgggataatcctatttattacctcagaagtttttttcttcgcaggatttttctgagccttttaccactccagcctagcccctaccccccaattaggagggcactggcccccaacaggcatcaccccgctaaatcccctagaagtcccactcctaaacacatccgtattactcgcatcaggagtatcaatcacctgagctcaccatagtctaatagaaaacaaccgaaaccaaataattcaagcactgcttattacaattttactgggtctctattttaccctcctacaagcctcagagtacttcgagtctcccttcaccatttccgacggcatctacggctcaacattttttgtagccacaggcttccacggacttcacgtcattattggctcaactttcctcactatctgcttcatccgccaactaatatttcactttacatccaaacatcactttggcttcgaagccgccgcctgatactggcattttgtagatgtggtttgactatttctgtatgtctccatctattgatgagggtcttactcttttagtataaatagtaccgttaacttccaattaactagttttgacaacattcaaaaaagagtaataaacttcgccttaattttaataatcaacaccctcctagccttactactaataattattacattttgactaccacaactcaacggctacatagaaaaatccaccccttacgagtgcggcttcgaccctatatcccccgcccgcgtccctttctccataaaattcttcttagtagctattaccttcttattatttgatctagaaattgccctccttttacccctaccatgagccctacaaacaactaacctgccactaatagttatgtcatccctcttattaatcatcatcctagccctaagtctggcctatgagtgactacaaaaaggattagactgaaccgaattggtatatagtttaaacaaaacgaatgatttcgactcattaaattatgataatcatatttaccaaatgcccctcatttacataaatattatactagcatttaccatctcacttctaggaatactagtatatcgctcacacctcatatcctccctactatgcctagaaggaataatactatcgctgttcattatagctactctcataaccctcaacacccactccctcttagccaatattgtgcctattgccatactagtctttgccgcctgcgaagcagcggtgggcctagccctactagtctcaatctccaacacatatggcctagactacgtacataacctaaacctactccaatgctaaaactaatcgtcccaacaattatattactaccactgacatgactttccaaaaaacacataatttgaatcaacacaaccacccacagcctaattattagcatcatccctctactattttttaaccaaatcaacaacaacctatttagctgttccccaaccttttcctccgaccccctaacaacccccctcctaatactaactacctgactcctacccctcacaatcatggcaagccaacgccacttatccagtgaaccactatcacgaaaaaaactctacctctctatactaatctccctacaaatctccttaattataacattcacagccacagaactaatcatattttatatcttcttcgaaaccacacttatccccaccttggctatcatcacccgatgaggcaaccagccagaacgcctgaacgcaggcacatacttcctattctacaccctagtaggctcccttcccctactcatcgcactaatttacactcacaacaccctaggctcactaaacattctactactcactctcactgcccaagaactatcaaactcctgagccaacaacttaatatgactagcttacacaatagcttttatagtaaagatacctctttacggactccacttatgactccctaaagcccatgtcgaagcccccatcgctgggtcaatagtacttgccgcagtactcttaaaactaggcggctatggtataatacgcctcacactcattctcaaccccctgacaaaacacatagcctaccccttccttgtactatccctatgaggcataattataacaagctccatctgcctacgacaaacagacctaaaatcgctcattgcatactcttcaatcagccacatagccctcgtagtaacagccattctcatccaaaccccctgaagcttcaccggcgcagtcattctcataatcgcccacgggcttacatcctcattactattctgcctagcaaactcaaactacgaacgcactcacagtcgcatcataatcctctctcaaggacttcaaactctactcccactaatagctttttgatgacttctagcaagcctcgctaacctcgccttaccccccactattaacctactgggagaactctctgtgctagtaaccacgttctcctgatcaaatatcactctcctacttacaggactcaacatactagtcacagccctatactccctctacatatttaccacaacacaatggggctcactcacccaccacattaacaacataaaaccctcattcacacgagaaaacaccctcatgttcatacacctatcccccattctcctcctatccctcaaccccgacatcattaccgggttttcctcttgtaaatatagtttaaccaaaacatcagattgtgaatctgacaacagaggcttacgaccccttatttaccgagaaagctcacaagaactgctaactcatgcccccatgtctaacaacatggctttctcaacttttaaaggataacagctatccattggtcttaggccccaaaaattttggtgcaactccaaataaaagtaataaccatgcacactactataaccaccctaaccctgacttccctaattccccccatccttaccaccctcgttaaccctaacaaaaaaaactcatacccccattatgtaaaatccattgtcgcatccacctttattatcagtctcttccccacaacaatattcatgtgcctagaccaagaagttattatctcgaactgacactgagccacaacccaaacaacccagctctccctaagcttcaaactagactacttctccataatattcatccctgtagcattgttcgttacatggtccatcatagaattctcactgtgatatataaactcagacccaaacattaatcagttcttcaaatatctactcatcttcctaattaccatactaatcttagttaccgctaacaacctattccaactgttcatcggctgagagggcgtaggaattatatccttcttgctcatcagttgatgatacgcccgagcagatgccaacacagcagccattcaagcaatcctatacaaccgtatcggcgatatcggtttcatcctcgccttagcatgatttatcctacactccaactcatgagacccacaacaaatagcccttctaaacgctaatccaagcctcaccccactactaggcctcctcctagcagcagcaggcaaatcagcccaattaggtctccacccctgactcccctcagccatagaaggccccaccccagtctcagccctactccactcaagcactatagttgtagcaggaatcttcttactcatccgcttccaccccctagcagaaaatagcccactaatccaaactctaacactatgcttaggcgctatcaccactctgttcgcagcagtctgcgcccttacacaaaatgacatcaaaaaaatcgtagccttctccacttcaagtcaactaggactcataatagttacaatcggcatcaaccaaccacacctagcattcctgcacatctgtacccacgccttcttcaaagccatactatttatgtgctccgggtccatcatccacaaccttaacaatgaacaagatattcgaaaaataggaggactactcaaaaccatacctctcacttcaacctccctcaccattggcagcctagcattagcaggaatacctttcctcacaggtttctactccaaagaccacatcatcgaaaccgcaaacatatcatacacaaacgcctgagccctatctattactctcatcgctacctccctgacaagcgcctatagcactcgaataattcttctcaccctaacaggtcaacctcgcttccccacccttactaacattaacgaaaataaccccaccctactaaaccccattaaacgcctggcagccggaagcctattcgcaggatttctcattactaacaacatttcccccgcatcccccttccaaacaacaatccccctctacctaaaactcacagccctcgctgtcactttcctaggacttctaacagccctagacctcaactacctaaccaacaaacttaaaataaaatccccactatgcacattttatttctccaacatactcggattctaccctagcatcacacaccgcacaatcccctatctaggccttcttacgagccaaaacctgcccctactcctcctagacctaacctgactagaaaagctattacctaaaacaatttcacagcaccaaatctccacctccatcatcacctcaacccaaaaaggcataattaaactttacttcctctctttcttcttcccactcatcctaaccctactcctaatcacataacctattcccccgagcaatctcaattacaatatatacaccaacaaacaatgttcaaccagtaactactactaatcaacgcccataatcatacaaagcccccgcaccaataggatcctcccgaatcaaccctgacccctctccttcataaattattcagcttcctacactattaaagtttaccacaaccaccaccccatcatactctttcacccacagcaccaatcctacctccatcgctaaccccactaaaacactcaccaagacctcaacccctgacccccatgcctcaggatactcctcaatagccatcgctgtagtatatccaaagacaaccatcattccccctaaataaattaaaaaaactattaaacccatataacctcccccaaaattcagaataataacacacccgaccacaccgctaacaatcaatactaaacccccataaataggagaaggcttagaagaaaaccccacaaaccccattactaaacccacactcaacagaaacaaagcatacatcattattctcgcacggactacaaccacgaccaatgatatgaaaaaccatcgttgtatttcaactacaagaacaccaatgaccccaatacgcaaaactaaccccctaataaaattaattaaccactcattcatcgacctccccaccccatccaacatctccgcatgatgaaacttcggctcactccttggcgcctgcctgatcctccaaatcaccacaggactattcctagccatgcactactcaccagacgcctcaaccgccttttcatcaatcgcccacatcactcgagacgtaaattatggctgaatcatccgctaccttcacgccaatggcgcctcaatattctttatctgcctcttcctacacatcgggcgaggcctatattacggatcatttctctactcagaaacctgaaacatcggcattatcctcctgcttgcaactatagcaacagccttcataggctatgtcctcccgtgaggccaaatatcattctgaggggccacagtaattacaaacttactatccgccatcccatacattgggacagacctagttcaatgaatctgaggaggctactcagtagacagtcccaccctcacacgattctttacctttcacttcatcttgcccttcattattgcagccctagcagcactccacctcctattcttgcacgaaacgggatcaaacaaccccctaggaatcacctcccattccgataaaatcaccttccacccttactacacaatcaaagacgccctcggcttacttctcttccttctctccttaatgacattaacactattctcaccagacctcctaggcgacccagacaattataccctagccaaccccttaaacacccctccccacatcaagcccgaatgatatttcctattcgcctacacaattctccgatccgtccctaacaaactaggaggcgtccttgccctattactatccatcctcatcctagcaataatccccatcctccatatatccaaacaacaaagcataatatttcgcccactaagccaatcactttattgactcctagccgcagacctcctcattctaacctgaatcggaggacaaccagtaagctacccttttaccatcattggacaagtagcatccgtactatacttcacaacaatcctaatcctaataccaactatctccctaattgaaaacaaaatactcaaatgggcctgtccttgtagtataaactaatacaccagtcttgtaaaccggagatgaaaacctttttccaaggacaaatcagagaaaaagtctttaactccaccattagcacccaaagctaagattctaatttaaactattctctgttctttcatggggaagcagatttgggtaccacccaagtattgactcacccatcaacaaccgctatgtatttcgtacattactgccagccaccatgaatattgtacggtaccataaatacttgaccacctgtagtacatgaaaacccaatccacatcaaaaccccctccccatgcttacaagcaagtacagcaatcaaccctcaactatcacacatcaactgcaactccaaagccacccctcacccactaggataccaacaaacctacccacccttaacagtacatagtacataaagccatttaccgtacatagcacattacagtcaaatcccttctcgtccccatggatgacccccctcagataggggtcccttgaccaccatcctccgtgaaatcaatatcccgcacaagagtgctactctcctcgctccgggcccataacacttgggggtagctaaagtgaactgtatccgacatctggttcctacttcagggccataaagcctaaatagcccacacgttccccttaaataagacatcacgatg

SEQ ID NO: 446 - DNA, 16571 bp, Homo sapiens mitochondrial
  3109: "n" refers to a nucleotide at position 3107 of the Cambridge Reference Sequence (CRS, Anderson et al. 1981 Nature 290:457-465), later determined to be absent from the human mtDNA sequence according to the revised CRS (rCRS, Andrews et al. 1999 Nature Genetics 23:147); "n" therefore represents a single nucleotide deletion at a position corresponding to nucleotide 3107 of SEQ ID NO:1 as provided herein.
gatcacaggtctatcaccctattaaccactcacgggagctctccatgcatttggtattttcgtctggggggtgtgcacgcgatagcattgcgagacgctggagccggagcaccctatgtcgcagtatctgtctttgattcctgcctcatcccattatttatcgcacctacgttcaatattacaggcgagcatatctactaaagcgtattaattaattaatgcttgtaggacataataataacaattgaatgtctgcacagccgctttccacacagacatcataacaaaaaatttccaccaaaccccccctcccccccgcttctggccacagcacttaaacacatctctgccaaaccccaaaaacaaagaaccctaacaccagcctaaccagatttcaaattttatcttttggcggtatgcacttttaacagtcaccccccaactaacacattattttcccctcccactcccatactactaatctcatcaatacaacccccgcccatcctacccagcacacacacaccgctgctaaccccataccccgaaccaaccaaaccccaaagacaccccccacagtttatgtagcttacctcctcaaagcaatacactgaaaatgtttagacgggctcacatcaccccataaacaaataggtttggtcctagcctttctattagctcttagtaagattacacatgcaagcatccccattccagtgagttcaccctctaaatcaccacgatcaaaagggacaagcatcaagcacgcagcaatgcagctcaaaacgcttagcctagccacacccccacgggaaacagcagtgattaacctttagcaataaacgaaagtttaactaagctatactaaccccagggttggtcaatttcgtgccagccaccgcggtcacacgattaacccaagtcaatagaagccggcgtaaagagtgttttagatcaccccctccccaataaagctaaaactcacctgagttgtaaaaaactccagttgacacaaaatagactacgaaagtggctttaacatatctgaacacacaatagctaagacccaaactgggattagataccccactatgcttagccctaaacctcaacagttaaatcaacaaaactgctcgccagaacactacgagccacagcttaaaactcaaaggacctggcggtgcttcatatccctctagaggagcctgttctgtaatcgataaaccccgatcaacctcaccaccccttgctcagcctatataccgccatcttcagcaaaccctgatgaaggctacaaagtaagcgcaagtacccacgtaaagacgttaggtcaaggtgtagcccatgaggtggcaagaaatgggctacattttctaccccagaaaactacgatagcccttatgaaacctaagggtcgaaggtggatttagcagtaaactgagagtagagtgcttagttgaacagggccctgaagcgcgtacacaccgcccgtcaccctcctcaagtatacttcaaaggacatttaactaaaacccctacgcatttatatagaggagacaagtcgtaacatggtaagtgtactggaaagtgcacttggacgaaccagagtgtagcttaacacaaagcacccaacttacacttaggagatttcaacttaacttgaccgctctgagctaaacctagccccaaacccactccaccttactaccagacaaccttagccaaaccatttacccaaataaagtataggcgatagaaattgaaacctggcgcaatagatatagtaccgcaagggaaagatgaaaaattataaccaagcataatatagcaaggactaacccctataccttctgcataatgaattaactagaaataactttgcaaggagagccaaagctaagacccccgaaaccagacgagctacctaagaacagctaaaagagcacacccgtctatgtagcaaaatagtgggaagatttataggtagaggcgacaaacctaccgagcctggtgatagctggttgtccaagatagaatcttagttcaactttaaatttgcccacagaaccctctaaatccccttgtaaatttaactgttagtccaaagaggaacagctctttggacactaggaaaaaaccttgtagagagagtaaaaaatttaacacccatagtaggcctaaaagcagccaccaattaagaaagcgttcaagctcaacacccactacctaaaaaatcccaaacatataactgaactcctcacacccaattggaccaatctatcaccctatagaagaactaatgttagtataagtaacatgaaaacattctcctccgcataagcctgcgtcagattaaaacactgaactgacaattaacagcccaatatctacaatcaaccaacaagtcattattaccctcactgtcaacccaacacaggcatgctcataaggaaaggttaaaaaaagtaaaaggaactcggcaaatcttaccccgcctgtttaccaaaaacatcacctctagcatcaccagtattagaggcaccgcctgcccagtgacacatgtttaacggccgcggtaccctaaccgtgcaaaggtagcataatcacttgttccttaaatagggacctgtatgaatggctccacgagggttcagctgtctcttacttttaaccagtgaaattgacctgcccgtgaagaggcgggcatgacacagcaagacgagaagaccctatggagctttaatttattaatgcaaacagtacctaacaaacccacaggtcctaaactaccaaacctgcattaaaaatttcggttggggcgacctcggagcagaacccaacctccgagcagtacatgctaagacttcaccagtcaaagcgaactactatactcaattgatccaataacttgaccaacggaacaagttaccctagggataacagcgcaatcctattctagagtccatatcaacaatagggtttacgacctcgatgttggatcaggacatcccgatggtgcagccgctattaaaggttcgtttgttcaacgattaaagtcctacgtgatctgagttcagaccggagtaatccaggtcggtttctatctacnttcaaattcctccctgtacgaaaggacaagagaaataaggcctacttcacaaagcgccttcccccgtaaatgatatcatctcaacttagtattatacccacacccacccaagaacagggtttgttaagatggcagagcccggtaatcgcataaaacttaaaactttacagtcagaggttcaattcctcttcttaacaacatacccatgaccaacctcctactcctcattgtacccattctaatcgcaatggcattcctaatgcttaccgaacgaaaaattctaggctatatacaactacgcaaaggccccaacgttgtaggcccctacgggctactacaacccttcgctgacgccataaaactcttcaccaaagagcccctaaaacccgccacatctgccatcaccctctacatcaccgccccgaccttagctctcaccatcgctcttctactatgaacccccctccccatacccaaccccctggtcaacctcaacctaggcctcctatttattctagccacctctagcctagccgtttactcaatcctctgatcagggtgagcatcaaactcaaactacgccctgatcggcgcactgcgagcagtagcccaaacaatctcatatgaagtcaccctagccatcattctactatcaacattactaataagtggctcctttaacctctccacccttatcacaacacaagaacacctctgattactcctgccatcatgacccttggccataatatgatttatctccacactagcagagaccaaccgaacccccttcgaccttgccgaaggggagtccgaactagtctcaggcttcaacatcgaatacgccgcaggccccttcgccctattcttcatagccgaatacacaaacattattataataaacaccctcaccactacaatcttcctaggaacaacatatgacgcactctcccctgaactctacacaacatattttgtcaccaagaccctacttctaacctccctgttcttatgaattcgaacagcatacccccgattccgctacgaccaactcatacacctcctatgaaaaaacttcctaccactcaccctagcattacttatatgatatgtctccatacccattacaatctccagcattccccctcaaacctaagaaatatgtctgataaaagagttactttgatagagtaaataataggagcttaaacccccttatttctaggactatgagaatcgaacccatccctgagaatccaaaattctccgtgccacctatcacaccccatcctaaagtaaggtcagctaaataagctatcgggcccataccccgaaaatgttggttatacccttcccgtactaattaatcccctggcccaacccgtcatctactctaccatctttgcaggcacactcatcacagcgctaagctcgcactgattttttacctgagtaggcctagaaataaacatgctagcttttattccagttctaaccaaaaaaataaaccctcgttccacagaagctgccatcaagtatttcctcacgcaagcaaccgcatccataatccttctaatagctatcctcttcaacaatatactctccggacaatgaaccataaccaatactaccaatcaatactcatcattaataatcataatggctatagcaataaaactaggaatagccccctttcacttctgagtcccagaggttacccaaggcacccctctgacatccggcctgcttcttctcacatgacaaaaactagcccccatctcaatcatataccaaatctctccctcactaaacgtaagccttctcctcactctctcaatcttatccatcatagcaggcagttgaggtggattaaaccaaacccaactacgcaaaatcttagcatactcctcaattacccacataggatgaataatagcaattctaccgtacaaccctaacataaccattcttaatttaactatttatattatcctaactactaccgcattcctactactcaacttaaactccagcaccacgaccctactactatctcgcacctgaaacaagctaacatgactaacacccttaattccatccaccctcctctccctaggaggcctgcccccgctaaccggctttttgcccaaatgggccattatcgaagaattcacaaaaaacaatagcctcatcatccccaccatcatagccaccatcaccctccttaacctctacttctacctacgcctaatctactccacctcaatcacactactccccatatctaacaacgtaaaaataaaatgacagtttgaacatacaaaacccaccccattcctccccacactcatcacccttaccacgctactcctacctatctccccttttatactaataatcttatagaaatttaggttaaatacagaccaagagccttcaaagccctcagtaagttgcaatacttaatttctgtaacagctaaggactgcaaaaccccactctgcatcaactgaacgcaaatcagccactttaattaagctaagcccttactagaccaatgggacttaaacccacaaacacttagttaacagctaagcaccctaatcaactggcttcaatctacttctcccgccgccgggaaaaaaggcgggagaagccccggcaggtttgaagctgcttcttcgaatttgcaattcaatatgaaaatcacctcggagctggtaaaaagaggcctaacccctgtctttagatttacagtccaatgcttcactcagccattttacctcacccccactgatgttcgccgaccgttgactattctctacaaaccacaaagacattggaacactatacctattattcggcgcatgagctggagtcctaggcacagctctaagcctccttattcgagccgagctgggccagccaggcaaccttctaggtaacgaccacatctacaacgttatcgtcacagcccatgcatttgtaataatcttcttcatagtaatacccatcataatcggaggctttggcaactgactagttcccctaataatcggtgcccccgatatggcgtttccccgcataaacaacataagcttctgactcttacctccctctctcctactcctgctcgcatctgctatagtggaggccggagcaggaacaggttgaacagtctaccctcccttagcagggaactactcccaccctggagcctccgtagacctaaccatcttctccttacacctagcaggtgtctcctctatcttaggggccatcaatttcatcacaacaattatcaatataaaaccccctgccataacccaataccaaacgcccctcttcgtctgatccgtcctaatcacagcagtcctacttctcctatctctcccagtcctagctgctggcatcactatactactaacagaccgcaacctcaacaccaccttcttcgaccccgccggaggaggagaccccattctataccaacacctattctgatttttcggtcaccctgaagtttatattcttatcctaccaggcttcggaataatctcccatattgtaacttactactccggaaaaaaagaaccatttggatacataggtatggtctgagctatgatatcaattggcttcctagggtttatcgtgtgagcacaccatatatttacagtaggaatagacgtagacacacgagcatatttcacctccgctaccataatcatcgctatccccaccggcgtcaaagtatttagctgactcgccacactccacggaagcaatatgaaatgatctgctgcagtgctctgagccctaggattcatctttcttttcaccgtaggtggcctgactggcattgtattagcaaactcatcactagacatcgtactacacgacacgtactacgttgtagctcacttccactatgtcctatcaataggagctgtatttgccatcataggaggcttcattcactgatttcccctattctcaggctacaccctagaccaaacctacgccaaaatccatttcactatcatattcatcggcgtaaatctaactttcttcccacaacactttctcggcctatccggaatgccccgacgttactcggactaccccgatgcatacaccacatgaaacatcctatcatctgtaggctcattcatttctctaacagcagtaatattaataattttcatgatttgagaagccttcgcttcgaagcgaaaagtcctaatagtagaagaaccctccataaacctggagtgactatatggatgccccccaccctaccacacattcgaagaacccgtatacataaaatctagacaaaaaaggaaggaatcgaaccccccaaagctggtttcaagccaaccccatggcctccatgactttttcaaaaaggtattagaaaaaccatttcataactttgtcaaagttaaattataggctaaatcctatatatcttaatggcacatgcagcgcaagtaggtctacaagacgctacttcccctatcatagaagagcttatcacctttcatgatcacgccctcataatcattttccttatctgcttcctagtcctgtatgcccttttcctaacactcacaacaaaactaactaatactaacatctcagacgctcaggaaatagaaaccgtctgaactatcctgcccgccatcatcctagtcctcatcgccctcccatccctacgcatcctttacataacagacgaggtcaacgatccctcccttaccatcaaatcaattggccaccaatggtactgaacctacgagtacaccgactacggcggactaatcttcaactcctacatacttcccccattattcctagaaccaggcgacctgcgactccttgacgttgacaatcgagtagtactcccgattgaagcccccattcgtataataattacatcacaagacgtcttgcactcatgagctgtccccacattaggcttaaaaacagatgcaattcccggacgtctaaaccaaaccactttcaccgctacacgaccgggggtatactacggtcaatgctctgaaatctgtggagcaaaccacagtttcatgcccatcgtcctagaattaattcccctaaaaatctttgaaataggacccgtatttaccctatagcaccccctctaccccctctagagcccactgtaaagctaacttagcattaaccttttaagttaaagattaagagaaccaacacctctttacagtgaaatgccccaactaaatactaccgtatggcccaccataattacccccatactccttacactattcctcatcacccaactaaaaatattaaacacaaactaccacctacctccctcaccaaagcccataaaaataaaaaattataacaaaccctgagaaccaaaatgaacgaaaatctgttcgcttcattcattgcccccacaatcctaggcctacccgccgcagtactgatcattctatttccccctctattgatccccacctccaaatatctcatcaacaaccgactaatcaccacccaacaatgactaatcaaactaacctcaaaacaaatgataaccatacacaacactaaaggacgaacctgatctcttatactagtatccttaatcatttttattgccacaactaacctcctcggactcctgcctcactcatttacaccaaccacccaactatctataaacctagccatggccatccccttatgagcgggcgcagtgattataggctttcgctctaagattaaaaatgccctagcccacttcttaccacaaggcacacctacaccccttatccccatactagttattatcgaaaccatcagcctactcattcaaccaatagccctagccgtacgcctaaccgctaacattactgcaggccacctactcatgcacctaattggaagcgccaccctagcaatatcaaccattaaccttccctctacacttatcatcttcacaattctaattctactgactatcctagaaatcgctgtcgccttaatccaagcctacgttttcacacttctagtaagcctctacctgcacgacaacacataatgacccaccaatcacatgcctatcatatagtaaaacccagcccatgacccctaacaggggccctctcagccctcctaatgacctccggcctagccatgtgatttcacttccactccataacgctcctcatactaggcctactaaccaacacactaaccatataccaatgatggcgcgatgtaacacgagaaagcacataccaaggccaccacacaccacctgtccaaaaaggccttcgatacgggataatcctatttattacctcagaagtttttttcttcgcaggatttttctgagccttttaccactccagcctagcccctaccccccaattaggagggcactggcccccaacaggcatcaccccgctaaatcccctagaagtcccactcctaaacacatccgtattactcgcatcaggagtatcaatcacctgagctcaccatagtctaatagaaaacaaccgaaaccaaataattcaagcactgcttattacaattttactgggtctctattttaccctcctacaagcctcagagtacttcgagtctcccttcaccatttccgacggcatctacggctcaacattttttgtagccacaggcttccacggacttcacgtcattattggctcaactttcctcactatctgcttcatccgccaactaatatttcactttacatccaaacatcactttggcttcgaagccgccgcctgatactggcattttgtagatgtggtttgactatttctgtatgtctccatctattgatgagggtcttactcttttagtataaatagtaccgttaacttccaattaactagttttgacaacattcaaaaaagagtaataaacttcgccttaattttaataatcaacaccctcctagccttactactaataattattacattttgactaccacaactcaacggctacatagaaaaatccaccccttacgagtgcggcttcgaccctatatcccccgcccgcgtccctttctccataaaattcttcttagtagctattaccttcttattatttgatctagaaattgccctccttttacccctaccatgagccctacaaacaactaacctgccactaatagttatgtcatccctcttattaatcatcatcctagccctaagtctggcctatgagtgactacaaaaaggattagactgaaccgaattggtatatagtttaaacaaaacgaatgatttcgactcattaaattatgataatcatatttaccaaatgcccctcatttacataaatattatactagcatttaccatctcacttctaggaatactagtatatcgctcacacctcatatcctccctactatgcctagaaggaataatactatcgctgttcattatagctactctcataaccctcaacacccactccctcttagccaatattgtgcctattgccatactagtctttgccgcctgcgaagcagcggtgggcctagccctactagtctcaatctccaacacatatggcctagactacgtacataacctaaacctactccaatgctaaaactaatcgtcccaacaattatattactaccactgacatgactttccaaaaaacacataatttgaatcaacacaaccacccacagcctaattattagcatcatccctctactattttttaaccaaatcaacaacaacctatttagctgttccccaaccttttcctccgaccccctaacaacccccctcctaatactaactacctgactcctacccctcacaatcatggcaagccaacgccacttatccagtgaaccactatcacgaaaaaaactctacctctctatactaatctccctacaaatctccttaattataacattcacagccacagaactaatcatattttatatcttcttcgaaaccacacttatccccaccttggctatcatcacccgatgaggcaaccagccagaacgcctgaacgcaggcacatacttcctattctacaccctagtaggctcccttcccctactcatcgcactaatttacactcacaacaccctaggctcactaaacattctactactcactctcactgcccaagaactatcaaactcctgagccaacaacttaatatgactagcttacacaatagcttttatagtaaagatacctctttacggactccacttatgactccctaaagcccatgtcgaagcccccatcgctgggtcaatagtacttgccgcagtactcttaaaactaggcggctatggtataatacgcctcacactcattctcaaccccctgacaaaacacatagcctaccccttccttgtactatccctatgaggcataattataacaagctccatctgcctacgacaaacagacctaaaatcgctcattgcatactcttcaatcagccacatagccctcgtagtaacagccattctcatccaaactccctgaagcttcaccggcgcagtcattctcataatcgcccacggacttacatcctcattactattctgcctagcaaactcaaactacgaacgcactcacagtcgcatcataatcctctctcaaggacttcaaactctactcccactaatagctttttgatgacttctagcaagcctcgctaacctcgccttaccccccactattaacctactgggagaactctctgtgctagtaaccacgttctcctgatcaaatatcactctcctacttacgggactcaacatactagtcacagccctatactccctctacatatttaccacaacacaatggggctcactcacccaccacattaacaacataaaaccctcattcacacgagaaaacaccctcatgttcatacacctatcccccattctcctcctatccctcaaccccgacatcattaccgggttttcctcttgtaaatatagtttaaccaaaacatcagattgtgaatctgacaacagaggcttacgaccccttatttaccgagaaagctcacaagaactgctaactcatgcccccatgtctaacaacatggctttctcaacttttaaaggataacagctatccattggtcttaggccccaaaaattttggtgcaactccaaataaaagtaataaccatgcacactactataaccaccctaaccctgacttccctaattccccccatccttaccaccctcgttaaccccaacaaaaaaaactcatacccccattatgtaaaatccattgtcgcatccacctttattatcagtctcttccccacaacaatattcatgtgcctagaccaagaagttattatctcgaactgacactgagccacaacccaaacaacccagctctccctaagcttcaaactagactacttctccataatattcatccctgtagcattgttcgttacatggtccatcatagaattctcactgtgatatataaactcagacccaaacattaatcagttcttcaaatatctactcattttcctaattaccatactaatcttagttaccgctaacaacctattccaactgttcatcggctgagagggcgtaggaattatatccttcttgctcatcagttgatgatacgcccgagcagatgccaacacagcagccattcaagcaatcctatacaaccgtatcggcgatatcggtttcatcctcgccttagcatgatttatcctacactccaactcatgagacccacaacaaatagcccttctaaacgctaatccaagcctcaccccactactaggcctcctcctagcagcagcaggcaaatcagcccaattaggtctccacccctgactcccctcagccatagaaggccccaccccagtctcagccctactccactcaagcactatagttgtagcaggaatcttcttactcatccgcttccaccccctagcagaaaatagcccactaatccaaactctaacactatgcttaggcgctatcaccactctgttcgcagcagtctgcgcccttacacaaaatgacatcaaaaaaatcgtagccttctccacttcaagtcagctaggactcataatagttacaatcggcatcaaccaaccacacctagcattcctgcacatctgtacccacgccttcttcaaagccatactatttatgtgctccgggtccatcatccacaaccttaacaatgaacaagatattcgaaaaataggaggactactcaaaaccatacctctcacttcaacctccctcaccattggcagcctagcattagcaggaatacctttcctcacaggtttctactccaaagaccacatcatcgaaaccgcaaacatatcatacacaaacgcctgagccctatctattactctcatcgctacctccctgacaagcgcctatagcactcgaataattcttctcaccctaacaggtcaacctcgcttccccacccttactaacattaacgaaaataaccccaccctactaaaccccattaaacgcctggcagccggaagcctattcgcaggatttctcattactaacaacatttcccccgcatcccccttccaaacaacaatccccctctacctaaaactcacagccctcgctgtcactttcctaggacttctaacagccctagacctcaactacctaaccaacaaacttaaaataaaatccccactatgcacattttatttctccaacatactcggattctaccctagcatcacacaccgcacaatcccctatctaggccttcttacgagccaaaacctgcccctactcctcctagacctaacctgactagaaaagctattacctaaaacaatttcacagcaccaaatctccacctccatcatcacctcaacccaaaaaggcataattaaactttacttcctctctttcttcttcccactcatcctaaccctactcctaatcacataacctattcccccgagcaatctcaattacaatatatacaccaacaaacaatgttcaaccagtaactactactaatcaacgcccataatcatacaaagcccccgcaccaataggatcctcccgaatcaaccctgacccctctccttcataaattattcagcttcctacactattaaagtttaccacaaccaccaccccatcatactctttcacccacagcaccaatcctacctccatcgctaaccccactaaaacactcaccaagacctcaacccctgacccccatgcctcaggatactcctcaatagccatcgctgtagtatatccaaagacaaccatcattccccctaaataaattaaaaaaactattaaacccatataacctcccccaaaattcagaataataacacacccgaccacaccgctaacaatcaatactaaacccccataaataggagaaggcttagaagaaaaccccacaaaccccattactaaacccacactcaacagaaacaaagcatacatcattattctcgcacggactacaaccacgaccaatgatatgaaaaaccatcgttgtatttcaactacaagaacaccaatgaccccaatacgcaaaattaaccccctaataaaattaattaaccactcattcatcgacctccccaccccatccaacatctccgcatgatgaaacttcggctcactccttggcgcctgcctgatcctccaaatcaccacaggactattcctagccatgcactactcaccagacgcctcaaccgccttttcatcaatcgcccacatcactcgagacgtaaattatggctgaatcatccgctaccttcacgccaatggcgcctcaatattctttatctgcctcttcctacacatcgggcgaggcctatattacggatcatttctctactcagaaacctgaaacatcggcattatcctcctgcttgcaactatagcaacagccttcataggctatgtcctcccgtgaggccaaatatcattctgaggggccacagtaattacaaacttactatccgccatcccatacattgggacagacctagttcaatgaatctgaggaggctactcagtagacagtcccaccctcacacgattctttacctttcacttcatcttgcccttcattattgcagccctagcagcactccacctcctattcttgcacgaaacgggatcaaacaaccccctaggaatcacctcccattccgataaaatcaccttccacccttactacacaatcaaagacgccctcggcttacttctcttccttctctccttaatgacattaacactattctcaccagacctcctaggcgacccagacaattataccctagccaaccccttaaacacccctccccacatcaagcccgaatgatatttcctattcgcctacacaattctccgatccgtccctaacaaactaggaggcgtccttgccctattactatccatcctcatcctagcaataatccccatcctccatatatccaaacaacaaagcataatatttcgcccactaagccaatcactttattgactcctagccgcagacctcctcattctaacctgaatcggaggacaaccagtaagctacccctttaccatcattggacaagtagcatccgtactatacttcacaacaatcctaatcctaataccaactatctccctaattgaaaacaaaatactcaaatggccctgtccttgtagtataaactaatacaccagtcttgtaaaccggagatgaaaacctttttccaaggacaaatcagagaaaaagtctttaactccaccattagcacccaaagctaagattctaatttaaactattctctgttctttcatggggaagcagatttgggtaccacccaagtattgactcacccatcaacaaccgctatgtatttcgtacattactgccagccaccatgaatattgtacggtaccataaatacttgaccacctgtagtacataaaaacccaatccacatcaaaaccccctccccatgcttacaagcaagtacagcaatcaaccttcaactatcacacatcaactgcaactccaaagccacccctcacccactaggataccaacaaacctacctacccttaacagtacatagcacataaagccatttaccgtacatagcacattacagtcaaatcccttctcgtccccatggatgacccccctcagataggggtcccttgaccaccatcctccgtgaaatcaatatcccgcacaagagtgctactctcctcgctccgggcccataacacttgggggtagctaaagtgaactgtatccgacatctggttcctacttcagggccataaagcctaaatagcccacacgttccccttaaataagacatcacgatg

SEQ ID NO: 447 - DNA, 16571 bp, Homo sapiens mitochondrial
  3109: "n" refers to a nucleotide at position 3107 of the Cambridge Reference Sequence (CRS, Anderson et al. 1981 Nature 290:457-465), later determined to be absent from the human mtDNA sequence according to the revised CRS (rCRS, Andrews et al. 1999 Nature Genetics 23:147); "n" therefore represents a single nucleotide deletion at a position corresponding to nucleotide 3107 of SEQ ID NO:1 as provided herein.
gatcacaggtctatcaccctattaaccactcacgggagctctccatgcatttggtattttcgtctggggggtgtgcacgcgatagcattgcgagacgctggagccggagcaccctatgtcgcagtatctgtctttgattcctgcctcatcctattatttatcgcacctacgttcaatattacaggcgaacatacttactaaagtgtgttaattaattaatgcttgtaggacataataataacaattgaatgtctgcacagccgctttccacacagacatcataacaaaaaatttccaccaaaccccccctcccccccgcttctggccacagcacttaaacacatctctgccaaaccccaaaaacaaagaaccctaacaccagcctaaccagatttcaaattttatcttttggcggtatgcacttttaacagtcaccccccaactaacacattattttcccctcccactcccatactactaatctcatcaatacaacccccgcccatcctacccagcacacacacaccgctgctaaccccataccccgaaccaaccaaaccccaaagacaccccccacagtttatgtagcttacctcctcaaagcaatacactgaaaatgtttagacgggctcacatcaccccataaacaaataggtttggtcctagcctttctattagctcttagtaagattacacatgcaagcatccccgttccagtgagttcaccctctaaatcaccacgatcaaaagggacaagcatcaagcacgcagcaatgcagctcaaaacgcttagcctagccacacccccacgggaaacagcagtgattaacctttagcaataaacgaaagtttaactaagctatactaaccccagggttggtcaatttcgtgccagccaccgcggtcacacgattaacccaagtcaatagaagccggcgtaaagagtgttttagatcaccccctccccaataaagctaaaactcacctgagttgtaaaaaactccagttgacacaaaatagactacgaaagtggctttaacatatctgaacacacaatagctaagacccaaactgggattagataccccactatgcttagccctaaacctcaacagttaaatcaacaaaactgctcgccagaacactacgagccacagcttaaaactcaaaggacctggcggtgcttcatatccctctagaggagcctgttctgtaatcgataaaccccgatcaacctcaccacctcttgctcagcctatataccgccatcttcagcaaaccctgatgaaggctacaaagtaagcgcaagtacccacgtaaagacgttaggtcaaggtgtagcccatgaggtggcaagaaatgggctacattttctaccccagaaaactacgatagcccttatgaaacttaagggtcgaaggtggatttagcagtaaactgagagtagagtgcttagttgaacagggccctgaagcgcgtacacaccgcccgtcaccctcctcaagtatacttcaaaggacatttaactaaaacccctacgcatttatatagaggagacaagtcgtaacatggtaagtgtactggaaagtgcacttggacgaaccagagtgtagcttaacacaaagcacccaacttacacttaggagatttcaacttaacttgaccgctctgagctaaacctagccccaaacccactccaccttactaccagacaaccttagccaaaccatttacccaaataaagtataggcgatagaaattgaaacctggcgcaatagatatagtaccgcaagggaaagatgaaaaattataaccaagcataatatagcaaggactaacccctataccttctgcataatgaattaactagaaataactttgcaaggagagccaaagctaagacccccgaaaccagacgagctacctaagaacagctaaaagagcacacccgtctatgtagcaaaatagtgggaagatttataggtagaggcgacaaacctaccgagcctggtgatagctggttgtccaagatagaatcttagttcaactttaaatttgcccacagaaccctctaaatccccttgtaaatttaactgttagtccaaagaggaacagctctttggacactaggaaaaaaccttgtagagagagtaaaaaatttaacacccatagtaggcctaaaagcagccaccaattaagaaagcgttcaagctcaacacccactacctaaaaaatcccaaacatataactgaactcctcacacccaattggaccaatctatcaccctatagaagaactaatgttagtataagtaacatgaaaacattctcctccgcataagcctgcgtcagattaaaacactgaactgacaattaacagcccaatatctacaatcaaccaacaagtcattattaccctcactgtcaacccaacacaggcatgctcataaggaaaggttaaaaaaagtaaaaggaactcggcaaatcttaccccgcctgtttaccaaaaacatcacctctagcatcaccagtattagaggcaccgcctgcccagtgacacatgtttaacggccgcggtaccctaaccgtgcaaaggtagcataatcacttgttccttaaatagggacctgtatgaatggctccacgagggttcagctgtctcttacttttaaccagtgaaattgacctgcccgtgaagaggcgggcatgacacagcaagacgagaagaccctatggagctttaatttattaatgcaaacagtacctaacaaacccacaggtcctaaactaccaaacctgcattaaaaatttcggttggggcgacctcggagcagaacccaacctccgagcagtacatgctaagacttcaccagtcaaagcgaactactatactcaattgatccaataacttgaccaacggaacaagttaccctagggataacagcgcaatcctattctagagtccatatcaacaatagggtttacgacctcgatgttggatcaggacatcccgatggtgcagccgctattaaaggttcgtttgttcaacgattaaagtcctacgtgatctgagttcagaccggagtaatccaggtcggtttctatctacnttcaaattcctccctgtacgaaaggacaagagaaataaggcctacttcacaaagcgccttcccccgtaaatgatatcatctcaacttagcattatacccacacccacccaagaacagggtttgttaagatggcagagcccggtaatcgcataaaacttaaaactttacagtcagaggttcaattcctcttcttaacaacatacccatggccaacctcctactcctcattgtacccattctaatcgcaatggcattcctaatgcttaccgaacgaaaaattctaggctatatacaactacgcaaaggccccaacgttgtaggcccctacgggctactacaacccttcgctgacgccataaaactcttcaccaaagagcccctaaaacccgccacatctaccatcaccctctacatcaccgccccgaccttagctctcaccatcgctcttctactatgaacccccctccccatacccaaccccctggtcaacctcaacctaggcctcctatttattctagccacctctagcctagccgtttactcaatcctctgatcagggtgagcatcaaactcaaactacgccctgatcggcgcactgcgagcagtagcccaaacaatctcatatgaagtcaccctagccatcattctactatcaacattactaataagtggctcctttaacctctccacccttatcacaacacaagaacacctctgattactcctgccatcatgacccttggccataatatgatttatctccacactagcagagaccaaccgaacccccttcgaccttgccgaaggggagtccgaactagtctcaggcttcaacatcgaatacgccgcaggccccttcgccctattcttcatagccgaatacacaaacattattataataaacaccctcaccactacaatcttcctaggaacaacatatgacgcactctcccctgaactctacacaacatattttgtcaccaagaccctacttctaacctccctgttcttatgaattcgaacagcatacccccgattccgctacgaccaactcatacacctcctatgaaaaaacttcctaccactcaccctagcattacttatatgatatgtctccatacccattacaatctccagcattccccctcaaacctaagaaatatgtctgataaaagagttactttgatagagtaaataataggagcttaaacccccttatttctaggactatgagaatcgaacccatccctgagaatccaaaattctccgtgccacctatcacaccccatcctaaagtaaggtcagctaaataagctatcgggcccataccccgaaaatgttggttatacccttcccgtactaattaatcccctggcccaacccgtcatctactctaccatctttgcaggcacactcatcacagcgctaagctcgcactgattttttacctgagtaggcctagaaataaacatgctagcttttattccagttctaaccaaaaaaataaaccctcgttccacagaagctgccatcaagtatttcctcacgcaagcaaccgcatccataatccttctaatagctatcctcttcaacaatatactctccggacaatgaaccataaccaatactaccaatcaatactcatcattaataatcataatggctatagcaataaaactaggaatagccccctttcacttctgagtcccagaggttacccaaggcacccctctgacatccggcctgcttcttctcacatgacaaaaactagcccccatctcaatcatataccaaatctctccctcactaaacgtaagccttctcctcactctctcaatcttatccatcatagcaggcagttgaggtggattaaaccaaacccagctacgcaaaatcttagcatactcctcaattacccacataggatgaataatagcagttctaccgtacaaccctaacataaccattcttaatttaactatttatattatcctaactactaccgcattcctactactcaacttaaactccagcaccacgaccctactactatctcgcacctgaaacaagctaacatgactaacacccttaattccatccaccctcctctccctaggaggcctgcccccgctaaccggctttttgcccaaatgggccattatcgaagaattcacaaaaaacaatagcctcatcatccccaccatcatagccaccatcaccctccttaacctctacttctacctacgcctaatctactccacctcaatcacactactccccatatctaacaacgtaaaaataaaatgacagtttgaacatacaaaacccaccccattcctccccacactcatcgcccttaccacgctactcctacctatctccccttttatactaataatcttatagaaatttaggttaaatacagaccaagagccttcaaagccctcagtaagttgcaatacttaatttctgtaacagctaaggactgcaaaaccccactctgcatcaactgaacgcaaatcagccactttaattaagctaagcccttactagaccaatgggacttaaacccacaaacacttagttaacagctaagcaccctaatcaactggcttcaatctacttctcccgccgccgggaaaaaaggcgggagaagccccggcaggtttgaagctgcttcttcgaatttgcaattcaatatgaaaatcacctcggagctggtaaaaagaggcctaacccctgtctttagatttacagtccaatgcttcactcagccattttacctcacccccactgatgttcgccgaccgttgactattctctacaaaccacaaagacattggaacactatacctattattcggcgcatgagctggagtcctaggcacagctctaagcctccttattcgagccgagctgggccagccaggcaaccttctaggtaacgaccacatctacaacgttatcgtcacagcccatgcatttgtaataatcttcttcatagtaatacccatcataatcggaggctttggcaactgactagttcccctaataatcggtgcccccgatatggcgtttccccgcataaacaacataagcttctgactcttacctccctctctcctactcctgctcgcatctgctatagtggaggccggagcaggaacaggttgaacagtctaccctcccttagcagggaactactcccaccctggagcctccgtagacctaaccatcttctccttacacctagcaggtgtctcctctatcttaggggccatcaatttcatcacaacaattatcaatataaaaccccctgccataacccaataccaaacgcccctcttcgtctgatccgtcctaatcacagcagtcctacttctcctatctctcccagtcctagctgctggcatcactatactactaacagaccgcaacctcaacaccaccttcttcgaccccgccggaggaggagaccccattctataccaacacctattctgatttttcggtcaccctgaagtttatattcttatcctaccaggcttcggaataatctcccatattgtaacttactactccggaaaaaaagaaccatttggatacataggtatggtctgagctatgatatcaattggcttcctagggtttatcgtgtgagcacaccatatatttacagtaggaatagacgtagacacacgagcatatttcacctccgctaccataatcatcgctatccccaccggcgtcaaagtatttagctgactcgccacactccacggaagcaatatgaaatgatctgctgcagtgctctgagccctaggattcatctttcttttcaccgtaggtggcctgactggcattgtattagcaaactcatcactagacatcgtactacacgacacgtactacgttgtagctcacttccactatgtcctatcaataggagctgtatttgccatcataggaggcttcattcactgatttcccctattctcaggctacaccctagaccaaacctacgccaaaatccatttcactatcatattcatcggcgtaaatctaactttcttcccacaacactttctcggcctatccggaatgccccgacgttactcggactaccccgatgcatacaccacatgaaacatcctatcatctgtaggctcattcatttctctaacagcagtaatattaataattttcatgatttgagaagccttcgcttcgaagcgaaaagtcctaatagtagaagaaccctccataaacctggagtgactatatggatgccccccaccctaccacacattcgaagaacccgtatacataaaatctagacaaaaaaggaaggaatcgaaccccccaaagctggtttcaagccaaccccatggcctccatgactttttcaaaaaggtattagaaaaaccatttcataactttgtcaaagttaaattataggctaaatcctatatatcttaatggcacatgcagcgcaagtaggtctacaagacgctacttcccctatcatagaagagcttatcacctttcatgatcacgccctcataatcattttccttatctgcttcctagtcctgtatgcccttttcctaacactcacaacaaaactaactaatactaacatctcagacgctcaggaaatagaaaccgtctgaactatcctgcccgccatcatcctagtcctcatcgccctcccatccctacgcatcctttacataacagacgaggtcaacgatccctcccttaccatcaaatcaattggccaccaatggtactgaacctacgagtacaccgactacggcggactaatcttcaactcctacatacttcccccattattcctagaaccaggcgacctgcgactccttgacgttgacaatcgagtagtactcccgattgaagcccccattcgtataataattacatcacaagacgtcttgcactcatgagctgtccccacattaggcttaaaaacagatgcaattcccggacgtctaaaccaaaccactttcaccgctacacgaccgggggtatactacggtcaatgctctgaaatctgtggagcaaaccacagtttcatgcccatcgtcctagaattaattcccctaaaaatctttgaaatagggcccgtatttaccctatagcaccccctctaccccctctagagcccactgtaaagctaacttagcattaaccttttaagttaaagattaagagaaccaacacctctttacagtgaaatgccccaactaaatactaccgtatggcccaccataattacccccatactccttacactattcctcatcacccaactaaaaatattaaacacaaactaccacctacctccctcaccaaagcccataaaaataaaaaattataacaaaccctgagaaccaaaatgaacgaaaatctgttcgcttcattcattgcccccacaatcctaggcctacccgccgcagtactgatcattctatttccccctctattgatccccacctccaaatatctcatcaacaaccgactaatcaccacccaacaatgactaatcaaactaacctcaaaacaaatgataaccatacacaacactaaaggacgaacctgatctcttatactagtatccttaatcatttttattgccacaactaacctcctcggactcctgcctcactcatttacaccaaccacccaactatctataaacctagccatggccatccccttatgagcgggcgcagtgattataggctttcgctctaagattaaaaatgccctagcccacttcttaccacaaggcacacctacaccccttatccccatactagttattatcgaaaccatcagcctactcattcaaccaatagccctggccgtacgcctaaccgctaacattactgcaggccacctactcatgcacctaattggaagcgccaccctagcaatatcaaccattaaccttccctctacacttatcatcttcacaattctaattctactgactatcctagaaatcgctgtcgccttaatccaagcctacgttttcacacttctagtaagcctctacctgcacgacaacacataatgacccaccaatcacatgcctatcatatagtaaaacccagcccatgacccctaacaggggccctctcagccctcctaatgacctccggcctagccatgtgatttcacttccactccataacgctcctcatactaggcctactaaccaacacactaaccatataccaatgatggcgcgatgtaacacgagaaagcacataccaaggccaccacacaccacctgtccaaaaaggccttcgatacgggataatcctatttattacctcagaaatttttttcttcgcaggatttttctgagccttttaccactccagcctagcccctaccccccaattaggagggcactggcccccaacaggcatcaccccgctaaatcccctagaagtcccactcctaaacacatccgtattactcgcatcaggagtatcaatcacctgagctcaccatagtctaatagaaaacaaccgaaaccaaataattcaagcactgcttattacaattttactgggtctctattttaccctcctacaagcctcagagtacttcgagtctcccttcaccatttccgacggcatctacggctcaacattttttgtagccacaggcttccacggacttcacgtcattattggctcaactttcctcactatctgcttcatccgccaactaatatttcactttacatccaaacatcactttggcttcgaagccgccgcctgatactggcattttgtagatgtggtttgactatttctgtatgtctccatctattgatgagggtcttactcttttagtataaatagtaccgttaacttccaattaactagttttgacaacattcaaaaaagagtaataaacttcgccttaattttaataatcaacaccctcctagccttactactaataattattacattttgactaccacaactcaacggctacatagaaaaatccaccccttacgagtgcggcttcgaccctatatcccccgcccgcgtccctttctccataaaattcttcttagtagctattaccttcttattatttgatctagaaattgccctccttttacccctaccatgagccctacaaacaactaacctgccactaatagttatgtcatccctcttattaatcatcatcctagccctaagtctggcctatgagtgactacaaaaaggattagactgaaccgaattggtatatagtttaaacaaaacgaatgatttcgactcattaaattatgataatcatatttaccaaatgcccctcatttacataaatattatactagcatttaccatctcacttctaggaatactagtatatcgctcacacctcatatcctccctactatgcctagaaggaataatactatcgctgttcattatagctactctcataaccctcaacacccactccctcttagccaatattgtgcctattgccatactagtctttgccgcctgcgaagcagcggtgggcctagccctactagtctcaatctccaacacatatggcctagactacgtacataacctaaacctactccaatgctaaaactaatcgtcccaacaattatattactaccactgacatgactttccaaaaaacacataatttgaatcaacacaaccacccacagcctaattattagcatcatccctctactattttttaaccaaatcaacaacaacctatttagctgttccccaaccttttcctccgaccccctaacaacccccctcctaatactaactacctgactcctacccctcacaatcatggcaagccaacgccacttatccagtgaaccactatcacgaaaaaaactctacctctctatactaatctccctacaaatctccttaattataacattcacagccacagaactaatcatattttatatcttcttcgaaaccacacttatccccaccttggctatcatcacccgatgaggcaaccagccagaacgcctgaacgcaggcacatacttcctattctacaccctagtaggctcccttcccctactcatcgcactaatttacactcacaacaccctaggctcactaaacattctactactcactctcactgcccaagaactatcaaactcctgagccaacaacttaatatgactagcttacacaatagcttttatagtaaagatacctctttacggactccacttatgactccctaaagcccatgtcgaagcccccatcgctgggtcaatagtacttgccgcagtactcttgaaactaggcggctatggtataatacgcctcacactcattctcaaccccctgacaaaacacatagcctaccccttccttgtactatccctatgaggcataattataacaagctccatctgcctacgacaaacagacctaaaatcgctcattgcatactcttcaatcagccacatagccctcgtagtaacagccattctcatccaaaccccctgaagcttcaccggcgcagtcattctcataatcgcccacggacttacatcctcattactattctgcctagcaaactcaaactacgaacgcactcacagtcgcatcataatcctctctcaaggacttcaaactctactcccactaatagctttttgatgacttctagcaagcctcgctaacctcgccttaccccccactattaacctactgggagaactctctgtgctagtaaccacgttctcctgatcaaatatcactctcctacttacaggactcaacatactagtcacagccctatactccctctacatatttaccacaacacaatggggctcactcacccaccacattaacaacataaaaccctcattcacacgagaaaacaccctcatgttcatacacctatcccccattctcctcctatccctcaaccccgacatcattaccgggttttcctcttgtaaatatagtttaaccaaaacatcagattgtgaatctgacaacagaggcttacgaccccttatttaccgagaaagctcacaagaactgctaactcatgcccccatgtctaacaacatggctttctcaacttttaaaggataacagctatccattggtcttaggccccaagaattttggtgcaactccaaataaaagtaataaccatgcacactactataaccaccctaaccctaacttccctaattccccccatccttaccaccctcgttaaccctaacaaaaaaaactcatacccccattatgtaaaatccattgtcgcatccacctttattatcagtctcttccccacaacaatattcatgtgcctagaccaagaagttattatctcgaactgacactgagccacaacccaaacaacccagctctccctaagcttcaaactagactacttctccataatattcatccctgtagcattgttcgttacatggtccatcatagaattctcactgtgatatataaactcagacccaaacattaatcagttcttcaaatatctactcatcttcctaattaccatactaatcttagttaccgctaacaacctattccaactgttcatcggctgagagggcgtaggaattatatccttcttgctcatcagttgatgatacgcccgagcagatgccaacacagcagccattcaagcaatcctatacaaccgtatcggcgatatcggtttcatcctcgccttagcatgatttatcctacactccaactcatgagacccacaacaaatagcccttctaaacgctaatccaagcctcaccccactactaggcctcctcctagcagcagcaggcaaatcagcccaactaggtctccacccctgactcccctcagccatagaaggccccaccccagtctcagccctactccactcaagcactatagttgtagcaggaatcttcttactcatccgcttccaccccctagcagaaaatagcccactaatccaaactctaacactatgcttaggcgctatcaccactctgttcgcagcagtctgcgcccttacacaaaatgacatcaaaaaaatcgtagccttctccacttcaagtcaactaggactcataatagttacaatcggcatcaaccaaccacacctagcattcctgcacatctgtacccacgccttcttcaaagccatactatttatgtgctccgggtccatcatccacaaccttaacaatgaacaagatattcgaaaaataggaggactactcaaaaccatacctctcacttcaacctccctcaccattggcagcctagcattagcaggaatacctttcctcacaggtttctactccaaagaccacatcatcgaaaccgcaaacatatcatacacaaacgcctgagccctatctattactctcatcgctacctccctgacaagcgcctatagcactcgaataatccttctcaccctaacaggtcaacctcgcttccccacccttactaacattaacgaaaataaccccaccctactaaaccccattaaacgcctggcagccggaagcctattcgcaggatttctcattactaacaacatttcccccgcatcccccttccaaacaacaatccccctctacctaaaactcacagccctcgctgtcactttcctagggcttctaacagccctagacctcaactacctaaccaacaaacttaaaataaaatccccactatgcacattttatttctccaacatactcggattctaccctaccatcacacaccgcacaatcccctatctaggccttcttacgagccaaaacctgcccctactcctcctagacctaacctgactagaaaagctattacctaaaacaatttcacagcaccaaatctccacctccatcatcacctcaacccaaaaaggcataattaaactttacttcctctctttcttcttcccactcatcctaaccctactcctaatcacataacctattcccccgagcaatctcaattacaatatatacaccaacaaacaatgttcaaccagtaactactactaatcaacgcccataatcatacaaagcccccgcaccaataggatcctcccgaatcaaccctgacccctctccttcataaattattcagcttcctacactattaaagtttaccacaaccaccaccccatcatactctttcacccacagcaccaatcctacctccatcgctaaccccactaaaacactcaccaagacctcaacccctgacccccatgcctcaggatactcctcaatagccatcgctgtagtatatccaaagacaaccatcattccccctaaataaattaaaaaaactattaaacccatataacctcccccaaaattcagaataataacacacccgaccacaccgctaacaatcaatactaaacccccataaataggagaaggcttagaagaaaaccccacaaaccccattactaaacccacactcaacagaaacaaagcatacatcattattctcgcacggactacaaccacgaccaatgatatgaaaaaccatcgttgtatttcaactacaagaacaccaatgaccccaatacgcaaaattaaccccctaataaaattaattaaccgctcattcatcgacctccccaccccatccaacatctccgcatgatgaaacttcggctcactccttggcgcctgcctgatcctccaaatcaccacaggactattcctagccatgcactactcaccagacgcctcaaccgccttttcatcaatcgcccacatcactcgagacgtaaattatggctgaatcatccgctaccttcacgccaatggcgcctcaatattctttatctgcctcttcctacacatcgggcgaggcctatattacggatcatttctctactcagaaacctgaaacatcggcattatcctcctgcttgcaactatagcaacagccttcataggctatgtcctcccgtgaggccaaatatcattctgaggggccacagtaattacaaacttactatccgccatcccatacattggggcagacctagttcaatgaatctgaggaggctactcagtagacagtcccaccctcacacgattctttacctttcacttcatcttgcccttcattattgcagccctagcagcactccacctcctattcttgcacgaaacgggatcaaacaaccccctaggaatcacctcccattccgataaaatcaccttccacccttactacacaatcaaagacgccctcggcttacttctcttccttctctccttaatgacattaacactattctcaccagacctcctaggcgacccagacaattataccctagccaaccccttaaacacccctccccacatcaagcccgaatgatatttcctattcgcctacacaattctccgatccgtccctaacaaactaggaggcgtccttgccctattactatccatcctcatcctagcaataatccccatcctccatatatccaaacaacaaagcataatatttcgcccactaagccaatcactttattgactcctagccgcagacctcctcattctaacctgaatcggaggacaaccagtaagctacccttttaccatcattggacaagtagcatccgtactatacttcacaacaatcctaatcctaataccaactatctccctaattgaaaacaaaatactcaaatgggcctgtccttgtagtataaactaatacaccagtcttgtaaaccggagatgaaaacctttttccaaggacaaatcagagaaaaagtctttaactccaccattagcacccaaagctaagattctaatttaaactattctctgttctttcatggggaagcagatttgggtaccacccaagtattgactcacccatcaacaaccgctatgtatttcgtacattactgccagccaccatgaatattgtacggtaccataaatacttgaccacctgtagtacataaaaacccaatccacatcaaaaccccctcctcatgcttacaagcaagtacagcaatcaaccctcaactatcacacatcaactgcaactccaaagtcacccctcacccattaggataccaacaaacctacccatccttaacagtacatagtacataaagccatttaccgtacatagcacattacagtcaaatcccttctcgtccccatggatgacccccctcagataggggtcccttgaccaccatcctccgtgaaatcaatatcccgcacaagagtgctactctcctcgctccgggcccataacacttgggggtagctaaagtgaactgtatccgacatctggttcctacttcagggtcataaaacctaaatagcccacacgttccccttaaataagacatcacgatg

SEQ ID NO: 448 - DNA, 16563 bp, Homo sapiens mitochondrial
  3109: "n" refers to a nucleotide at position 3107 of the Cambridge Reference Sequence (CRS, Anderson et al. 1981 Nature 290:457-465), later determined to be absent from the human mtDNA sequence according to the revised CRS (rCRS, Andrews et al. 1999 Nature Genetics 23:147); "n" therefore represents a single nucleotide deletion at a position corresponding to nucleotide 3107 of SEQ ID NO:1 as provided herein.
gatcacaggtctatcaccctattaaccactcacgggagctctccatgcatttggtattttcgtctggggggtgtgcacgcgatagcattgcgagacgctggagccggagcaccctatgtcgcagtatctgtctttgattcctgccccatcctattatttatcgcacctacgttcaatattacaggcgaacatacttactaaagtgtgttaattaattaatgcttgtaggacataataataacaattgaatgtctgcacagccgctttccacacagacatcataacaaaaaatttccaccaaaccccccctcccccccgcttctggccacagcacttaaacacatctctgccaaaccccaaaaacaaagaaccctaacaccagcctaaccagatttcaaattttatcttttggcggtatgcacttttaacagtcaccccccaactaacacattattttcccctcccactcccatactactaatctcatcaatacaacccccacccatcctacccagcacacacacaccgctgctaaccccataccccgaaccaaccaaaccccaaagacaccccccacagtttatgtagcttacctcctcaaagcaatacactgaaaatgtttagacgggctcacatcaccccataaacaaataggtttggtcctagcctttctattagctcttagtaagattacacatgcaagcatccccgttccagtgagttcaccctctaaatcaccacgatcaaaagggacaagcatcaagcacgcagcaatgcagctcaaaacgcttagcctagccacacccccacgggaaacagcagtgattagcctttagcaataaacgaaagtttaactaagctatactaaccccagggttggtcaatttcgtgccagccaccgcggtcacacgattaacccaagtcaatagaagccggcgtaaagagtgttttagatcaccccctccccaataaagctaaaactcacctgagttgtaaaaaactccagttgacacaaaatagactacgaaagtggctttaacatatctgaacacacaatagctaagacccaaactgggattagataccccactatgcttagccctaaacctcaacagttaaatcaacaaaactgctcgccagaacactacgagccacagcttaaaactcaaaggacctggcggtgcttcatatccctctagaggagcctgttctgtaatcgataaaccccgatcaacctcaccacctcttgctcagcctatataccgccatcttcagcaaaccctgatgaaggctacaaagtaagcgcaagtacccacgtaaagacgttaggtcaaggtgtagcccatgaggtggcaagaaatgggctacattttctaccccagaaaactacgatagcccttatgaaacttaagggtcgaaggtggatttagcagtaaactgagagtagagtgcttagttgaacagggccctgaagcgcgtacacaccgcccgtcaccctcctcaagtatacttcaaaggacatttaactaaaacccctacgcatttatatagaggagacaagtcgtaacatggtaagtgtactggaaagtgcacttggacgaaccagagtgtagcttaacacaaagcacccaacttacacttaggagatttcaacttaacttgaccgctctgagctaaacctagccccaaacccactccaccttactaccagacaaccttagccaaaccatttacccaaataaagtataggcgatagaaattgaaacctggcgcaatagatatagtaccgcaagggaaagatgaaaaattataaccaagcataatatagcaaggactaacccctataccttctgcataatgaattaactagaaataactttgcaaggagagccaaagctaagacccccgaaaccagacgagctacctaagaacagctaaaagagcacacccgtctatgtagcaaaatagtgggaagatttataggtagaggcgacaaacctaccgagcctggtgatagctggttgtccaagatagaatcttagttcaactttaaatttgcccacagaaccctctaaatccccttgtaaatttaactgttagtccaaagaggaacagctctttggacactaggaaaaaaccttgtagagagagtaaaaaatttaacacccatagtaggcctaaaagcagccaccaattaagaaagcgttcaagctcaacacccactacctaaaaaatcccaaacatataactgaactcctcacacccaattggaccaatctatcaccctatagaagaactaatgttagtataagtaacatgaaaacattctcctccgcataagcctgcgtcagattaaaacactgaactgacaattaacagcccaatatctacaatcaaccaacaagtcattattaccctcactgtcaacccaacacaggcatgctcataaggaaaggttaaaaaaagtaaaaggaactcggcaaatcttaccccgcctgtttaccaaaaacatcacctctagcatcaccagtattagaggcaccgcctgcccagtgacacatgtttaacggccgcggtaccctaaccgtgcaaaggtagcataatcacttgttccttaaatagggacctgtatgaatggctccacgagggttcagctgtctcttacttttaaccagtgaaattgacctgcccgtgaagaggcgggcatgacacagcaagacgagaagaccctatggagctttaatttattaatgcaaacagtacctaacaaacccacaggtcctaaactaccaaacctgcattaaaaatttcggttggggcgacctcggagcagaacccaacctccgagcagtacatgctaagacttcaccagtcaaagcgaactactatactcaattgatccaataacttgaccaacggaacaagttaccctagggataacagcgcaatcctattctagagtccatatcaacaatagggtttacgacctcgatgttggatcaggacatcccgatggtgcagccgctattaaaggttcgtttgttcaacgattaaagtcctacgtgatctgagttcagaccggagtaatccaggtcggtttctatctacnttcaaattcctccctgtacgaaaggacaagagaaataaggcctacttcacaaagcgccttcccccgtaaatgatatcatctcaacttagtattatacccacacccacccaagaacagggtttgttaagatggcagagcccggtaatcgcataaaacttaaaactttacagtcagaggttcaattcctcttcttaacaacatacccatggccaacctcctactcctcattgtacccattctaatcgcaatggcattcctaatgcttaccgaacgaaaaattctaggctatatacaactacgcaaaggccccaacgttgtaggcccctacgggctactacaacccttcgctgacgccataaaactcttcaccaaagagcccctaaaacccgccacatctaccatcaccctctacatcaccgccccgaccttagctctcaccgtcgctcttctactatgaacccccctccccatacccaaccccctggtcaacctcaacctaggcctcctatttattctagccacctctagcctagccgtttactcaatcctctgatcagggtgagcatcaaactcaaactacgccctgatcggcgcactgcgagcagtagcccaaacaatctcatatgaagtcaccctagccatcattctactatcaacattactaataagtggctcctttaacctctccacccttatcacaacacaagaacacctctgattactcctgccatcatgacccttggccataatatgatttatctccacactagcagagaccaaccgaacccccttcgaccttgccgaaggggagtccgaactagtctcaggcttcaacatcgaatacgccgcaggccccttcgccctattcttcatagccgaatacacaaacattattataataaacaccctcaccactacaatcttcctaggaacaacatatgacgcactctcccctgaactctacacaacatattttgtcaccaagaccctacttctaacctccctgttcttatgaattcgaacagcatacccccgattccgctacgaccaactcatacacctcctatgaaaaaacttcctaccactcaccctagcattacttatatgatatgtctccatacccattacaatctccagcattccccctcaaacctaagaaatatgtctgataaaagagttactttgatagagtaaataataggagcttaaacccccttatttctaggactatgagaatcgaacccatccctgagaatccaaaattctccgtgccacctatcacaccccatcctaaagtaaggtcagctaaataagctatcgggcccataccccgaaaatgttggttatacccttcccgtactaattaatcccctggcccaacccgtcatctactctaccatctttgcaggcacactcatcacagcgctaagctcgcactgattttttacctgagtaggcctagaaataaacatgctagcttttattccagttctaaccaaaaaaataaaccctcgttccacagaagctgccatcaagtatttcctcacgcaagcaaccgcatccataatccttctaatagctatcctcttcaacaatatactctccggacaatgaaccataaccaatactaccaatcaatactcatcattaataatcataatggctatagcaataaaactaggaatagccccctttcacttctgagtcccagaagttacccaaggcacccctctgacatccggcctgcttcttctcacatgacaaaaactagcccccatctcaatcatataccaaatctctccctcactaaacgtaagccttctcctcactctctcaatcttatccatcatagcaggcagttgaggtggactaaaccaaacccagctacgcaaaatcttagcatactcctcaattacccacataggatgaataatagcagttctaccgtacaaccctaacataaccattcttaatttaactatttatattatcctaactactaccgcattcctactactcaacttaaactccagcaccacgaccctactactatctcgcacctgaaacaagctaacatgactaacacccttaattccatccaccctcctctccctaggaggcctgcccccgctaaccggctttttgcccaaatgggccattatcgaagaattcacaaaaaacaatagcctcatcatccccaccatcatagccaccatcaccctccttaacctctacttctacctacgcctaatctactccacctcaatcacactactccccatatctaacaacgtaaaaataaaatgacagtttgaacatacaaaacccaccccattcctccccacactcatcgcccttaccacgctactcctacctatctccccttttatactaataatcttatagaaatttaggttaaatacagaccaagagccttcaaagccctcagtaagttgcaatacttaatttctgtaacagctaaggactgcaaaaccccactctgcatcaactgaacgcaaatcagccactttaattaagctaagcccttactagaccaatgggacttaaacccacaaacacttagttaacagctaagcaccctaatcaactggcttcaatctacttctcccgccgccgggaaaaaaggcgggagaagccccggcaggtttgaagctgcttcttcgaatttgcaattcaatatgaaaatcacctcggagctggtaaaaagaggcctaacccctgtctttagatttacagtccaatgcttcactcagccattttacctcacccccactgatgttcgccgaccgttgactattctctacaaaccacaaagacattggaacactatacctattattcggcgcatgagctggagtcctaggcacagctctaagcctccttattcgagccgagctgggccagccaggcaaccttctaggtaacgaccacatctacaacgttatcgtcacagcccatgcatttgtaataatcttcttcatagtaatacccatcataatcggaggctttggcaactgactagttcccctaataatcggtgcccccgatatggcgtttccccgcataaacaacataagcttctgactcttacctccctctctcctactcctgctcgcatctgctatagtggaggccggagcaggaacaggttgaacagtctaccctcccttagcagggaactactcccaccctggagcctccgtagacctaaccatcttctccttacacctagcaggtgtctcctctatcttaggggccatcaatttcatcacaacaattatcaatataaaaccccctgccataacccaataccaaacgcccctcttcgtctgatccgtcctaattacagcagtcctacttctcctatctctcccagtcctagctgctggcatcactatactactaacagaccgcaacctcaacaccaccttcttcgaccccgccggaggaggagaccccattctataccaacacctattctgatttttcggtcaccctgaagtttatattcttatcctaccaggcttcggaataatctcccatattgtaacttactactccggaaaaaaagaaccatttggatacataggtatggtctgagctatgatatcaattggcttcctagggtttatcgtgtgagcacaccatatatttacagtaggaatagacgtagacacacgagcatatttcacctccgctaccataatcatcgctatccccaccggcgtcaaagtatttagctgactcgccacactccacggaagcaatatgaaatgatctgctgcagtgctctgagccctaggattcatctttcttttcaccgtaggtggcctgactggcattgtattagcaaactcatcactagacatcgtactacacgacacgtactacgttgtagctcacttccactatgtcctatcaataggagctgtatttgccatcataggaggcttcattcactgatttcccctattctcaggctacaccctagaccaaacctacgccaaaatccatttcactatcatattcatcggcgtaaatctaactttcttcccacaacactttctcggcctatccggaatgccccgacgttactcggactaccccgatgcatacaccacatgaaacatcctatcatctgtaggctcattcatttctctaacagcagtaatattaataattttcatgatttgagaagccttcgcttcgaagcgaaaagtcctaatagtagaagaaccctccataaacctggagtgactatatggatgccccccaccctaccacacattcgaagaacccgtatacataaaatctagacaaaaaaggaaggaatcgaaccccccaaagctggtttcaagccaaccccatggcctccatgactttttcaaaaaggtattagaaaaaccatttcataactttgtcaaagttaaattataggctaaatcctatatatcttaatggcacatgcagcgcaagtaggtctacaagacgctacttcccctatcatagaagagcttatcacctttcatgatcacgccctcataatcattttccttatctgcttcctagtcctgtatgcccttttcctaacactcacaacaaaactaactaatactaacatctcagacgctcaggaaatagaaaccgtctgaactatcctgcccgccatcatcctagtcctcatcgccctcccatccctacgcatcctttacataacagacgaggtcaacgatccctcccttaccatcaaatcaattggccaccaatggtactgaacctacgagtacaccgactacggcggactaatcttcaactcctacatacttcccccattattcctagaaccaggcgacctgcgactccttgacgttgacaatcgagtagtactcccgattgaagcccccattcgtataataattacatcacaagacgtcttgcactcatgagctgtccccacattaggcttaaaaacagatgcaattcccggacgtctaaaccaaaccactttcaccgctacacgaccgggggtatactacggtcaatgctctgaaatctgtggagcaaaccacagtttcatgcccatcgtcctagaattaattcccctaaaaatctttgaaatagggcccgtatttaccctatagcaccccctctagagcccactgtaaagctaacttagcattaaccttttaagttaaagattaagagaaccaacacctctttacagtgaaatgccccaactaaatactaccgtatggcccaccataattacccccatactccttacactattcctcatcacccaactaaaaatattaaacacaaactaccacctacctccctcaccaaagcccataaaaataaaaaattataacaaaccctgagaaccaaaatgaacgaaaatctgttcgcttcattcattgcccccacaatcctaggcctacccgccgcagtactgatcattctatttccccctctattgatccccacctccaaatatctcatcaacaaccgactaatcaccacccaacaatgactaatcaaactaacctcaaaacaaatgataaccatacacaacactaaaggacgaacctgatctcttatactagtatccttaatcatttttattgccacaactaacctcctcggactcctgcctcactcatttacaccaaccacccaactatctataaacctagccatggccatccccttatgagcgggcgcagtgattataggctttcgctctaagattaaaaatgccctagcccacttcttaccacaaggcacacctacaccccttatccccatactagttattatcgaaaccatcagcctactcattcaaccaatagccctggccgtacgcctaaccgctaacattactgcaggccacctactcatgcacctaattggaagcgccaccctagcaatatcaaccattaaccttccctctacacttatcatcttcacaattctaattctactgactatcctagaaatcgctgtcgccttaatccaagcctacgttttcacacttctagtaagcctctacctgcacgacaacacataatgacccaccaatcacatgcctatcatatagtaaaacccagcccatgacccctaacaggggccctctcagccctcctaatgacctccggcctagccatgtgatttcacttccactccataacgctcctcatactaggcctactaaccaacacactaaccatataccaatgatggcgcgatgtaacacgagaaagcacataccaaggccaccacacaccacctgtccaaaaaggccttcgatacgggataatcctatttattacctcagaagtttttttcttcgcaggatttttctgagccttttaccactccagcctagcccctaccccccaattaggagggcactggcccccaacaggcatcaccccgctaaatcccctagaagtcccactcctaaacacatccgtattactcgcatcaggagtatcaatcacctgagctcaccatagtctaatagaaaacaaccgaaaccaaataattcaagcactgcttattacaattttactgggtctctattttaccctcctacaagcctcagagtacttcgagtctcccttcaccatttccgacggcatctacggctcaacattttttgtagccacaggcttccacggacttcacgtcattattggctcaactttcctcactatctgcttcatccgccaactaatatttcactttacatccaaacatcactttggcttcgaagccgccgcctgatactggcattttgtagatgtggtctgactatttctgtatgtctccatctattgatgagggtcttactcttttagtataaatagtaccgttaacttccaattaactagttttgacaacattcaaaaaagagtaataaacttcgccttaattttaataatcaacaccctcctagccttactactaataattattacattttgactaccacaactcaacggctacatagaaaaatccaccccttacgagtgcggcttcgaccctatatcccccgcccgcgtccctttctccataaaattcttcttagtagctattaccttcttattatttgatctagaaattgccctccttttacccctaccatgagccctacaaacaactaacctgccactaatagttatgtcatccctcttattaatcatcatcctagccctaagtctggcctatgagtgactacaaaaaggattagactgaaccgaattggtatatagtttaaacaaaacgaatgatttcgactcattaaattatgataatcatatttaccaaatgcccctcatttacataaatattatactagcatttaccatctcacttctaggaatactagtatatcgctcacacctcatatcctccctactatgcctagaaggaataatactatcgctgttcattatagctactctcataaccctcaacacccactccctcttagccaatattgtgcctattgccatactagtctttgccgcctgcgaagcagcggtgggcctagccctactagtctcaatctccaacacatatggcctagactacgtacataacctaaacctactccaatgctaaaactaatcgtcccaacaattatattactaccactgacatgactttccaaaaaacacataatttgaatcaacacaaccacccacagcctaattattagcatcatccctctactattttttaaccaaatcaacaacaacctatttagctgttccccaaccttttcctccgaccccctaacaacccccctcctaatactaactacctgactcctacccctcacaatcatggcaagccaacgccacttatccagtgaaccactatcacgaaaaaaactctacctctctatactaatctccctacaaatctccttaattataacattcacagccacagaactaatcatattttatatcttcttcgaaaccacacttatccccaccttggctatcatcacccgatgaggcaaccagtcagaacgcctgaacgcaggcacatacttcctattctacaccctagtaggctcccttcccctactcatcgcactaatttacactcacaacaccctaggctcactaaacattctactactcactctcactgcccaagaactatcaaactcctgagccaacaacttaatatgactagcttacacaatagcttttatagtaaagatacctctttacggactccacttatgactccctaaagcccatgtcgaagcccccatcgctgggtcaatagtacttgccgcagtactcttaaaactaggcggctatggtataatacgcctcacactcattctcaaccccctgacaaaacacatagcctaccccttccttgtactatccctatgaggcataattataacaagctccatctgcctacgacaaacagacctaaaatcgctcattgcatactcttcaatcagccacatagccctcgtagtaacagccattctcatccaaaccccctgaagcttcaccggcgcagtcattctcataatcgcccacggacttacatcctcattactattctgcctagcaaactcaaactacgaacgcactcacagtcgcatcataatcctctctcaaggacttcaaactctactcccactaatagctttttgatgacttctagcaagcctcgctaacctcgccttaccccccactattaacctactgggagaactctctgtgctagtaaccacgttctcctgatcaaatatcactctcctacttacagggctcaacatactagtcacagccctatactccctctacatatttaccacaacacaatggggctcactcacccaccacattaacaacataaaaccctcattcacacgagaaaacaccctcatgttcatacacctatcccccattctcctcctatccctcaaccccgacatcattaccgggttttcctcttgtaaatatagtttaaccaaaacatcagattgtgaatctgacaacagaggcttacgaccccttatttaccgagaaagctcacaagaactgctaactcatgcccccatgtctaacaacatggctttctcaacttttaaaggataacagctatccattggtcttaggccccaaaaattttggtgcaactccaaataaaagtaataaccatgcacactactataaccaccctaaccctgacttccctaattccccccatccttaccaccctcgttaaccctaacaaaaaaaactcatacccccattatgtaaaatccattgtcgcatccacctttattatcagtctcttccccacaacaatattcatgtgcctagaccaagaagttattatctcgaactgacactgagccacaacccaaacaacccagctctccctaagcttcaaactagactacttctccataatattcatccctgtagcattgttcgttacatggtccatcatagaattctcactgtgatatataaactcagacccaaacattaatcagttcttcaaatatctactcatcttcctaattaccatactaatcttagttaccgctaacaacctattccaactgttcatcggctgagagggcgtaggaattatatccttcttgctcatcagttgatgatacgcccgagcagatgccaacacagcagccattcaagcaatcctatacaaccgtatcggcgatatcggtttcatcctcgccttagcatgatttatcctacactccaactcatgagacccacaacaaatagcccttctaaacgctaatccaagcctcaccccactactaggcctcctcctagcagcagcaggcaaatcagcccaattaggtctccacccctgactcccctcagccatagaaggccccaccccagtctcagccctactccactcaagcactatagttgtagcaggaatcttcttactcatccgcttccaccccctagcagaaaatagcccactaatccaaactctaacactatgcttaggcgctatcaccactctgttcgcagcagtctgcgcccttacacaaaatgacatcaaaaaaatcgtagccttctccacttcaagtcaactaggactcataatagttacaatcggcatcaaccaaccacacctagcattcctgcacatctgtacccacgccttcttcaaagccatactatttatgtgctccgggtccatcatccacaaccttaacaatgaacaagatattcgaaaaataggaggactactcaaaaccatacctctcacttcaacctccctcaccattggcagcctagcattagcaggaatacctttcctcacaggtttctactccaaagaccacatcatcgaaaccgcaaacatatcatacacaaacgcctgagccctatctattactctcatcgctacctccctaacaagcgcctatagcactcgaataattcttctcaccctaacaggtcaacctcgcttccccacccttactaacattaacgaaaataaccccaccctactaaaccccattaaacgcctggcagccggaagcctattcgcaggatttctcattactaacaacatttcccccgcatcccccttccaaacaacaatccccctctacctaaaactcacagccctcgctgtcactttcctaggacttctaacagccctagacctcaactacctaaccaacaaacttaaaataaaatccccactatgcacattttatttctccaacatactcggattctaccctagcatcacacaccgcacaatcccctatctaggccttcttacgagccaaaacctgcccctactcctcctagacctaacctgactagaaaagctattacctaaaacaatttcacagcaccaaatctccacctccatcatcacctcaacccaaaaaggcataattaaactttatttcctctctttcttcttcccactcatcctaaccctactcctaatcacataacctattcccccgagcaatctcaattacaatatatacaccaacaaacaatgttcaaccagtaactactactaatcaacgcccataatcatacaaagcccccgcaccaataggatcctcccgaatcaaccctgacccctctccttcataaattattcagcttcctacactattaaagtttaccacaaccaccaccccatcatactctttcacccacagcaccaatcctacctccatcgctaaccccactaaaacactcaccaagacctcaacccctgacccccatgcctcaggatactcctcaatagccatcgctgtagtatatccaaagacaaccatcattccccctaaataaattaaaaaaactattaaacccatataacctcccccaaaattcagaataataacacacccgaccacaccactaacaatcaatactaaacccccataaataggagaaggcttagaagaaaaccccacaaaccccattactaaacccacactcaacagaaacaaagcatacatcattattctcgcacggactacaaccacgaccaatgatatgaaaaaccatcgttgtatttcaactacaagaacaccaatgaccccaatacgcaaaattaaccccctaataaaattaattaaccactcattcatcgacctccccaccccatccaacatctccgcatgatgaaacttcggctcactccttggcgcctgcctgatcctccaaatcaccacaggactattcctagccatgcactactcaccagacgcctcaaccgccttttcatcaatcgcccacatcactcgagacgtaaattatggctgaatcatccgctaccttcacgccaatggcgcctcaatattctttatctgcctcttcctacacatcgggcgaggcctatattacggatcatttctctactcagaaacctgaaacatcggcattatcctcctgcttgcaactatagcaacagccttcataggctatgtcctcccgtgaggccaaatatcattctgaggggccacagtaattacaaacttactatccgccatcccatacattgggacagacctagttcaatgaatctgaggaggctactcagtagacagtcccaccctcacacgattctttacctttcacttcatcttgcccttcattattgcagccctagcagcactccacctcctattcttgcacgaaacgggatcaaacaaccccctaggaatcacctcccattccgataaaatcaccttccacccttactacacaatcaaagacgccctcggcttacttctcttccttctctccttaatgacattaacactattctcaccagacctcctaggcgacccagacaattataccctagccaaccccttaaatacccctccccacatcaagcccgaatgatatttcctattcgcctacacaattctccgatccgtccctaacaaactaggaggcgtccttgccctattactatccatcctcatcctagcaataatccccatcctccatatatccaaacaacaaagcataatatttcgcccactaagccaatcactttattgactcctagccgcagacctcctcattctaacctgaatcggaggacaaccagtaagctacccttttaccatcattggacaagtagcatccgtactatacttcacaacaatcctaatcctaataccaactatctccctaattgaaaacaaaatactcaaatgggcctgtccttgtagtataaactaatacaccagtcttgtaaaccggagatgaaaacctttttccaaggacaaatcagagaaaaagtctttaactccaccattagcacccaaagctaagattctaatttaaactattctctgttctttcatggggaagcagatttgggtaccacccaagtattgactcacccatcaacaaccgctatgtatttcgtacattactgccagccaccatgaatattgtacggtaccataaatacttgaccacctgtagtacataaaaacccaatccacatcaaacccccccccccactgcttacaagcaagtacagcaaccaaccctcaactatcacacatcaactgcaactccaaagccacccctcacccagtaggatatcaacaaacctacccacccttaacagtacatagtacataaagccatttaccgtacatagcacattacagtcaaatcccttctcgtccccatggatgacccccctcagataggggtcccttgaccaccatcctccgtgaaatcaatatcccgcacaagagtgctactctcctcgctccgggcccataacacttgggggtagctaaagtgaactgtatccgacatctggttcctacttcagggccataaagcctaaatagcccacacgttccccttaaataagacatcacgatg

SEQ ID NO: 449 - DNA, 16571 bp, Homo sapiens mitochondrial
  3109: "n" refers to a nucleotide at position 3107 of the Cambridge Reference Sequence (CRS, Anderson et al. 1981 Nature 290:457-465), later determined to be absent from the human mtDNA sequence according to the revised CRS (rCRS, Andrews et al. 1999 Nature Genetics 23:147); "n" therefore represents a single nucleotide deletion at a position corresponding to nucleotide 3107 of SEQ ID NO:1 as provided herein.
gatcacaggtctatcaccctattaaccactcacgggagctctccatgcatttggtattttcgtctggggggcatgcacgcgatagcattgcgagacgctggagccggagcaccctatgtcgcagtatctgtctttgattcctgcctcatcctattatttatcgcacctacgttcaatattacaggcgaacatacctactaaagtgtgttaattaattaatgcttgtaggacataataataacaattgaatgtctgcacagccgctttccacacagacatcataacaaaaaatttccaccaaaccccccctcccccccgcttctggccacagcacttaaacacatctctgccaaaccccaaaaacaaagaaccctaacaccagcctaaccagatttcaaattttatcttttggcggtatgcacttttaacagtcaccccccaactaacacattattttcccctcccactcccatactactaatctcatcaatacaacccccgcccatcctacccagcacacacacaccgctgctaaccccataccccgaaccaaccaaaccccaaagacaccccccacagtttatgtagcttacctcctcaaagcaatacactgaaaatgtttagacgggctcacatcaccccataaacaaataggtttggtcctagcctttctattagctcttagtaagattacacatgcaagcatccccgttccagtgagttcaccctctaaatcaccacgatcaaaagggacaagcatcaagcacgcagcaatgcagctcaaaacgcttagcctagccacacccccacgggaaacagcagtgattaacctttagcaataaacgaaagtttaactaagctatactaaccccagggttggtcaatttcgtgccagccaccgcggtcacacgattaacccaagtcaatagaagccggcgtaaagagtgttttagatcaccccctccccaataaagctaaaactcacctgagttgtaaaaaactccagttgacacaaaatagactacgaaagtggctttaacatatctgaacacacaatagctaagacccaaactgggattagataccccactatgcttagccctaaacctcaacagttaaatcaacaaaactgctcgccagaacactacgagccacagcttaaaactcaaaggacctggcggtgcttcatatccctctagaggagcctgttctgtaatcgataaaccccgatcaacctcaccacctcttgctcagcctatataccgccatcttcagcaaaccctgatgaaggctacaaagtaagcgcaagtacccacgtaaagacgttaggtcaaggtgtagcccatgaggtggcaagaaatgggctacattttctaccccagaaaactacgatagcccttatgaaacttaagggtcgaaggtggatttagcagtaaactgagagtagagtgcttagttgaacagggccctgaagcgcgtacacaccgcccgtcaccctcctcaagtatacttcaaaggacatttaactaaaacccctacgcatttatatagaggagacaagtcgtaacatggtaagtgtactggaaagtgcacttggacgaaccagagtgtagcttaacacaaagcacccaacttacacttaggagatttcaacttaacttgaccgctctgagctaaacctagccccaaacccactccaccttactaccagacaaccttagccaaaccatttacccaaataaagtataggcgatagaaattgaaacctggcgcaatagatatagtaccgcaagggaaagatgaaaaattataaccaagcataatatagcaaggactaacccctataccttctgcataatgaattaactagaaataactttgcaaggagagccaaagctaagacccccgaaaccagacgagctacctaagaacagctaaaagagcacacccgtctatgtagcaaaatagtgggaagatttataggtagaggcgacaaacctaccgagcctggtgatagctggttgtccaagatagaatcttagttcaactttaaatttgcccacagaaccctctaaatccccttgtaaatttaactgttagtccaaagaggaacagctctttggacactaggaaaaaaccttgtagagagagtaaaaaatttaacacccatagtaggcctaaaagcagccaccaattaagaaagcgttcaagctcaacacccactacctaaaaaatcccaaacatataactgaactcctcacacccaattggaccaatctatcaccctatagaagaactaatgttagtataagtaacatgaaaacattctcctccgcataagcctgcgtcagattaaaacactgaactgacaattaacagcccaatatctacaatcaaccaacaagtcattattaccctcactgtcaacccaacacaggcatgctcataaggaaaggttaaaaaaagtaaaaggaactcggcaaatcttaccccgcctgtttaccaaaaacatcacctctagcatcaccagtattagaggcaccgcctgcccagtgacacatgtttaacggccgcggtaccctaaccgtgcaaaggtagcataatcacttgttccttaaatagggacctgtatgaatggctccacgagggttcagctgtctcttacttttaaccagtgaaattgacctgcccgtgaagaggcgggcatgacacagcaagacgagaagaccctatggagctttaatttattaatgcaaacagtacctaacaaacccacaggtcctaaactaccaaacctgcattaaaaatttcggttggggcgacctcggagcagaacccaacctccgagcagtacatgctaagacttcaccagtcaaagcgaactactatactcaattgatccaataacttgaccaacggaacaagttaccctagggataacagcgcaatcctattctagagtccatatcaacaatagggtttacgacctcgatgttggatcaggacatcccgatggtgcagccgctattaaaggttcgtttgttcaacgattaaagtcctacgtgatctgagttcagaccggagtaatccaggtcggtttctatctacnttcaaattcctccctgtacgaaaggacaagagaaataaggcctacttcacaaagcgccttcccccgtaaatgatatcatctcaacttagtattatacccacacccacccaagaacagggtttgttaagatggcagagcccggtaatcgcataaaacttaaaactttacagtcagaggttcaattcctcttcttaacaacatacccatggccaacctcctactcctcattgtacccattctaatcgcaatggcattcctaatgcttaccgaacgaaaaattctaggctatatacaactacgcaaaggccccaacgttgtaggcccctacgggctactacaacccttcgctgacgccataaaactcttcaccaaagagcccctaaaacccgccacatctaccatcaccctctacatcaccgccccgaccttagctctcaccatcgctcttctactatgaacccccctccccatacccaaccccctggtcaacctcaacctaggcctcctatttattctagccacctctagcctagccgtttactcaatcctctgatcagggtgagcatcaaactcaaactacgccctgatcggcgcactgcgagcagtagcccaaacaatctcatatgaagtcaccctagccatcattctactatcaacattactaataagtggctcctttaacctctccacccttatcacaacacaagaacacctctgattactcctgccatcatgacccttggccataatatgatttatctccacactagcagagaccaaccgaacccccttcgaccttgccgaaggggagtccgaactagtctcaggcttcaacatcgaatacgccgcaggccccttcgccctattcttcatagccgaatacacaaacattattataataaacaccctcaccactacaatcttcctaggaacaacatatgacgcactctcccctgaactctacacaacatattttgtcaccaagaccctacttctaacctccctgttcttatgaattcgaacagcatacccccgattccgctacgaccaactcatacacctcctatgaaaaaacttcctaccactcaccctagcattacttatatgatatgtctccatacccattacaatctccagcattccccctcaaacctaagaaatatgtctgataaaagagttactttgatagagtaaataataggagcttaaacccccttatttctaggactatgagaatcgaacccatccctgagaatccaaaattctccgtgccacctatcacaccccatcctaaagtaaggtcagctaaataagctatcgggcccataccccgaaaatgttggttatacccttcccgtactaattaatcccctggcccaacccgtcatctactctaccatctttgcaggcacactcatcacagcgctaagctcgcactgattttttacctgagtaggcctagaaataaacatactagcttttattccagttctaaccaaaaaaataaaccctcgttccacagaagctgccatcaagtatttcctcacgcaagcaaccgcatccataatccttctaatagctatcctcttcaacaatatactctccggacaatgaaccataaccaatactaccaatcaatactcatcattaataatcataatggctatagcaataaaactaggaatagccccctttcacttctgagtcccagaggttacccaaggcacccctctgacatccggcctgcttcttctcacatgacaaaaactagcccccatctcaatcatataccaaatctctccctcactaaacgtaagccttctcctcaccctctcaatcttatccatcatagcaggcagttgaggtggattaaaccaaacccagctacgcaaaatcttagcatactcctcaattacccacataggatgaataatagcagttctaccgtacaaccctaacataaccattcttaatttaactatttatattatcctaactactaccgcattcctactactcaacttaaactccagcaccacgaccctactactatctcgcacctgaaacaagctaacatgactaacacccttaattccatccaccctcctctccctaggaggcctgcccccgctaaccggctttttgcccaaatgggccattatcgaagaattcacaaaaaacaatagcctcatcatccccaccatcatagccaccatcaccctccttaacctctacttctacctacgcctaatctactccacctcaatcacactactccccatatctaacaacgtaaaaataaaatgacagtttgaacatacaaaacccaccccattcctccccacactcatcgcccttaccacgctactcctacctatctccccttttatactaataatcttatagaaatttaggttaaatacagaccaagagccttcaaagccctcagtaagttgcaatacttaatttctgtaacagctaaggactgcaaaaccccactctgcatcaactgaacgcaaatcagccactttaattaagctaagcccttactagaccaatgggacttaaacccacaaacacttagttaacagctaagcaccctaatcaactggcttcaatctacttctcccgccgccgggaaaaaaggcgggagaagccccggcaggtttgaagctgcttcttcgaatttgcaattcaatatgaaaatcacctcggagctggtaaaaagaggcctaacccctgtctttagatttacagtccaatgcttcactcagccattttacctcacccccactgatgttcgccgaccgttgactattctctacaaaccacaaagacattggaacactatacctattattcggcgcatgagctggagtcctaggcacagctctaagcctccttattcgagccgagctgggccagccaggcaaccttctaggtaacgaccacatctacaacgttatcgtcacagcccatgcatttgtaataatcttcttcatagtaatacccatcataatcggaggctttggcaactgactagttcccctaataatcggtgcccccgatatggcgtttccccgcataaacaacataagcttctgactcttacctccctctctcctactcctgctcgcatctgctatagtggaggccggagcaggaacaggttgaacagtctaccctcccttagcagggaactactcccaccctggagcctccgtagacctaaccatcttctccttacacctagcaggtgtctcctctatcttaggggccatcaatttcatcacaacaattatcaatataaaaccccctgccataacccaataccaaacgcccctcttcgtctgatccgtcctaatcacagcagtcctacttctcctatctctcccagtcctagctgctggcatcactatactactaacagaccgcaacctcaacaccaccttcttcgaccccgccggaggaggagaccccattctataccaacacctattctgatttttcggtcaccctgaagtttatattcttatcctaccaggcttcggaataatctcccatattgtaacttactactccggaaaaaaagaaccatttggatacataggtatggtctgagctatgatatcaattggcttcctagggtttatcgtgtgagcacaccatatatttacagtaggaatagacgtagacacacgagcatatttcacctccgctaccataatcatcgctatccccaccggcgtcaaagtatttagctgactcgccacactccacggaagcaatatgaaatgatctgctgcagtgctctgagccctaggattcatctttcttttcaccgtaggtggcctgactggcattgtattagcaaactcatcactagacatcgtactacacgacacgtactacgttgtagctcacttccactatgtcctatcaataggagctgtatttgccatcataggaggcttcattcactgatttcccctattctcaggctacaccctagaccaaacctacgccaaaatccatttcactatcatattcatcggcgtaaatctaactttcttcccacaacactttctcggcctatccggaatgccccgacgttactcggactaccccgatgcatacaccacatgaaacatcctatcatctgtaggctcattcatttctctaacagcagtaatattaataattttcatgatttgagaagccttcgcttcgaagcgaaaagtcctaatagtagaagaaccctccataaacctggagtgactatatggatgccccccaccctaccacacattcgaagaacccgtatacataaaatctagacaaaaaaggaaggaatcgaaccccccaaagctggtttcaagccaaccccatggcctccatgactttttcaaaaaggtattagaaaaaccatttcataactttgtcaaagttaaattataggctaaatcctatatatcttaatggcacatgcagcgcaagtaggtctacaagacgctacttcccctatcatagaagagcttatcacctttcatgatcacgccctcataatcattttccttatctgcttcctagtcctgtatgcccttttcctaacactcacaacaaaactaactaatactaacatctcagacgctcaggaaatagaaaccgtctgaactatcctgcccgccatcatcctagtcctcatcgccctcccatccctacgcatcctttacataacagacgaggtcaacgatccctcccttaccatcaaatcaattggccaccaatggtactgaacctacgagtacaccgactacggcggactaatcttcaactcctacatacttcccccattattcctagaaccaggcgacctgcgactccttgacgttgacaatcgagtagtactcccgattgaagcccccattcgtataataattacatcacaagacgtcttgcactcatgagctgtccccacattaggcttaaaaacagatgcaattcccggacgtctaaaccaaaccactttcaccgctacacgaccgggggtatactacggtcaatgctctgaaatctgtggagcaaaccacagtttcatgcccatcgtcctagaattaattcccctaaaaatctttgaaatagggcccgtatttaccctatagcaccccctctaccccctctagagcccactgtaaagctaacttagcattaaccttttaagttaaagattaagagaaccaacacctctttacagtgaaatgccccaactaaatactaccgtatggcccaccataattacccccatactccttacactattcctcatcacccaactaaaaatattaaacacaaactaccacctacctccctcaccaaagcccataaaaataaaaaattataacaaaccctgagaaccaaaatgaacgaaaatctgttcgcttcattcattgcccccacaatcctaggcctacccgccgcagtactgatcattctatttccccctctattgatccccacctccaaatatctcatcaacaaccgactaatcaccacccaacaatgactaatcaaactaacctcaaaacaaatgataaccatacacaacactaaaggacgaacctgatctcttatactagtatccttaatcatttttattgccacaactaacctcctcggactcctgcctcactcatttacaccaaccacccaactatctataaacctagccatggccatccccttatgagcgggcgcagtgattataggctttcgctctaagattaaaaatgccctagcccacttcttaccacaaggcacacctacaccccttatccccatactagttattatcgaaaccatcagcctactcattcaaccaatagccctggccgtacgcctaaccgctaacattactgcaggccacctactcatgcacctaattggaagcgccaccctagcaatatcaaccattaaccttccctctacacttatcatcttcacaattctaattctactgactatcctagaaatcgctgtcgccttaatccaagcctacgttttcacacttctagtaagcctctacctgcacgacaacacataatgacccaccaatcacatgcctatcatatagtaaaacccagcccatgacccctaacaggggccctctcagccctcctaatgacctccggcctagccatgtgatttcacttccactccataacgctcctcatactaggcctactaaccaacacactaaccatataccaatgatggcgcgatgtaacacgagaaagcacataccaaggccaccacacaccacctgtccaaaaaggccttcgatacgggataatcctatttattacctcagaagtttttttcttcgcaggatttttctgagccttttaccactccagcctagcccctaccccccaattaggagggcactggcccccaacaggcatcaccccgctaaatcccctagaagtcccactcctaaacacatccgtattactcgcatcaggagtatcaatcacctgagctcaccatagtctaatagaaaacaaccgaaaccaaataattcaagcactgcttattacaattttactgggtctctattttaccctcctacaagcctcagagtacttcgagtctcccttcaccatttccgacggcatctacggctcaacattttttgtagccacaggcttccacggacttcacgtcattattggctcaactttcctcactatctgcttcatccgccaactaatatttcactttacatccaaacatcactttggcttcgaagccgccgcctgatactggcattttgtagatgtggtttgactatttctgtatgtctccatctattgatgagggtcttactcttttagtataaatagtaccgttaacttccaattaactagttttgacaacattcaaaaaagagtaataaacttcgccttaattttaataatcaacaccctcctagccttactactaataattattacattttgactaccacaactcaacggctacatagaaaaatccaccccttacgagtgcggcttcgaccctatatcccccgcccgcgtccctttctccataaaattcttcttagtagctattaccttcttattatttgatctagaaattgccctccttttacccctaccatgagccctacaaacaactaacctgccactaatagttatgtcatccctcttattaatcatcatcctagccctaagtctggcctatgagtgactacaaaaaggattagactgaaccgaattggtatatagtttaaacaaaacgaatgatttcgactcattaaattatgataatcatatttaccaaatgcccctcatttacataaatattatactagcatttaccatctcacttctaggaatactagtatatcgctcacacctcatatcctccctactatgcctagaaggaataatactatcgctgttcattatagctactctcataaccctcaacacccactccctcttagccaatattgtgcctattgccatactagtctttgccgcctgcgaagcagcggtgggcctagccctactagtctcaatctccaacacatatggcctagactacgtacataacctaaacctactccaatgctaaaactaatcgtcccaacaattatattactaccactgacatgactttccaaaaaacacataatttgaatcaacacaaccacccacagcctaattattagcatcatccctctactattttttaaccaaatcaacaacaacctatttagctgttccccaaccttttcctccgaccccctaacaacccccctcctaatactaactacctgactcctacccctcacaatcatggcaagccaacgccacttatccagtgaaccactatcacgaaaaaaactctacctctctatactaatctccctacaaatctccttaattataacattcacagccacagaactaatcatattttatatcttcttcgaaaccacacttatccccaccttggctatcatcacccgatgaggcaaccagccagaacgcctgaacgcaggcacatacttcctattctacaccctagtaggctcccttcccctactcatcgcactaatttacactcacaacaccctaggctcactaaacattctactactcactctcactgcccaagaactatcaaactcctgagccaacaacttaatatgactagcttacacaatagcttttatagtaaagatacctctttacggactccacttatgactccctaaagcccatgtcgaagcccccatcgctgggtcaatagtacttgccgcagtactcttaaaactaggcggctatggtataatacgcctcacactcattctcaaccccctgacaaaacacatagcctaccccttccttgtactatccctatgaggcataattataacaagctccatctgcctacgacaaacagacctaaaatcgctcattgcatactcttcaatcagccacatagccctcgtagtaacagccattctcatccaaaccccctgaagcttcaccggcgcagtcattctcataatcgcccacgggcttacatcctcattactattctgcctagcaaactcaaactacgaacgcactcacagtcgcatcataatcctctctcaaggacttcaaactctactcccactaatagctttttgatgacttctagcaagcctcgctaacctcgccttaccccccactattaacctactgggagaactctctgtgctagtaaccacgttctcctgatcaaatatcactctcctacttacaggactcaacatactagtcacagccctatactccctctacatatttaccacaacacaatggggctcactcacccaccacattaacaacataaaaccctcattcacacgagaaaacaccctcatgttcatacacctatcccccattctcctcctatccctcaaccccgacatcattaccgggttttcctcttgtaaatatagtttaaccaaaacatcagattgtgaatctgacaacagaggcttacgaccccttatttaccgagaaagctcacaagaactgctaactcatgcccccatgtctaacaacatggctttctcaacttttaaaggataacagctatccattggtcttaggccccaaaaattttggtgcaactccaaataaaagtaataaccatgcacactactataaccaccctaaccctgacttccctaattccccccatccttaccaccctcgttaaccctaacaaaaaaaactcatacccccattatgtaaaatccattgtcgcatccacctttattatcagtctcttccccacaacaatattcatgtgcctagaccaagaagttattatctcgaactgacactgagccacaacccaaacaacccagctctccctaagcttcaaactagactacttctccataatattcatccctgtagcattgttcgttacatggtccatcatagaattctcactgtgatatataaactcagacccaaacattaatcagttcttcaaatatctactcatcttcctaattaccatactaatcttagttaccgctaacaacctattccaactgttcatcggctgagagggcgtaggaattatatccttcttgctcatcagttgatgatacgcccgagcagatgccaacacagcagccattcaagcaatcctatacaaccgtatcggcgatatcggtttcatcctcgccttagcatgatttatcctacactccaactcatgagacccacaacaaatagcccttctaaacgctaatccaagcctcaccccactactaggcctcctcctagcagcagcaggcaaatcagcccaattaggtctccacccctgactcccctcagccatagaaggccccaccccagtctcagccctactccactcaagcactatagttgtagcaggaatcttcttactcatccgcttccaccccctagcagaaaatagcccactaatccaaactctaacactatgcttaggcgctatcaccactctgttcgcagcagtctgcgcccttacacaaaatgacatcaaaaaaatcgtagccttctccacttcaagtcaactaggactcataatagttacaatcggcatcaaccaaccacacctagcattcctgcacatctgtacccacgccttcttcaaagccatactatttatgtgctccgggtccatcatccacaaccttaacaatgaacaagatattcgaaaaataggaggactactcaaaaccatacctctcacttcaacctccctcaccattggcagcctagcattagcaggaatacctttcctcacaggtttctactccaaagaccacatcatcgaaaccgcaaacatatcatacacaaacgcctgagccctatctattactctcatcgctacctccctgacaagcgcctatagcactcgaataattcttctcaccctaacaggtcaacctcgcttccccacccttactaacattaacgaaaataaccccaccctactaaaccccattaaacgcctggcagccggaagcctattcgcaggatttctcattactaacaacatttcccccgcatcccccttccaaacaacaatccccctctacctaaaactcacagccctcgctgtcactttcctaggacttctaacagccctagacctcaactacctaaccaacaaacttaaaataaaatccccactatgcacattttatttctccaacatactcggattctaccctagcatcacacaccgcacaatcccctatctaggccttcttacgagccaaaacctgcccctactcctcctagacctaacctgactagaaaagctattacctaaaacaatttcacagcaccaaatctccacctccatcatcacctcaacccaaaaaggcataattaaactttacttcctctctttcttcttcccactcatcctaaccctactcctaatcacataacctattcccccgagcaatctcaattacaatatatacaccaacaaacaatgttcaaccagtaactactactaatcaacgcccataatcatacaaagcccccgcaccaataggatcctcccgaatcaaccctgacccctctccttcataaattattcagcttcctacactattaaagtttaccacaaccaccaccccatcatactctttcacccacagcaccaatcctacctccatcgctaaccccactaaaacactcaccaagacctcaacccctgacccccatgcctcaggatactcctcaatagccatcgctgtagtatatccaaagacaaccatcattccccctaaataaattaaaaaaactattaaacccatataacctcccccaaaattcagaataataacacacccgaccacaccgctaacaatcaatactaaacccccataaataggagaaggcttagaagaaaaccccacaaaccccattactaaacccacactcaacagaaacaaagcatacatcattattctcgcacggactacaaccacgaccaatgatatgaaaaaccatcgttgtatttcaactacaagaacaccaatgaccccaatacgcaaaactaaccccctaataaaattaattaaccactcattcatcgacctccccaccccatccaacatctccgcatgatgaaacttcggctcactccttggcgcctgcctgatcctccaaatcaccacaggactattcctagccatgcactactcaccagacgcctcaaccgccttttcatcaatcgcccacatcactcgagacgtaaattatggctgaatcatccgctaccttcacgccaatggcgcctcaatattctttatctgcctcttcctacacatcgggcgaggcctatattacggatcatttctctactcagaaacctgaaacatcggcattatcctcctgcttgcaactatagcaacagccttcataggctatgtcctcccgtgaggccaaatatcattctgaggggccacagtaattacaaacttactatccgccatcccatacattgggacagacctagttcaatgaatctgaggaggctactcagtagacagtcccaccctcacacgattctttacctttcacttcatcttgcccttcattattgcagccctagcagcactccacctcctattcttgcacgaaacgggatcaaacaaccccctaggaatcacctcccattccgataaaatcaccttccacccttactacacaatcaaagacgccctcggcttacttctcttccttctctccttaatgacattaacactattctcaccagacctcctaggcgacccagacaattataccctagccaaccccttaaacacccctccccacatcaagcccgaatgatatttcctattcgcctacacaattctccgatccgtccctaacaaactaggaggcgtccttgccctattactatccatcctcatcctagcaataatccccatcctccatatatccaaacaacaaagcataatatttcgcccactaagccaatcactttattgactcctagccgcagacctcctcattctaacctgaatcggaggacaaccagtaagctacccttttaccatcattggacaagtagcatccgtactatacttcacaacaatcctaatcctaataccaactatctccctaattgaaaacaaaatactcaaatgggcctgtccttgtagtataaattaatacaccagtcttgtaaaccggagatgaaaacctttttccaaggacaaatcagagaaaaagtctttaactccaccattagcacccaaagctaagattctaatttaaactattctctgttctttcatggggaagcagatttgggtaccacccaagtattgactcacccatcaacaaccgctatgtatttcgtacattactgccagccaccatgaatattgtacggtaccataaatacttgaccacctgtagtacataaaaacccaatccacatcaaaaccccctccccatgcttacaagcaagtacagcaatcaaccctcaactatcacacatcaactgcaactccaaagtcacccctcacccactaggataccaacaaacctacccacccttaacagtacatagtacataaagccatttaccgtacatagcacattacagtcaaatcccttctcgtccccatggatgacccccctcagataggggtcccttgaccaccatcctccgtgaaatcaatatcccgcacaagagtgctactctcctcgctccgggcccataacacttgggggtagctaaagtgaactgtatccgacatctggttcctacttcagggtcataaagcctaaatagcccacacgttccccttaaataagacatcacgatg

SEQ ID NO: 450 - DNA, 16570 bp, Homo sapiens mitochondrial
  3108: "n" refers to a nucleotide at position 3107 of the Cambridge Reference Sequence (CRS, Anderson et al. 1981 Nature 290:457-465), later determined to be absent from the human mtDNA sequence according to the revised CRS (rCRS, Andrews et al. 1999 Nature Genetics 23:147); "n" therefore represents a single nucleotide deletion at a position corresponding to nucleotide 3107 of SEQ ID NO:1 as provided herein.
gatcacaggtctatcaccctattaaccactcacgggagctctccatgcatttggtattttcgtctggggggtgtgcacgcgatagcattgcgagacgctggagccggagcaccctatgtcgcagtatctgtctttgattcctgcctcatcctattatttatcgcacctacgttcaatattacaggcgaacatacttactaaagtgtgttaattaattaatgcttgtaggacataataataacaattgaatgtctgcacagccgctttccacacagacatcataacaaaaaatttccaccaaaccccccctcccccgccttctggccacagcacttaaacacatctctgccaaaccccaaaaacaaagaaccctaacaccagcctaaccagatttcaaattttatcttttggcggtatgcacttttaacagtcaccccccaactaacacattattttcccctcccactcccatactactaatctcatcaatacaacccccgcccatcctacccagcacacacacaccgctgctaaccccataccccgaaccaaccaaaccccaaagacaccccccacagtttatgtagcttacctcctcaaagcaatacactgaaaatgtttagacgggctcacatcaccccataaacaaataggtttggtcctagcctttctattagctcttagtaagattacacatgcaagcatccccgttccagtgagttcaccctctaaatcaccacgatcaaaagggacaagcatcaagcacgcagcaatgcagctcaaaacgcttagcctagccacacccccacgggaaacagcagtgattaacctttagcaataaacgaaagtttaactaagctatactaaccccagggttggtcaatttcgtgccagccaccgcggtcacacgattaacccaagtcaatagaagccggcgtaaagagtgttttagatcaccccctccccaataaagctaaaactcacctgagttgtaaaaaactccagttgacacaaaatagactacgaaagtggctttaacatatctgaacacacaatagctaagacccaaactgggattagataccccactatgcttagccctaaacctcaacagttaaatcaacaaaactgctcgccagaacactacgagccacagcttaaaactcaaaggacctggcggtgcttcatatccctctagaggagcctgttctgtaatcgataaaccccgatcaacctcaccacctcttgctcagcctatataccgccatcttcagcaaaccctgatgaaggctacaaagtaagcgcaagtacccacgtaaagacgttaggtcaaggtgtagcccatgaggtggcaagaaatgggctacattttctaccccagaaaactacgatagcccttatgaaacttaagggtcgaaggtggatttagcagtaaactgagagtagagtgcttagttgaacagggccctgaagcgcgtacacaccgcccgtcaccctcctcaagtatacttcaaaggacatttaactaaaacccctacgcatttatatagaggagacaagtcgtaacatggtaagtgtactggaaagtgcacttggacgaaccagagtgtagcttaacacaaagcacccaacttacacttaggagatttcaacttaacttgaccgctctgagctaaacctagccccaaacccactccaccttactaccagacaaccttagccaaaccatttacccaaataaagtataggcgatagaaattgaaacctggcgcaatagatatagtaccgcaagggaaagatgaaaaattataaccaagcataatatagcaaggactaacccctataccttctgcataatgaattaactagaaataactttgcaaggagagccaaagctaagacccccgaaaccagacgagctacctaagaacagctaaaagagcacacccgtctatgtagcaaaatagtgggaagatttataggtagaggcgacaaacctaccgagcctggtgatagctggttgtccaagatagaatcttagttcaactttaaatttgcccacagaaccctctaaatccccttgtaaatttaactgttagtccaaagaggaacagctctttggacactaggaaaaaaccttgtagagagagtaaaaaatttaacacccatagtaggcctaaaagcagccaccaattaagaaagcgttcaagctcaacacccactacctaaaaaatcccaaacatataactgaactcctcacacccaattggaccaatctatcaccctatagaagaactaatgttagtataagtaacatgaaaacattctcctccgcataagcctgcgtcagattaaaacactgaactgacaattaacagcccaatatctacaatcaaccaacaagtcattattaccctcactgtcaacccaacacaggcatgctcataaggaaaggttaaaaaaagtaaaaggaactcggcaaatcttaccccgcctgtttaccaaaaacatcacctctagcatcaccagtattagaggcaccgcctgcccagtgacacatgtttaacggccgcggtaccctaaccgtgcaaaggtagcataatcacttgttccttaaatagggacctgtatgaatggctccacgagggttcagctgtctcttacttttaaccagtgaaattgacctgcccgtgaagaggcgggcataacacagcaagacgagaagaccctatggagctttaatttattaatgcaaacagtacctaacaaacccacaggtcctaaactaccaaacctgcattaaaaatttcggttggggcgacctcggagcagaacccaacctccgagcagtacatgctaagacttcaccagtcaaagcgaactactatactcaattgatccaataacttgaccaacggaacaagttaccctagggataacagcgcaatcctattctagagtccatatcaacaatagggtttacgacctcgatgttggatcaggacatcccaatggtgcagccgctattaaaggttcgtttgttcaacgattaaagtcctacgtgatctgagttcagaccggagtaatccaggtcggtttctatctacnttcaaattcctccctgtacgaaaggacaagagaaataaggcctacttcacaaagcgccttcccccgtaaatgatatcatctcaacttagtattatacccacacccacccaagaacagggtttgttaagatggcagagcccggtaatcgcataaaacttaaaactttacagtcagaggttcaattcctcttcttaacaacatacccatggccaacctcctactcctcattgtacccattctaatcgcaatggcattcctaatgcttaccgaacgaaaaattctaggctatatacaactacgcaaaggccccaacgttgtaggcccctacgggctactacaacccttcgctgacgccataaaactcttcaccaaagagcccctaaaacccgccacatctaccatcaccctctacatcaccgccccgaccttagctctcaccatcgctcttctactatgaacccccctccccatacccaaccccctggtcaacctcaacctaggcctcctatttattctagccacctctagcctagccgtttactcaatcctctgatcagggtgagcatcaaactcaaactacgccctgatcggcgcactgcgagcagtagcccaaacaatctcatatgaagtcaccctagccatcattctactatcaacattactaataagtggctcctttaacctctccacccttatcacaacacaagaacacctctgattactcctgccatcatgacccttggccataatatgatttatctccacactagcagagaccaaccgaacccccttcgaccttgccgaaggggagtccgaactagtctcaggcttcaacatcgaatacgccgcaggccccttcgccctattcttcatagccgaatacacaaacattattataataaacaccctcaccactacaatcttcctaggaacaacatatgacgcactctcccctgaactctacacaacatattttgtcaccaagaccctacttctaacctccctgttcttatgaattcgaacagcatacccccgattccgctacgaccaactcatacacctcctatgaaaaaacttcctaccactcaccctagcattacttatatgatatgtctccatacccattacaatctccagcattccccctcaaacctaagaaatatgtctgataaaagagttactttgatagagtaaataataggagcttaaacccccttatttctaggactatgagaatcgaacccatccctgagaatccaaaattctccgtgccacctatcacaccccatcctaaagtaaggtcagctaaataagctatcgggcccataccccgaaaatgttggttatacccttcccgtactaattaatcccctggcccaacccgtcatctactctaccatctttgcaggcacactcatcacagcgctaagctcgcactgattttttacctgagtaggcctagaaataaacatgctagcttttattccagttctaaccaaaaaaataaaccctcgttccacagaagctgccatcaagtatttcctcacgcaagcaaccgcatccataatccttctaatagctatcctcttcaacaatatactctccggacaatgaaccataaccaatactaccaatcaatactcatcattaataatcataatggctatagcaataaaactaggaatagccccctttcacttctgagtcccagaggttacccaaggcacccctctgacatccggcctgcttcttctcacatgacaaaaactagcccccatctcaatcatataccaaatctctccctcactaaacgtaagccttctcctcactctctcaatcttatccatcatagcaggcagttgaggtggattaaaccaaacccagctacgcaaaatcttagcatactcctcaattacccacataggatgaataatagcagttctaccgtacaaccctaacataaccattcttaatttaactatttatattatcctaactactaccgcattcctactactcaacttaaactccagcaccacgaccctactactatctcgcacctgaaacaagctaacatgactaacacccttaattccatccaccctcctctccctaggaggcctgcccccgctaaccggctttttgcccaaatgggccattatcgaagaattcacaaaaaacaatagcctcatcatccccaccatcatagccaccatcaccctccttaacctctacttctacctacgcctaatctactccacctcaatcacactactccccatatctaacaacgtaaaaataaaatgacagtttgaacatacaaaacccaccccattcctccccacactcatcgcccttaccacgctactcctacctatctccccttttatactaataatcttatagaaatttaggttaaatacagaccaagagccttcaaagccctcagtaagttgcaatacttaatttctgtaacagctaaggactgcaaaaccccactctgcatcaactgaacgcaaatcagccactttaattaagctaagcccttactagaccaatgggacttaaacccacaaacacttagttaacagctaagcaccctaatcaactggcttcaatctacttctcccgccgccgggaaaaaaggcgggagaagccccggcaggtttgaagctgcttcttcgaatttgcaattcaatatgaaaatcacctcggagctggtaaaaagaggcctaacccctgtctttagatttacagtccaatgcttcactcagccattttacctcacccccactgatgttcgccgaccgttgactattctctacaaaccacaaagacattggaacactatacctattattcggcgcatgagctggagtcctaggcacagctctaagcctccttattcgagccgagctgggccagccaggcaaccttctaggtaacgaccacatctacaacgttatcgtcacagcccatgcatttgtaataatcttcttcatagtaatacccatcataatcggaggctttggcaactgactagttcccctaataatcggtgcccccgatatggcgtttccccgcataaacaacataagcttctgactcttacctccctctctcctactcctgctcgcatctgctatagtggaggccggagcaggaacaggttgaacagtctaccctcccttagcagggaactactcccaccctggagcctccgtagacctaaccatcttctccttacacctagcaggcgtctcctctatcttaggggccatcaatttcatcacaacaattatcaatataaaaccccctgccataacccaataccaaacgcccctcttcgtctgatccgtcctaatcacagcagtcctacttctcctatctctcccagtcctagctgctggcatcactatactactaacagaccgcaacctcaacaccaccttcttcgaccccgccggaggaggagaccccattctataccaacacctattctgatttttcggtcaccctgaagtttatattcttatcctaccaggcttcggaataatctcccatattgtaacttactactccggaaaaaaagaaccatttggatacataggtatggtctgagctatgatatcaattggcttcctagggtttatcgtgtgagcacaccatatatttacagtaggaatagacgtagacacacgagcatatttcacctccgctaccataatcatcgctatccccaccggcgtcaaagtatttagctgactcgccacactccacggaagcaatatgaaatgatctgctgcagtgctctgagccctaggattcatctttcttttcaccgtaggtggcctgactggcattgtattagcaaactcatcactagacatcgtactacacgacacgtactacgttgtagcccacttccactatgtcctatcaataggagctgtatttgccatcataggaggcttcattcactgatttcccctattctcaggctacaccctagaccaaacctacgccaaaatccatttcactatcatattcatcggcgtaaatctaactttcttcccacaacactttctcggcctatccggaatgccccgacgttactcggactaccccgatgcatacaccacatgaaacatcctatcatctgtaggctcattcatttctctaacagcagtaatattaataattttcatgatttgagaagccttcgcttcgaagcgaaaagtcctaatagtagaagaaccctccataaacctggagtgactatatggatgccccccaccctaccacacattcgaagaacccgtatacataaaatctagacaaaaaaggaaggaatcgaaccccccaaagctggtttcaagccaaccccatggcctccatgactttttcaaaaaggtattagaaaaaccatttcataactttgtcaaagttaaattataggctaaatcctatatatcttaatggcacatgcagcgcaagtaggtctacaagacgctacttcccctatcatagaagagcttatcacctttcatgatcacgccctcataatcattttccttatctgcttcctagtcctgtatgcccttttcctaacactcacaacaaaactaactaatactaacatctcagacgctcaggaaatagaaaccgtctgaactatcctgcccgccatcatcctagtcctcatcgccctcccatccctacgcatcctttacataacagacgaggtcaacgatccctcccttaccatcaaatcaattggccaccaatggtactgaacctacgagtacaccgactacggcggactaatcttcaactcctacatacttcccccattattcctagaaccaggcgacctgcgactccttgacgttgacaatcgagtagtactcccgattgaagcccccattcgtataataattacatcacaagacgtcttgcactcatgagctgtccccacattaggcttaaaaacagatgcaattcccggacgtctaaaccaaaccactttcaccgctacacgaccgggggtatactacggtcaatgctctgaaatctgtggagcaaaccacagtttcatgcccatcgtcctagaattaattcccctaaaaatctttgaaatagggcccgtatttaccctatagcaccccctctaccccctctagagcccactgtaaagctaacttagcattaaccttttaagttaaagattaagagaaccaacacctctttacagtgaaatgccccaactaaatactaccgtatggcccaccataattacccccatactccttacactattcctcatcacccaactaaaaatattaaacacaaactaccacctacctccctcaccaaagcccataaaaataaaaaattataacaaaccctgagaaccaaaatgaacgaaaatctgttcgcttcattcattgcccccacaatcctaggcctacccgccgcagtactgatcattctatttccccctctattgatccccacctccaaatatctcatcaacaaccgactaatcaccacccaacaatgactaatcaaactaacctcaaaacaaatgataaccatacacaacactaaaggacgaacctgatctcttatactagtatccttaatcatttttattgccacaactaacctcctcggactcctgcctcactcatttacaccaaccacccaactatctataaacctagccatggccatccccttatgagcgggcgcagtgattataggctttcgctctaagattaaaaatgccctagcccacttcttaccacaaggcacacctacaccccttatccccatactagttattatcgaaaccatcagcctactcattcaaccaatagccctggccgtacgcctaaccgctaacattactgcaggccacctactcatgcacctaattggaagcgccaccctagcaatatcaaccattaaccttccctctacacttatcatcttcacaattctaattctactgactatcctagaaatcgctgtcgccttaatccaagcctacgttttcacacttctagtaagcctctacctgcacgacaacacataatgacccaccaatcacatgcctatcatatagtaaaacccagcccatgacccctaacaggggccctctcagccctcctaatgacctccggcctagccatgtgatttcacttccactccataacgctcctcatactaggcctactaaccaacacactaaccatataccaatgatggcgcgatgtaacacgagaaagcacataccaaggccaccacacaccacctgtccaaaaaggccttcgatacgggataatcctatttattacctcagaagtttttttcttcgcaggatttttctgagccttttaccactccagcctagcccctaccccccaattaggagggcactggcccccaacaggcatcaccccgctaaatcccctagaagtcccactcctaaacacatccgtattactcgcatcaggagtatcaatcacctgagctcaccatagtctaatagaaaacaaccgaaaccaaataattcaagcactgcttattacaattttactgggtctctattttaccctcctacaagcctcagagtacttcgagtctcccttcaccatttccgacggcatctacggctcaacattttttgtagccacaggcttccacggacttcacgtcattattggctcaactttcctcactatctgcttcatccgccaactaatatttcactttacatccaaacatcactttggcttcgaagccgccgcctgatactggcattttgtagatgtggtttgactatttctgtatgtctccatctattgatgagggtcttactcttttagtataaatagtaccgttaacttccaattaactagttttgacaacattcaaaaaagagtaataaacttcgccttaattttaataatcaacaccctcctagccttactactaataattattacattttgactaccacaactcaacggctacatagaaaaatccaccccttacgagtgcggcttcgaccctatatcccccgcccgcgtccctttctccataaaattcttcttagtagctattaccttcttattatttgatctagaaattgccctccttttacccctaccatgagccctacaaacaactaacctgccactaatagttatgtcatccctcttattaatcatcatcctagccctaagtctggcctatgagtgactacaaaaaggattagactgaaccgaattggtatatagtttaaacaaaacgaatgatttcgactcattaaattatgataatcatatttaccaaatgcccctcatttacataaatattatactagcatttaccatctcacttctaggaatactagtatatcgctcacacctcatatcctccctactatgcctagaaggaataatactatcgctgttcattatagctactctcataaccctcaacacccactccctcttagccaatattgtgcctattgccatactagtctttgccgcctgcgaagcagcggtgggcctagccctactagtctcaatctccaacacatatggcctagactacgtacataacctaaacctactccaatgctaaaactaatcgtcccaacaattatattactaccactgacatgactttccaaaaaacacataatttgaatcaacacaaccacccacagcctaattattagcatcatccctctactattttttaaccaaatcaacaacaacctatttagctgttccccaaccttttcctccgaccccctaacaacccccctcctaatactaactacctgactcctacccctcacaatcatggcaagccaacgccacttatccagtgaaccactatcacgaaaaaaactctacctctctatactaatctccctacaaatctccttaattataacattcacagccacagaactaatcatattttatatcttcttcgaaaccacacttatccccaccttggctatcatcacccgatgaggcaaccagccagaacgcctgaacgcaggcacatacttcctattctacaccctagtaggctcccttcccctactcatcgcactaatttacactcacaacaccctaggctcactaaacattctactactcactctcactgcccaagaactatcaaactcctgagccaacaacttaatatgactagcttacacaatagcttttatagtaaagatacctctttacggactccacttatgactccctaaagcccatgtcgaagcccccatcgctgggtcaatagtacttgccgcagtactcttaaaactaggcggctatggtataatacgcctcacactcattctcaaccccctgacaaaacacatagcctaccccttccttgtactatccctatgaggcataattataacaagctccatctgcctacgacaaacagacctaaaatcgctcattgcatactcttcaatcagccacatagccctcgtagtaacagccattctcatccaaaccccctgaagcttcaccggcgcagtcattctcataatcgcccacgggcttacatcctcattactattctgcctagcaaactcaaactacgaacgcactcacagtcgcatcataatcctctctcaaggacttcaaactctactcccactaatagctttttgatgacttctagcaagcctcgctaacctcgccttaccccccactattaacctactgggagaactctctgtgctagtaaccacgttctcctgatcaaatatcactctcctacttacaggactcaacatactagtcacagccctatactccctctacatatttaccacaacacaatggggctcactcacccaccacattaacaacataaaaccctcattcacacgagaaaacaccctcatgttcatacacctatcccccattctcctcctatccctcaaccccgacatcattaccgggttttcctcttgtaaatatagtttaaccaaaacatcagattgtgaatctgacaacagaggcttacgaccccttatttaccgagaaagctcacaagaactgctaactcatgcccccatgtctaacaacatggctttctcaacttttaaaggataacagctatccattggtcttaggccccaaaaattttggtgcaactccaaataaaagtaataaccatgcacactactataaccaccctaaccctgacttccctaattccccccatccttaccaccctcgttaaccctaacaaaaaaaactcatacccccattatgtaaaatccattgtcgcatccacctttattatcagtctcttccccacaacaatattcatgtgcctagaccaagaagttattatctcgaactgacactgagccacaacccaaacaacccagctctccctaagcttcaaactagactacttctccataatattcatccctgtagcattgttcgttacatggtccatcatagaattctcactgtgatatataaactcagacccaaacattaatcagttcttcaaatatctactcatcttcctaattaccatactaatcttagttaccgctaacaacctattccaactgttcatcggctgagagggcgtaggaattatatccttcttgctcatcagttgatgatacgcccgagcagatgccaacacagcagccattcaagcaatcctatacaaccgtatcggcgatatcggtttcatcctcgccttagcatgatttatcctacactccaactcatgagacccacaacaaatagcccttctaaacgctaatccaagcctcaccccactactaggcctcctcctagcagcagcaggcaaatcagcccaattaggtctccacccctgactcccctcagccatagaaggccccaccccagtctcagccctactccactcaagcactatagttgtagcaggaatcttcttactcatccgcttccaccccctagcagaaaatagcccactaatccaaactctaacactatgcttaggcgctatcaccactctgttcgcagcagtctgcgcccttacacaaaatgacatcaaaaaaatcgtagccttctccacttcaagtcaactaggactcataatagttacaatcggcatcaaccaaccacacctagcattcctgcacatctgtacccacgccttcttcaaagccatactatttatgtgctccgggtccatcatccacaaccttaacaatgaacaagatattcgaaaaataggaggactactcaaaaccatacctctcacttcaacctccctcaccattggcagcctagcattagcaggaatacctttcctcacaggtttctactccaaagaccacatcatcgaaaccgcaaacatatcatacacaaacgcctgagccctatctattactctcatcgctacctccctgacaagcgcctatagcactcgaataattcttctcaccctaacaggtcaacctcgcttccccacccttactaacattaacgaaaataaccccaccctactaaaccccattaaacgcctggcagccggaagcctattcgcaggatttctcattactaacaacatttcccccgcatcccccttccaaacaacaatccccctctacctaaaactcacagccctcgctgtcactttcctaggacttctaacagccctagacctcaactacctaaccaacaaacttaaaataaaatccccactatgcacattttatttctccaacatactcggattctaccctagcatcacacaccgcacaatcccctatctaggccttcttacgagccaaaacctgcccctactcctcctagacctaacctgactagaaaagctattacctaaaacaatttcacagcaccaaatctccacctccatcatcacctcaacccaaaaaggcataattaaactttacttcctctctttcttcttcccactcatcctaaccctactcctaatcacataacctattcccccgagcaatctcaattacaatatatacaccaacaaacaatgttcaaccagtaactactactaatcaacgcccataatcatacaaagcccccgcaccaataggatcctcccgaatcaaccctgacccctctccttcataaattattcagcttcctacactattaaagtttaccacaaccaccaccccatcatactctttcacccacagcaccaatcctacctccatcgctaaccccactaaaacactcaccaagacctcaacccctgacccccatgcctcaggatactcctcaatagccatcgctgtagtatatccaaagacaaccatcattccccctaaataaattaaaaaaactattaaacccatataacctcccccaaaattcagaataataacacacccgaccacaccgctaacaatcaatactaaacccccataaataggagaaggcttagaagaaaaccccacaaaccccattactaaacccacactcaacagaaacaaagcatacatcattattctcgcacggactacaaccacgaccaatgatatgaaaaaccatcgttgtatttcaactacaagaacaccaatgaccccaatacgcaaaactaaccccctaataaaattaattaaccactcattcatcgacctccccaccccatccaacatctccgcatgatgaaacttcggctcactccttggcgcctgcctgatcctccaaatcaccacaggactattcctagccatgcactactcaccagacgcctcaaccgccttttcatcaatcgcccacatcactcgagacgtaaattatggctgaatcatccgctaccttcacgccaatggcgcctcaatattctttatctgcctcttcctacacatcgggcgaggcctatattacggatcatttctctactcagaaacctgaaacatcggcattatcctcctgcttgcaactatagcaacagccttcataggctatgtcctcccgtgaggccaaatatcattctgaggggccacagtaattacaaacttactatccgccatcccatacattgggacagacctagttcaatgaatctgaggaggctactcagtagacagtcccaccctcacacgattctttacctttcacttcatcttgcccttcattattgcagccctagcagcactccacctcctattcttgcacgaaacgggatcaaacaaccccctaggaatcacctcccattccgataaaatcaccttccacccttactacacaatcaaagacgccctcggcttacttctcttccttctctccttaatgacattaacactattctcaccagacctcctaggcgacccagacaattataccctagccaaccccttaaacacccctccccacatcaagcccgaatgatatttcctattcgcctacacaattctccgatccgtccctaacaaactaggaggcgtccttgccctattactatccatcctcatcctagcaataatccccatcctccatatatccaaacaacaaagcataatatttcgcccactaagccaatcactttattgactcctagccgcagacctcctcattctaacctgaatcggaggacaaccagtaagctacccttttaccatcattggacaagtagcatccgtactatacttcacaacaatcctaatcctaataccaactatctccctaattgaaaacaaaatactcaaatgggcctgtccttgtagtataaactaatacaccagtcttgtaaaccggagatgaaaacctttttccaaggacaaatcagagaaaaagtctttaactccaccattagcacccaaagctaagattctaatttaaactattctctgttctttcatggggaagcagatttgggtaccacccaagtattgactcacccatcaacaaccgctatgtatttcgtacattactgccagccaccatgaatattgtacggtaccataaatacttgaccacctgtagtacatgaaaacccaacctacatcaaaaccccctccccatgcttacaagcaagcacagcaatcaaccctcaactatcacacatcaactgcaactccaaagccacccctcacccactaggataccaacaaacctacccacccttaacagtacatagtacataaagccatttaccgtacatagcacattacagtcaaatcccttctcgtccccatggatgacccccctcagataggggtcccttgaccaccatcctccgtgaaatcaatatcccgcacaagagtgctactctcctcgctccgggcccataacacttgggggtagctaaagtgaactgtatccgacatctggttcctacttcagggccataaagcctaaatagcccacacgttccccttaaataagacatcacgatg

SEQ ID NO: 451 - DNA, 16572 bp, Homo sapiens mitochondrial
  3110: "n" refers to a nucleotide at position 3107 of the Cambridge Reference Sequence (CRS, Anderson et al. 1981 Nature 290:457-465), later determined to be absent from the human mtDNA sequence according to the revised CRS (rCRS, Andrews et al. 1999 Nature Genetics 23:147); "n" therefore represents a single nucleotide deletion at a position corresponding to nucleotide 3107 of SEQ ID NO:1 as provided herein.
gatcacaggtctatcaccctattaaccactcacgggagctctccatgcatttggtattttcgcttagggggtatgcacgcgatagcattgcgagacgctggagccggagcaccctatgtcgcagtatctgtctttgattcctgcctcattctattatttatcgcacctacgttcaatattacaggcgaacatacttactaaagtgtgttaattaattaatgcttgtaggacataataataacaattgaatgtctgcacagccgctttccacacagacatcataacaaaaaatttccaccaaaccccccctccccccccgcttctggccacagcacttaaacacatctctgccaaaccccaaaaacaaagaaccctaacaccagcctaaccagatttcaaattttatcttttggcggtatgcacttttaacagtcaccccccaactaacacattattttcccctcccactcccatactactaatctcatcaatacaacccccgcccatcctacccagcacacacacaccgctgctaaccccataccccgaaccaaccaaaccccaaagacaccccccacagtttatgtagcttacctcctcaaagcaatacactgaaaatgtttagacgggctcacatcaccccataaacaaataggtttggtcctagcctttctattagctcttagtaagattacacatgcaagcatccccgttccagtgagttcaccctctaaatcaccacgatcaaaagggacaagcatcaagcacgcagcaatgcagctcaaaacgcttagcctagccacacccccacgggaaacagcagtgattaacctttagcaataaacgaaagtttaactaagctatactaaccccagggttggtcaatttcgtgccagccaccgcggtcacacgattaacccaagtcaatagaagccggcgtaaagagtgttttagatcaccccctccccaataaagctaaaactcacctgagttgtaaaaaactccagttgacacaaaatagactacgaaagtggctttaacatatctgaacacacaatagctaagacccaaactgggattagataccccactatgcttagccctaaacctcaacagttaaatcaacaaaactgctcgccagaacactacgagccacagcttaaaactcaaaggacctggcggtgcttcatatccctctagaggagcctgttctgtaatcgataaaccccgatcaacctcaccacctcttgctcagcctatataccgccatcttcagcaaaccctgatgaaggctacaaagtaagcgcaagtacccacgtaaagacgttaggtcaaggtgtagcccatgaggtggcaagaaatgggctacattttctaccccagaaaactacgatagcccttatgaaacttaagggtcgaaggtggatttagcagtaaactgagagtagagtgcttagttgaacagggccctgaagcgcgtacacaccgcccgtcaccctcctcaagtatacttcaaaggacatttaactaaaacccctacgcatttatatagaggagacaagtcgtaacatggtaagtgtactggaaagtgcacttggacgaaccagagtgtagcttaacacaaagcacccaacttacacttaggagatttcaacttaacttgaccgctctgagctaaacctagccccaaacccactccaccttactaccagacaaccttagccaaaccatttacccaaataaagtataggcgatagaaattgaaacctggcgcaatagatatagtaccgcaagggaaagatgaaaaattataaccaagcataatatagcaaggactaacccctataccttctgcataatgaattaactagaaataactttgcaaggagagccaaagctaagacccccgaaaccagacgagctacctaagaacagctaaaagagcacacccgtctatgtagcaaaatagtgggaagatttataggtagaggcgacaaacctaccgagcctggtgatagctggttgtccaagatagaatcttagttcaactttaaatttgcccacagaaccctctaaatccccttgtaaatttaactgttagtccaaagaggaacagctctttggacactaggaaaaaaccttgtagagagagtaaaaaatttaacacccatagtaggcctaaaagcagccaccaattaagaaagcgttcaagctcaacacccactacctaaaaaatcccaaacatataactgaactcctcacacccaattggaccaatctatcaccctatagaagaactaatgttagtataagtaacatgaaaacattctcctccgcataagcctgcgtcagattaaaacactgaactgacaattaacagcccaatatctacaatcaaccaacaagtcattattaccctcactgtcaacccaacacaggcatgctcataaggaaaggttaaaaaaagtaaaaggaactcggcaaatcttaccccgcctgtttaccaaaaacatcacctctagcatcaccagtattagaggcaccgcctgcccagtgacacatgtttaacggccgcggtaccctaaccgtgcaaaggtagcataatcacttgttccttaaatagggacctgtatgaatggctccacgagggttcagctgtctcttacttttaaccagtgaaattgacctgcccgtgaagaggcgggcataacacagcaagacgagaagaccctatggagctttaatttattaatgcaaacagtacctaacaaacccacaggtcctaaactaccaaacctgcattaaaaatttcggttggggcgacctcggagcagaacccaacctccgagcagtacatgctaagacttcaccagtcaaagcgaactactatactcaattgatccaataacttgaccaacggaacaagttaccctagggataacagcgcaatcctattctagagtccatatcaacaatagggtttacgacctcgatgttggatcaggacatcccgatggtgcagccgctattaaaggttcgtttgttcaacgattaaagtcctacgtgatctgagttcagaccggagtaatccaggtcggtttctatctacnttcaaattcctccctgtacgaaaggacaagagaaataaggcctacttcacaaagcgccttcccccgtaaatgatatcatctcaacttagtattatacccacacccacccaagaacagggtttgttaagatggcagagcccggtaatcgcataaaacttaaaactttacagtcagaggttcaattcctcttcttaacaacatacccatggccaacctcctactcctcattgtacccattctaatcgcaatggcattcctaatgcttaccgaacgaaaaattctaggctatatacaactacgcaaaggccccaacgttgtaggcccctacgggctactacaacccttcgctgacgccataaaactcttcaccaaagagcccctaaaacccgccacatctaccatcaccctctacatcaccgccccgaccttagctctcaccatcgctcttctactatgaacccccctccccatacccaaccccctggtcaacctcaacctaggcctcctatttattctagccacctctagcctagccgtttactcaatcctctgatcagggtgagcatcaaactcaaactacgccctgatcggcgcactgcgagcagtagcccaaacaatctcatatgaagtcaccctagccatcattctactatcaacattactaataagtggctcctttaacctctccacccttatcacaacacaagaacacctctgattactcctgccatcatgacccttggccataatatgatttatctccacactagcagagaccaaccgaacccccttcgaccttgccgaaggggagtccgaactagtctcaggcttcaacatcgaatacgccgcaggccccttcgccctattcttcatagccgaatacacaaacattattataataaacaccctcaccactacaatcttcctaggaacaacatatgacgcactctcccctgaactctacacaacatattttgtcaccaagaccctacttctaacctccctgttcttatgaattcgaacagcatacccccgattccgctacgaccaactcatacacctcctatgaaaaaacttcctaccactcaccctagcattacttatatgatatgtctccatacccattacaatctccagcattccccctcaaacctaagaaatatgtctgataaaagagttactttgatagagtaaataataggagcttaaacccccttatttctaggactatgagaatcgaacccatccctgagaatccaaaattctccgtgccacctatcacaccccatcctaaagtaaggtcagctaaataagctatcgggcccataccccgaaaatgttggttatacccttcccgtactaattaatcccctggcccaacccgtcatctactctaccatctttgcaggcacactcatcacagtgctaagctcgcactgattttttacctgagtaggcctagaaataaacatgctagcttttattccagttctaaccaaaaaaataaacccccgttccacagaagctgccatcaagtatttcctcacgcaagcaaccgcatccataatccttctaatagctatcctcttcaacaatatactctccggacaatgaaccataaccaatactaccaatcaatactcatcattaataatcataatggctatagcaataaaactaggaatagccccctttcacttctgagtcccagaggttacccaaggcacccctctgacatccggcctgcttcttctcacatgacaaaaactagcccccatctcaatcatataccaaatctctccctcactaaacgtaagccttctcctcactctctcaatcttatccatcatagcaggcagttgaggtggattaaaccaaacccagctacgcaaaatcttagcatactcctcaattacccacataggatgaataatagcagttctaccgtacaaccctaacataaccattcttaatttaactatttatattatcctaactactaccgcattcctactactcaacttaaactccagcaccacgaccctactactatctcgcacctgaaacaagctaacatgactaacacccttaattccatccaccctcctctccctaggaggcctgcccccgctaaccggctttttgcccaaatgggccattatcgaagaattcacaaaaaacaatagcctcatcatccccaccatcatagccaccatcaccctccttaacctctacttctacctacgcctaatctactccacctcaatcacactactccccatatctaacaacgtaaaaataaaatgacagtttgaacatacaaaacccaccccattcctccccacactcatcgcccttaccacgctactcctacctatctccccttttatactaataatcttatagaaatttaggttaaatacagaccaagagccttcaaagccctcagtaagttgcaatacttaatttctgtaacagctaaggactgcaaaaccccactctgcatcaactgaacgcaaatcagccactttaattaagctaagcccttactagaccaatgggacttaaacccacaaacacttagttaacagctaagcaccctaatcaactggcttcaatctacttctcccgccgccgggaaaaaaggcgggagaagccccggcaggtttgaagctgcttcttcgaatttgcaattcaatatgaaaatcacctcggagctggtaaaaagaggcctaacccctgtctttagatttacagtccaatgcttcactcagccattttacctcacccccactgatgttcgccgaccgttgactattctctacaaaccacaaagacattggaacactatacctattattcggcgcatgagctggagtcctaggcacagctctaagcctccttattcgagccgagctgggccagccaggcaaccttctaggtaacgaccacatctacaacgttatcgtcacagcccatgcatttgtaataatcttcttcatagtaatacccatcataatcggaggctttggcaactgactagttcccctaataatcggtgcccccgatatggcgtttccccgcataaacaacataagcttctgactcttacctccctctctcctactcctgctcgcatctgctatagtggaggccggagcaggaacaggttgaacagtctaccctcccttagcagggaactactcccaccctggagcctccgtagacctaaccatcttctccttacacctagcaggtgtctcctctatcttaggggccatcaatttcatcacaacaattatcaatataaaaccccctgccataacccaataccaaacgcccctcttcgtctgatccgtcctaatcacagcagtcctacttctcctatctctcccagtcctagctgctggcatcactatactactaacagaccgcaacctcaacaccaccttcttcgaccccgccggaggaggagaccccattctataccaacacctattctgatttttcggtcaccctgaagtttatattcttatcctaccaggcttcggaataatctcccatattgtaacttactactccggaaaaaaagaaccatttggatacataggtatggtctgagctatgatatcaattggcttcctagggtttatcgtgtgagcacaccatatatttacagtaggaatagacgtagacacacgagcatatttcacctccgctaccataatcatcgctatccccaccggcgtcaaagtatttagctgactcgccacactccacggaagcaatatgaaatgatctgctgcagtgctctgagccctaggattcatctttcttttcaccgtaggtggcctgactggcattgtattagcaaactcatcactagacatcgtactacacgacacgtactacgttgtagcccacttccactatgtcctatcaataggagctgtatttgccatcataggaggcttcattcactgatttcccctattctcaggctacaccctagaccaaacctacgccaaaatccatttcactatcatattcatcggcgtaaatctaactttcttcccacaacactttctcggcctatccggaatgccccgacgttactcggactaccccgatgcatacaccacatgaaacatcctatcatctgtaggctcattcatttctctaacagcagtaatattaataattttcatgatttgagaagccttcgcttcgaagcgaaaagtcctaatagtagaagaaccctccataaacctggagtgactatatggatgccccccaccctaccacacattcgaagaacccgtatacataaaatctagacaaaaaaggaaggaatcgaaccccccaaagctggtttcaagccaaccccatggcctccatgactttttcaaaaaggtattagaaaaaccatttcataactttgtcaaagttaaattataggctaaatcctatatatcttaatggcacatgcagcgcaagtaggtctacaagacgctacttcccctatcatagaagagcttatcacctttcatgatcacgccctcataatcattttccttatctgcttcctagtcctgtatgcccttttcctaacactcacaacaaaactaactaatactaacatctcagacgctcaggaaatagaaaccgtctgaactatcctgcccgccatcatcctagtcctcatcgccctcccatccctacgcatcctttacataacagacgaggtcaacgatccctcccttaccatcaaatcaattggccaccaatggtactgaacctacgagtacaccgactacggcggactaatcttcaactcctacatacttcccccattattcctagaaccaggcgacctgcgactccttgacgttgacaatcgagtagtactcccgattgaagcccccattcgtataataattacatcacaagacgtcttgcactcatgagctgtccccacattaggcttaaaaacagatgcaattcccggacgtctaaaccaaaccactttcaccgctacacgaccgggggtatactacggtcaatgctctgaaatctgtggagcaaaccacagtttcatgcccatcgtcctagaattaattcccctaaaaatctttgaaatagggcccgtatttaccctatagcaccccctctaccccctctagagcccactgtaaagctaacttagcattaaccttttaagttaaagattaagagaaccaacacctctttacagtgaaatgccccaactaaatactaccgtatggcccaccataattacccccatactccttacactattcctcatcacccaactaaaaatattaaacacaaactaccacctacctccctcaccaaagcccataaaaataaaaaattataacaaaccctgagaaccaaaatgaacgaaaatctgttcgcttcattcattgcccccacaatcctaggcctacccgccgcagtactgatcattctatttccccctctattgatccccacctccaaatatctcatcaacaaccgactaatcaccacccaacaatgactaatcaaactaacctcaaaacaaatgataaccatacacaacactaaaggacgaacctgatctcttatactagtatccttaatcatttttattgccacaactaacctcctcggactcctgcctcactcatttacaccaaccacccaactatctataaacctagccatggccatccccttatgagcgggcgcagtgattataggctttcgctctaagattaaaaatgccctagcccacttcttaccacaaggcacacctacaccccttatccccatactagttattatcgaaaccatcagcctactcattcaaccaatagccctggccgtacgcctaaccgctaacattactgcaggccacctactcatgcacctaattggaagcgccaccctagcaatatcaaccattaaccttccctctacacttatcatcttcacaattctaattctactgactatcctagaaatcgctgtcgccttaatccaagcctacgttttcacacttctagtaagcctctacctgcacgacaacacataatgacccaccaatcacatgcctatcatatagtaaaacccagcccatgacccctaacaggggccctctcagccctcctaatgacctccggcctagccatgtgatttcacttccactccataacgctcctcatactaggcctactaaccaacacactaaccatataccaatgatggcgcgatgtaacacgagaaagcacataccaaggccaccacacaccacctgtccaaaaaggccttcgatacgggataatcctatttattacctcagaagtttttttcttcgcaggatttttctgagccttttaccactccagcctagcccctaccccccaattaggagggcactggcccccaacaggcatcaccccgctaaatcccctagaagtcccactcctaaacacatccgtattactcgcatcaggagtatcaatcacctgagctcaccatagtctaatagaaaacaaccgaaaccaaataattcaagcactgcttattacaattttactgggtctctattttaccctcctacaagcctcagagtacttcgagtctcccttcaccatttccgacggcatctacggctcaacattttttgtagccacaggcttccacggacttcacgtcattattggctcaactttcctcactatctgcttcatccgccaactaatatttcactttacatccaaacatcactttggcttcgaagccgccgcctgatactggcattttgtagatgtggtttgactatttctgtatgtctccatctattgatgagggtcttactcttttagtataaatagtaccgttaacttccaattaactagttttgacaacattcaaaaaagagtaataaacttcgccttaattttaataatcaacaccctcctagccttactactaataattattacattttgactaccacaactcaacggctacatagaaaaatccaccccttacgagtgcggcttcgaccctatatcccccgcccgcgtccctttctccataaaattcttcttagtagctattaccttcttattatttgatctagaaattgccctccttttacccctaccatgagccctacaaacaactaacctgccactaatagttatgtcatccctcttattaatcatcatcctagccctaagtctggcctatgagtgactacaaaaaggattagactgaaccgaattggtatatagtttaaacaaaacgaatgatttcgactcattaaattatgataatcatatttaccaaatgcccctcatttacataaatattatactagcatttaccatctcacttctaggaatactagtatatcgctcacacctcatatcctccctactatgcctagaaggaataatactatcgctgttcattatagctactctcataaccctcaacacccactccctcttagccaatattgtgcctattgccatactagtctttgccgcctgcgaagcagcggtgggcctagccctactagtctcaatctccaacacatatggcctagactacgtacataacctaaacctactccaatgctaaaactaatcgtcccaacaattatattactaccactgacatgactttccaaaaaacacataatttgaatcaacacaaccacccacagcctaattattagcatcatccctctactattttttaaccaaatcaacaacaacctatttagctgttccccaaccttttcctccgaccccctaacaacccccctcctaatactaactacctgactcctacccctcacaatcatggcaagccaacgccacttatccagtgaaccactatcacgaaaaaaactctacctctctatactaatctccctacaaatctccttaattataacattcacagccacagaactaatcatattttatatcttcttcgaaaccacacttatccccaccttggctatcatcacccgatgaggcaaccagccagaacgcctgaacgcaggcacatacttcctattctacaccctagtaggctcccttcccctactcatcgcactaatttacactcacaacaccctaggctcactaaacattctactactcactctcactgcccaagaactatcaaactcctgagccaacaacttaatatgactagcctacacaatagcttttatagtaaagatacctctttacggactccacttatgactccctaaagcccatgtcgaagcccccatcgctgggtcaatagtacttgccgcagtactcttaaaactaggcggctatggtataatacgcctcacactcattctcaaccccctgacaaaacacatagcctaccccttccttgtactatccctatgaggcataattataacaagctccatctgcctacgacaaacagacctaaaatcgctcattgcatactcttcaatcagccacatagccctcgtagtaacagccattctcatccaaaccccctgaagcttcaccggcgcagtcattctcataatcgcccacggacttacatcctcattactattctgcctagcaaactcaaactacgaacgcactcacagtcgcatcataatcctctctcaaggacttcaaactctactcccactaatagctttttgatgacttctagcaagcctcgctaacctcgccttaccccccactattaacctactgggagaactctctgtgctagtaaccacgttctcctgatcaaatatcactctcctacttacaggactcaacatactagtcacagccctatactccctctacatatttaccacaacacaatggggctcactcacccaccacattaacaacataaaaccctcattcacacgagaaaacaccctcatgttcatacacctatcccccattctcctcctatccctcaaccccgacatcattaccgggttttcctcttgtaaatatagtttaaccaaaacatcagattgtgaatctgacaacagaggcttacgaccccttatttaccgagaaagctcacaagaactgctaactcatgcccccatgtctaacaacatggctttctcaacttttaaaggataacagctatccattggtcttaggccccaaaaattttggtgcaactccaaataaaagtaataaccatgcacactactataaccaccctaaccctgacttccctaattccccccatccttaccaccctcgttaaccctaacaaaaaaaactcatacccccattatgtaaaatccattgtcgcatccacctttattatcagtctcttccccacaacaatattcatgtgcctagaccaagaagttattatctcgaactgacactgagccacaacccaaacaacccagctctccctaagcttcaaactagactacttctccataatattcatccctgtagcattgttcgttacatggtccatcatagaattctcactgtgatatataaactcagacccaaacattaatcagttcttcaaatatctactcatcttcctaattaccatactaatcttagttaccgctaacaacctattccaactgttcatcggctgagagggcgtaggaattatatccttcttgctcatcagttgatgatacgcccgagcagatgccaacacagcagccattcaagcaatcctatacaaccgtatcggcgatatcggtttcatcctcgccttagcatgatttatcctacactccaactcatgagacccacaacaaatagcccttctaaacgctaatccaagcctcaccccactactaggcctcctcctagcagcagcaggcaaatcagcccaattaggtctccacccctgactcccctcagccatagaaggccccaccccagtctcagccctactccactcaagcactatagttgtagcaggaatcttcttactcatccgcttccaccccctagcagaaaatagcccactaatccaaactctaacactatgcttaggcgctatcaccactctgttcgcagcagtctgcgcccttacacaaaatgacatcaaaaaaatcgtagccttctccacttcaagtcaactaggactcataatagttacaatcggcatcaaccaaccacacctagcattcctgcacatctgtacccacgccttcttcaaagccatactatttatgtgctccgggtccatcatccacaaccttaacaatgaacaagatattcgaaaaataggaggactactcaaaaccatacctctcacttcaacctccctcaccattggcagcctagcattagcaggaatacctttcctcacaggtttctactccaaagaccacatcatcgaaaccgcaaacatatcatacacaaacgcctgagccctatctattactctcatcgctacctccctgacaagcgcctatagcactcgaataattcttctcaccctaacaggtcaacctcgcttccccacccttactaacattaacgaaaataaccccaccctactaaaccccattaaacgcctggcagccggaagcctattcgcaggatttctcattactaacaacatttcccccgcatcccccttccaaacaacaatccccctctacctaaaactcacagccctcgctgtcactttcctaggacttctaacagccctagacctcaactacctaaccaacaaacttaaaataaaatccccactatgcacattttatttctccaacatactcggattctaccctagcatcacacaccgcacaatcccctatctaggccttcttacgagccaaaacctgcccctactcctcctagacctaacctgactagaaaagctattacctaaaacaatttcacagcaccaaatctccacctccatcatcacctcaacccaaaaaggcataattaaactttacttcctctctttcttcttcccactcatcctaaccctactcctaatcacataacctattcccccgagcaatctcaattacaatatatacaccaacaaacaatgttcaaccagtaactactactaatcaacgcccataatcatacaaagcccccgcaccaataggatcctcccgaatcaaccctgacccctctccttcataaattattcagcttcctacactattaaagtttaccacaaccaccaccccatcatactctttcacccacagcaccaatcctacctccatcgctaaccccactaaaacactcaccaagacctcaacccctgacccccatgcctcaggatactcctcaatagccatcgctgtagtatatccaaagacaaccatcattccccctaaataaattaaaaaaactattaaacccatataacctcccccaaaattcagaataataacacacccgaccacaccgctaacaatcaatactaaacccccataaataggagaaggcttagaagaaaaccccacaaaccccattactaaacccacactcaacagaaacaaagcatacatcattattctcgcacggactacaaccacgaccaatgatatgaaaaaccatcgttgtatttcaactacaagaacaccaatgaccccaatacgcaaaactaaccccctaataaaattaattaaccactcattcatcgacctccccaccccatccaacatctccgcatgatgaaacttcggctcactccttggcgcctgcctgatcctccaaatcaccacaggactattcctagccatgcactactcaccagacgcctcaaccgccttttcatcaatcgcccacatcactcgagacgtaaattatggctgaatcatccgctaccttcacgccaatggcgcctcaatattctttatctgcctcttcctacacatcgggcgaggcctatattacggatcatttctctactcagaaacctgaaacatcggcattatcctcctgcttgcaactatagcaacagccttcataggctatgtcctcccgtgaggccaaatatcattctgaggggccacagtaattacaaacttactatccgccatcccatacattgggacagacctagttcaatgaatctgaggaggctactcagtagacagtcccaccctcacacgattctttacctttcacttcatcttgcccttcattattgcagccctagcagcactccacctcctattcttgcacgaaacgggatcaaacaaccccctaggaatcacctcccattccgataaaatcaccttccacccttactacacaatcaaagacgccctcggcttacttctcttccttctctccttaatgacattaacactattctcaccagacctcctaggcgacccagacaattataccctagccaaccccttaaacacccctccccacatcaagcccgaatgatatttcctattcgcctacacaattctccgatccgtccctaacaaactaggaggcgtccttgccctattactatccatcctcatcctagcaataatccccatcctccatatatccaaacaacaaagcataatatttcgcccactaagccaatcactttattgactcctagccgcagacctcctcattctaacctgaatcggaggacaaccagtaagctacccttttaccatcattggacaagtagcatccgtactatacttcacaacaatcctaatcctaataccaactatctccctaattgaaaacaaaatactcaaatgggcctgtccttgtagtataaactaatacaccagtcttgtaaaccggagatgaaaacctttttccaaggacaaatcagagaaaaagtctttaactccaccattagcacccaaagctaagattctaatttaaactattctctgttctttcatggggaagcagatttgggtaccacccaagtattgactcacccatcaacaaccgctatgtatttcgtacattactgccagccaccatgaatattgtacagtaccataaatacttgaccacctgtagtacataaaaacccaatccacatcaaaaccccctccccatgcttacaagcaagtacagcaatcaaccctcaactatcacacatcaactgcaactccaaagccacccctcacccactaggataccaacaaacctacccacccttaacagtacatagtacatgaagccatttaccgtacatagcacattacagtcaaatcccttctcgtccccatggatgacccccctcagataggggtcccttgaccaccatcctccgtgaaatcaatatcccgcacaagagtgctactctcctcgctccgggcccataacacttgggggtagctaaagtgaactgtatccgacatctggttcctacttcagggccataaagcctaaatagcccacacgttccccttaaataagacatcacgatg

SEQ ID NO: 452 - DNA, 16573 bp, Homo sapiens mitochondrial
  3111: "n" refers to a nucleotide at position 3107 of the Cambridge Reference Sequence (CRS, Anderson et al. 1981 Nature 290:457-465), later determined to be absent from the human mtDNA sequence according to the revised CRS (rCRS, Andrews et al. 1999 Nature Genetics 23:147); "n" therefore represents a single nucleotide deletion at a position corresponding to nucleotide 3107 of SEQ ID NO:1 as provided herein.
gatcacaggtctatcaccctattaaccactcacgggagctctccatgcatttggtattttcgtctggggggtatgcacgcgatagcattgcgagacgctggagccggagcaccctatgtcgcagtatctgtctttgattcctgcctcatcccattatttatcgcacctacgttcaatattacaggcgaacatacttactaaagtgtgttaattaattaatgcttgtaggacataataataacaattgaatgtctgcacagccgctttccacacagacatcataacaaaaaatttccaccaaaccccccctcccccccgcttctggccacagcacttaaacacatctctgccaaaccccaaaaacaaagaaccctaacaccagcctaaccagatttcaaattttatcttttggcggtatgcacttttaacagtcaccccccaactaacacattattttcccctcccactcccatactactaatctcatcaatacaacccccgcccatcctacccagcacacacacaccacgctgctaaccccataccccgaaccaaccaaaccccaaagacaccccccacagtttatgtagcttacctcctcaaagcaatacactgaaaatgtttagacgggctcacatcaccccataaacaaataggtttggtcctagcctttctattagctcttagtaagattacacatgcaagcatccccgttccagtgagttcaccctctaaatcaccacgatcaaaagggacaagcatcaagcacgcagcaatgcagctcaaaacgcttagcctagccacacccccacgggaaacagcagtgattaacctttagcaataaacgaaagtttaactaagctatactaaccccagggttggtcaatttcgtgccagccaccgcggtcacacgattaacccaagtcaatagaagccggcgtaaagagtgttttagatcaccccctccccaataaagctaaaactcacctgagttgtaaaaaactccagttgacacaaaatagactacgaaagtggctttaacatatctgaacacacaatagctaagacccaaactgggattagataccccactatgcttagccctaaacctcaacagttaaatcaacaaaactgctcgccagaacactacgagccacagcttaaaactcaaaggacctggcggtgcttcatatccctctagaggagcctgttctgtaatcgataaaccccgatcaacctcaccacctcttgctcagcctatataccgccatcttcagcaaaccctgatgaaggctacaaagtaagcgcaagtacccacgtaaagacgttaggtcaaggtgtagcccatgaggtggcaagaaatgggctacattttctaccccagaaaactacgatagcccttatgaaacttaagggtcgaaggtggatttagcagtaaactgagagtagagtgcttagttgaacagggccctgaagcgcgtacacaccgcccgtcaccctcctcaagtatacttcaaaggacatttaactaaaacccctacgcatttatatagaggagacaagtcgtaacatggtaagtgtactggaaagtgcacttggacgaaccagagtgtagcttaacacaaagcacccaacttacacttaggagatttcaacttaacttgaccgctctgagctaaacctagccccaaacccactccaccttactaccagacaaccttagccaaaccatttacccaaataaagtataggcgatagaaattgaaacctggcgcaatagatatagtaccgcaagggaaagatgaaaaattataaccaagcataatatagcaaggactaacccctataccttctgcataatgaattaactagaaataactttgcaaggagagccaaagctaagacccccgaaaccagacgagctacctaagaacagctaaaagagcacacccgtctatgtagcaaaatagtgggaagatttataggtagaggcgacaaacctaccgagcctggtgatagctggttgtccaagatagaatcttagttcaactttaaatttgcccacagaaccctctaaatccccttgtaaatttaactgttagtccaaagaggaacagctctttggacactaggaaaaaaccttgtagagagagtaaaaaatttaacacccatagtaggcctaaaagcagccaccaattaagaaagcgttcaagctcaacacccactacctaaaaaatcccaaacatataactgaactcctcacacccaattggaccaatctatcaccctatagaagaactaatgttagtataagtaacatgaaaacattctcctccgcataagcctgcgtcagattaaaacactgaactgacaattaacagcccaatatctacaatcaaccaacaagtcattattaccctcactgtcaacccaacacaggcatgctcataaggaaaggttaaaaaaagtaaaaggaactcggcaaatcttaccccgcctgtttaccaaaaacatcacctctagcatcaccagtattagaggcaccgcctgcccagtgacacatgtttaacggccgcggtaccctaaccgtgcaaaggtagcataatcacttgttccttaaatagggacctgtatgaatggctccacgagggttcagctgtctcttacttttaaccagtgaaattgacctgcccgtgaagaggcgggcataacacagcaagacgagaagaccctatggagctttaatttattaatgcaaacagtacctaacaaacccacaggtcctaaactaccaaacctgcattaaaaatttcggttggggcgacctcggagcagaacccaacctccgagcagtacatgctaagacttcaccagtcaaagcgaactactatactcaattgatccaataacttgaccaacggaacaagttaccctagggataacagcgcaatcctattctagagtccatatcaacaatagggtttacgacctcgatgttggatcaggacatcccgatggtgcagccgctattaaaggttcgtttgttcaacgattaaagtcctacgtgatctgagttcagaccggagtaatccaggtcggtttctatctacnttcaaattcctccctgtacgaaaggacaagagaaataaggcctacttcacaaagcgccttcccccgtaaatgatatcatctcaacttagtattatacccacacccacccaagaacagggtttgttaagatggcagagcccggtaatcgcataaaacttaaaactttacagtcagaggttcaattcctcttcttaacaacatacccatggccaacctcctactcctcattgtacccattctaatcgcaatggcattcctaatgcttaccgaacgaaaaattctaggctatatacaactacgcaaaggccccaacgttgtaggcccctacgggctactacaacccttcgctgacgccataaaactcttcaccaaagagcccctaaaacccgccacatctaccatcaccctctacatcaccgccccgaccttagctctcaccatcgctcttctactatgaacccccctccccatacccaaccccctggtcaacctcaacctaggcctcctatttattctagccacctctagcctagccgtttactcaatcctctgatcagggtgagcatcaaactcaaactacgccctgatcggcgcactgcgagcagtagcccaaacaatctcatatgaagtcaccctagccatcattctactatcaacattactaataagtggctcctttaacctctccacccttatcacaacacaagaacacctctgattactcctgccatcatgacccttggccataatatgatttatctccacactagcagagaccaaccgaacccccttcgaccttgccgaaggggagtccgaactagtctcaggcttcaacatcgaatacgccgcaggccccttcgccctattcttcatagccgaatacacaaacattattataataaacaccctcaccactacaatcttcctaggaacaacatatgacgcactctcccctgaactctacacaacatattttgtcaccaagaccctacttctaacctccctgttcttatgaattcgaacagcatacccccgattccgctacgaccaactcatacacctcctatgaaaaaacttcctaccactcaccctagcattacttatatgatatgtctccatacccattacaatctccagcattccccctcaaacctaagaaatatgtctgataaaagagttactttgatagagtaaataataggagcttaaacccccttatttctaggactatgagaatcgaacccatccctgagaatccaaaattctccgtgccacctatcacaccccatcctaaagtaaggtcagctaaataagctatcgggcccataccccgaaaatgttggttatacccttcccgtactaattaatcccctggcccaacccgtcatctactctaccatctttgcaggcacactcatcacagcgctaagctcgcactgattttttacctgagtaggcctagaaataaacatgctagcttttattccagttctaaccaaaaaaataaaccctcgttccacagaagctgccatcaagtatttcctcacgcaagcaaccgcatccataatccttctaatagctatcctcttcaacaatatactctccggacaatgaaccataaccaatactaccaatcaatactcatcattaataatcataatggctatagcaataaaactaggaatagccccctttcacttctgagtcccagaggttacccaaggcacccctctgacatccggcctgcttcttctcacatgacaaaaactagcccccatctcaatcatataccaaatctctccctcactaaacgtaagccttctcctcactctctcaatcttatccatcatagcaggcagttgaggtggattaaaccaaacccagctacgcaaaatcttagcatactcctcaattacccacataggatgaataatagcagttctaccgtacaaccctaacataaccattcttaatttaactatttatattatcctaactactaccgcattcctactactcaacttaaactccagcaccacgaccctactactatctcgcacctgaaacaagctaacatgactaacacccttaattccatccaccctcctctccctaggaggcctgcccccgctaaccggctttttgcccaaatgggccattatcgaagaattcacaaaaaacaatagcctcatcatccccaccatcatagccaccatcaccctccttaacctctacttctacctacgcctaatctactccacctcaatcacactactccccatatctaacaacgtaaaaataaaatgacagtttgaacatacaaaacccaccccattcctccccacactcatcgcccttaccacgctactcctacctatctccccttttatactaataatcttatagaaatttaggttaaatacagaccaagagccttcaaagccctcagtaagttgcaatacttaatttctgtaacagctaaggactgcaaaaccccactctgcatcaactgaacgcaaatcagccactttaattaagctaagcccttactagaccaatgggacttaaacccacaaacacttagttaacagctaagcaccctaatcaactggcttcaatctacttctcccgccgccgggaaaaaaggcgggagaagccccggcaggtttgaagctgcttcttcgaatttgcaattcaatatgaaaatcacctcggagctggtaaaaagaggcctaacccctgtctttagatttacagtccaatgcttcactcagccattttacctcacccccactgatgttcgccgaccgttgactattctctacaaaccacaaagacattggaacactatacctattattcggcgcatgagctggagtcctaggcacagctctaagcctccttattcgagccgagctgggccagccaggcaaccttctaggtaacgaccacatctacaacgttatcgtcacagcccatgcatttgtaataatcttcttcatagtaatacccatcataatcggaggctttggcaactgactagttcccctaataatcggtgcccccgatatggcgtttccccgcataaacaacataagcttctgactcttacctccctctctcctactcctgctcgcatctgctatagtggaggccggagcaggaacaggttgaacagtctaccctcccttagcagggaactactcccaccctggagcctccgtagacctaaccatcttctccttacacctagcaggtgtctcctctatcttaggggccatcaatttcatcacaacaattatcaatataaaaccccctgccataacccaataccaaacgcccctcttcgtctgatccgtcctaatcacagcagtcctacttctcctatctctcccagtcctagctgctggcatcactatactactaacagaccgcaacctcaacaccaccttcttcgaccccgccggaggaggagaccccattctataccaacacctattctgatttttcggtcaccctgaagtttatattcttatcctaccaggcttcggaataatctcccatattgtaacttactactccggaaaaaaagaaccatttggatacataggtatggtctgagctatgatatcaattggcttcctagggtttatcgtgtgagcacaccacatatttacagtaggaatagacgtagacacacgagcatatttcacctccgctaccataatcatcgctatccccaccggcgtcaaagtatttagctgactcgccacactccacggaagcaatatgaaatgatctgctgcagtgctctgagccctaggattcatctttcttttcaccgtaggtggcctgactggcattgtattagcaaactcatcactagacatcgtactacacgacacgtactacgttgtagcccacttccactatgtcctatcaataggagctgtatttgccatcataggaggcttcattcactgatttcccctattctcaggctacaccctagaccaaacctacgccaaaatccatttcactatcatattcatcggcgtaaatctaactttcttcccacaacactttctcggcctatccggaatgccccgacgttactcggactaccccgatgcatacaccacatgaaacatcctatcatctgtaggctcattcatttctctaacagcagtaatattaataattttcatgatttgagaagccttcgcttcgaagcgaaaagtcctaatagtagaagaaccctccataaacctggagtgactatatggatgccccccaccctaccacacattcgaagaacccgtatacataaaatctagacaaaaaaggaaggaatcgaaccccccaaagctggtttcaagccaaccccatggcctccatgactttttcaaaaaggtattagaaaaaccatttcataactttgtcaaagttaaattataggctaaatcctatatatcttaatggcacatgcagcgcaagtaggtctacaagacgctacttcccctatcatagaagagcttatcacctttcatgatcacgccctcataatcattttccttatctgcttcctagtcctgtatgcccttttcctaacactcacaacaaaactaactaatactaacatctcagacgctcaggaaatagaaaccgtctgaactatcctgcccgccatcatcctagtcctcatcgccctcccatccctacgcatcctttacataacagacgaggtcaacgatccctcccttaccatcaaatcaattggccaccaatggtactgaacctacgagtacaccgactacggcggactaatcttcaactcctacatacttcccccattattcctagaaccaggcgacctgcgactccttgacgttgacaatcgagtagtactcccgattgaagcccccattcgtataataattacatcacaagacgtcttgcactcatgagctgtccccacattaggcttaaaaacagatgcaattcccggacgtctaaaccaaaccactttcaccgctacacgaccgggggtatactacggtcaatgctctgaaatctgtggagcaaaccacagtttcatgcccatcgtcctagaattaattcccctaaaaatctttgaaatagggcccgtatttaccctatagcaccccctctaccccctctagagcccactgtaaagctaacttagcattaaccttttaagttaaagattaagagaaccaacacctctttacagtgaaatgccccaactaaatactaccgtatggcccaccataattacccccatactccttacactattcctcatcacccaactaaaaatattaaacacaaactaccacctacctccctcaccaaagcccataaaaataaaaaattataacaaaccctgagaaccaaaatgaacgaaaatctgttcgcttcattcattgcccccacaatcctaggcctacccgccgcagtactgatcattctatttccccctctattgatccccacctccaaatatctcatcaacaaccgactaatcaccacccaacaatgactaatcaaactaacctcaaaacaaatgataaccatacacaacactaaaggacgaacctgatctcttatactagtatccttaatcatttttattgccacaactaacctcctcggactcctgcctcactcatttacaccaaccacccaactatctataaacctagccatggccatccccttatgagcgggcgcagtgattataggctttcgctctaagattaaaaatgccctagcccacttcttaccacaaggcacacctacaccccttatccccatactagttattatcgaaaccatcagcctactcattcaaccaatagccctggccgtacgcctaaccgctaacattactgcaggccacctactcatgcacctaattggaagcgccaccctagcaatatcaaccattaaccttccctctacacttatcatcttcacaattctaattctactgactatcctagaaatcgctgtcgccttaatccaagcctacgttttcacacttctagtaagcctctacctgcacgacaacacataatgacccaccaatcacatgcctatcatatagtaaaacccagcccatgacccctaacaggggccctctcagccctcctaatgacctccggcctagccatgtgatttcacttccactccataacgctcctcatactaggcctactaaccaacacactaaccatataccaatgatggcgcgatgtaacacgagaaagcacataccaaggccaccacacaccacctgtccaaaaaggccttcgatacgggataatcctatttattacctcagaagtttttttcttcgcaggatttttctgagccttttaccactccagcctagcccctaccccccaattaggagggcactggcccccaacaggcatcaccccgctaaatcccctagaagtcccactcctaaacacatccgtattactcgcatcaggagtatcaatcacctgagctcaccatagtctaatagaaaacaaccgaaaccaaataattcaagcactgcttattacaattttactgggtctctattttaccctcctacaagcctcagagtacttcgagtctcccttcaccatttccgacggcatctacggctcaacattttttgtagccacaggcttccacggacttcacgtcattattggctcaactttcctcactatctgcttcatccgccaactaatatttcactttacatccaaacatcactttggcttcgaagccgccgcctgatactggcattttgtagatgtgatttgactatttctgtatgtctccatctattgatgagggtcttactcttttagtataaatagtaccgttaacttccaattaactagttttgacaacattcaaaaaagagtaataaacttcgccttaattttaataatcaacaccctcctagccttactactaataattattacattttgactaccacaactcaacggctacatagaaaaatccaccccttacgagtgcggcttcgaccctatatcccccgcccgcgtccctttctccataaaattcttcttagtagctattaccttcttattatttgatctagaaattgccctccttttacccctaccatgagccctacaaacaactaacctgccactaatagttatgtcatccctcttattaatcatcatcctagccctaagtctggcctatgagtgactacaaaaaggattagactgaaccgaattggtatatagtttaaacaaaacgaatgatttcgactcattaaattatgataatcatatttaccaaatgcccctcatttacataaatattatactagcatttaccatctcacttctaggaatactagtatatcgctcacacctcatatcctccctactatgcctagaaggaataatactatcgctgttcattatagctactctcataaccctcaacacccactccctcttagccaatattgtgcctattgccatactagtctttgccgcctgcgaagcagcggtgggcctagccctactagtctcaatctccaacacatatggcctagactacgtacataacctaaacctactccaatgctaaaactaatcgtcccaacaattatattactaccactgacatgactttccaaaaaacacataatttgaatcaacacaaccacccacagcctaattattagcatcatccctctactattttttaaccaaatcaacaacaacctatttagctgttccccaaccttttcctccgaccccctaacaacccccctcctaatactaactacctgactcctacccctcacaatcatggcaagccaacgccacttatccagtgaaccactatcacgaaaaaaactctacctctctatactaatctccctacaaatctccttaattataacattcacagccacagaactaatcatattttatatcttcttcgaaaccacacttatccccaccttggctatcatcacccgatgaggcaaccagccagaacgcctgaacgcaggcacatacttcctattctacaccctagtaggctcccttcccctactcatcgcactaatttacactcacaacaccctaggctcactaaacattctactactcactctcactgcccaagaactatcaaactcctgagccaacaacttaatatgactagcttacacaatagcttttatagtaaagatacctctttacggactccacttatgactccctaaagcccatgtcgaagcccccatcgctgggtcaatagtacttgccgcagtactcttaaaactaggcggctatggtataatacgcctcacactcattctcaaccccctgacaaaacacatagcctaccccttccttgtactatccctatgaggcataattataacaagctccatctgcctacgacaaacagacctaaaatcgctcattgcatactcttcaatcagccacatagccctcgtagtaacagccattctcatccaaaccccctgaagcttcaccggcgcagtcattctcataatcgcccacgggcttacatcctcattactattctgcctagcaaactcaaactacgaacgcactcacagtcgcatcataatcctctctcaaggacttcaaactctactcccactaatagctttttgatgacttctagcaagcctcgctaacctcgccttaccccccactattaacctactgggagaactctctgtgctagtaaccacgttctcctgatcaaatatcactctcctacttacaggactcaacatactagtcacagccctatactccctctacatatttaccacaacacaatggggctcactcacccaccacattaacaacataaaaccctcattcacacgagaaaacaccctcatgttcatacacctatcccccattctcctcctatccctcaaccccgacatcattaccgggttttcctcttgtaaatatagtttaaccaaaacatcagattgtgaatctgacaacagaggcttacgaccccttatttaccgagaaagctcacaagaactgctaactcatgcccccatgtctaacaacatggctttctcaacttttaaaggataacagctatccattggtcttaggccccaaaaattttggtgcaactccaaataaaagtaataaccatgcacactactataaccaccctaaccctgacttccctaattccccccatccttaccaccctcgttaaccctaacaaaaaaaactcatacccccattatgtaaaatccattgtcgcatccacctttattatcagtctcttccccacaacaatattcatgtgcctagaccaagaagttattatctcgaactgacactgagccacaacccaaacaacccagctctccctaagcttcaaactagactacttctccataatattcatccctgtagcattgttcgttacatgatccatcatagaattctcactgtgatatataaactcagacccaaacattaatcagttcttcaaatatctactcatcttcctaattaccatactaatcttagttaccgctaacaacctattccaactgttcatcggctgagagggcgtaggaattatatccttcttgctcatcagttgatgatacgcccgagcagatgccaacacagcagccattcaagcaatcctatacaaccgtatcggcgatatcggtttcatcctcgccttagcatgatttatcctacactccaactcatgagacccacaacaaatagcccttctaaacgctaatccaagcctcaccccactactaggcctcctcctagcagcagcaggcaaatcagcccaattaggtctccacccctgactcccctcagccatagaaggccccaccccagtctcagccctactccactcaagcactatagttgtagcaggaatcttcttactcatccgcttccaccccctagcagaaaatagcccactaatccaaactctaacactatgcttaggcgctatcaccactctgttcgcagcagtctgcgcccttacacaaaatgacatcaaaaaaatcgtagccttctccacttcaagtcaactaggactcataatagttacaatcggcatcaaccaaccacacctagcattcctgcacatctgtacccacgccttcttcaaagccatactatttatgtgctccgggtccatcatccacaaccttaacaatgaacaagatattcgaaaaataggaggactactcaaaaccatacctctcacttcaacctccctcaccattggcagcctagcattagcaggaatacctttcctcacaggtttctactccaaagaccacatcatcgaaaccgcaaacatatcatacacaaacgcctgagccctatctattactctcatcgctacctccctgacaagcgcctatagcactcgaataattcttctcaccctaacaggtcaacctcgcttccccacccttactaacattaacgaaaataaccccaccctactaaaccccattaaacgcctggcagccggaagcctattcgcaggatttctcattactaacaacatttcccccgcatcccccttccaaacaacaatccccctctacctaaaactcacagccctcgctgtcactttcctaggacttctaacagccctagacctcaactacctaaccaacaaacttaaaataaaatccccactatgcacattttatttctccaacatactcggattctaccctagcatcacacaccgcacaatcccctatctaggccttcttacgagccaaaacctgcccctactcctcctagacctaacctgactagaaaagctattacctaaaacaatttcacagcaccaaatctccacctccatcatcacctcaacccaaaaaggcataattaaactttacttcctctctttcttcttcccactcatcctaaccctactcctaatcacataacctattcccccgagcaatctcaattacaatatatacaccaacaaacaatgttcaaccagtaactactactaatcaacgcccataatcatacaaagcccccgcaccaataggatcctcccgaatcaaccctgacccctctccttcataaattattcagcttcctacactattaaagtttaccacaaccaccaccccatcatactctttcacccacagcaccaatcctacctccatcgctaaccccactaaaacactcaccaagacctcaacccctgacccccatgcctcaggatactcctcaatagccatcgctgtagtatatccaaagacaaccatcattccccctaaataaattaaaaaaactattaaacccatataacctcccccaaaattcagaataataacacacccgaccacaccgctaacaatcaatactaaacccccataaataggagaaggcttagaagaaaaccccacaaaccccattactaaacccacactcaacagaaacaaagcatacatcattattctcgcacggactacaaccacgaccaatgatatgaaaaaccatcgttgtatttcaactacaagaacaccaatgaccccaatacgcaaaactaaccccctaataaaattaattaaccactcattcatcgacctccccaccccatccaacatctccgcatgatgaaacttcggctcactccttggcgcctgcctgatcctccaaatcaccacaggactattcctagccatgcactactcaccagacgcctcaaccgccttttcatcaatcgcccacatcactcgagacgtaaattatggctgaatcatccgctaccttcacgccaatggcgcctcaatattctttatctgcctcttcctacacatcgggcgaggcctatattacggatcatttctctactcagaaacctgaaacatcggcattatcctcctgcttgcaactatagcaacagccttcataggctatgtcctcccgtgaggccaaatatcattctgaggggccacagtaattacaaacttactatccgccatcccatacattgggacagacctagttcaatgaatctgaggaggctactcagtagacagtcccaccctcacacgattctttacctttcacttcatcttgcccttcattattgcagccctagcagcactccacctcctattcttgcacgaaacgggatcaaacaaccccctaggaatcacctcccattccgataaaatcaccttccacccttactacacaatcaaagacgccctcggcttacttctcttccttctctccttaatgacattaacactattctcaccagacctcctaggcgacccagacaattataccctagccaaccccttaaacacccctccccacatcaagcccgaatgatatttcctattcgcctacacaattctccgatccgtccctaacaaactaggaggcgtccttgccctattactatccatcctcatcctagcaataatccccatcctccatatatccaaacaacaaagcataatatttcgcccactaagccaatcactttattgactcctagccgcagacctcctcattctaacctgaatcggaggacaaccagtaagctacccttttaccatcattggacaagtagcatccgtactatacttcacaacaatcctaatcctaataccaactatctccctaattgaaaacaaaatactcaaatgggcctgtccttgtagtataaactaatacaccagtcttgtaaaccggagatgaaaacctttttccaaggacaaatcagagaaaaagtctttaactccaccattagcacccaaagctaagattctaatttaaactattctctgttctttcatggggaagcagatttgggtaccacccaagtattgactcacccatcaacaaccgctatgtatttcgtacattactgccagccaccatgaatattgtacggtaccataaatacttgaccacctgtagtacataaaaacccaatccacatcaaaaccccctccccatgcttacaagcaagtacagcaatcaaccctcaactatcacacatcaactgcaactccaaagccacccctcacccactaggataccaacaaacctacccacccttaacagtacatagtacataaagccatttaccgtacatagcacattacagtcaaatcccttctcgtccccatggatgacccccctcagataggggtcccttgaccaccatcctccgtgaaatcaatatcccgcacaagagtgctactctcctcgctccgggcccataacacttgggggtagctaaagtgaactgtatccgacatctggttcctacttcagggccataaagcctaaatagcccacacgttccccttaaataagacatcacgatg

SEQ ID NO: 453 - DNA, 16570 bp, Homo sapiens mitochondrial
  3108: "n" refers to a nucleotide at position 3107 of the Cambridge Reference Sequence (CRS, Anderson et al. 1981 Nature 290:457-465), later determined to be absent from the human mtDNA sequence according to the revised CRS (rCRS, Andrews et al. 1999 Nature Genetics 23:147); "n" therefore represents a single nucleotide deletion at a position corresponding to nucleotide 3107 of SEQ ID NO:1 as provided herein.
gatcacaggtctatcaccctattaaccactcacgggagctctccatgcatttggtattttcgtctggggggtatgcacgcgatagcattgcgagacgctggagccggagcaccctatgtcgcagtatctgtctttgattcctgcctcatcctattatttatcgcacctacgttcaatattacaggcgaacatacttactaaagtgtgttaattaattaatgcttgtaggacataataataacaattgaatgtctgcacagccgctttccacacagacatcataacaaaaaatttccaccaaaccccccctcccccgccctctggccacagcacttaaacacatctctgccaaaccccaaaaacaaagaaccctaacaccagcctaaccagatttcaaattttatcttttggcggtatgcacttttaacagtcaccccccaactaacacattattttcccctcccactcccatactaccaatctcatcaatacaacccccgcccatcctacccagcacacacacaccgctgctaaccccataccccgaaccaaccaaaccccaaagacaccccccacagtttatgtagcttacctcctcaaagcaatacactgaaaatgtttagacgggctcacatcaccccataaacaaataggtttggtcctagcctttctattagctcttagtaagattacacatgcaagcatccccgttccagtgagttcaccctctaaatcaccacgatcaaaagggacaagcatcaagcacgcagcaatgcagctcaaaacgcttagcctagccacacccccacgggaaacagcagtgattaacctttagcaataaacgaaagtttaactaagctatactaaccccagggttggtcaatttcgtgccagccaccgcggtcacacgattaacccaagtcaatagaagccggcgtaaagagtgttttagatcaccccctccccaataaagctaaaactcacctgagttgtaaaaaactccagttgacacaaaatagactacgaaagtggctttaacatatctgaacacacaatagctaagacccaaactgggattagataccccactatgcttagccctaaacctcaacagttaaatcaacaaaactgctcgccagaacactacgagccacagcttaaaactcaaaggacctggcggtgcttcatatccctctagaggagcctgttctgtaatcgataaaccccgatcaacctcaccacctcttgctcagcctatataccgccatcttcagcaaaccctgatgaaggctacaaagtaagcgcaagtacccacgtaaagacgttaggtcaaggtgtagcccatgaggtggcaagaaatgggctacattttctaccccagaaaactacgatagcccttatgaaacttaagggtcgaaggtggatttagcagtaaactgagagtagagtgcttagttgaacagggccctgaagcgcgtacacaccgcccgtcaccctcctcaagtatacttcaaaggacatttaactaaaacccctacgcatttatatagaggagacaagtcgtaacatggtaagtgtactggaaagtgcacttggacgaaccagagtgtagcttaacacaaagcacccaacttacacttaggagatttcaacttaacttgaccgctctgagctaaacctagccccaaacccactccaccttactaccagacaaccttagccaaaccatttacccaaataaagtataggcgatagaaattgaaacctggcgcaatagatatagtaccgcaagggaaagatgaaaaattataaccaagcataatatagcaaggactaacccctataccttctgcataatgaattaactagaaataactttgcaaggagagccaaagctaagacccccgaaaccagacgagctacctaagaacagctaaaagagcacacccgtctatgtagcaaaatagtgggaagatttataggtagaggcgacaaacctaccgagcctggtgatagctggttgtccaagatagaatcttagttcaactttaaatttgcccacagaaccctctaaatccccttgtaaatttaactgttagtccaaagaggaacagctctttggacactaggaaaaaaccttgtagagagagtaaaaaatttaacacccatagtaggcctaaaagcagccaccaattaagaaagcgttcaagctcaacacccactacctaaaaaatcccaaacatataactgaactcctcacacccaattggaccaatctatcaccctatagaagaactaatgttagtataagtaacatgaaaacattctcctccgcataagcctgcgtcagattaaaacactgaactgacaattaacagcccaatatctacaatcaaccaacaagtcattattaccctcactgtcaacccaacacaggcatgctcataaggaaaggttaaaaaaagtaaaaggaactcggcaaatcttaccccgcctgtttaccaaaaacatcacctctagcatcaccagtattagaggcaccgcctgcccagtgacacatgtttaacggccgcggtaccctaaccgtgcaaaggtagcataatcacttgttccttaaatagggacctgtatgaatggctccacgagggttcagctgtctcttacttttaaccagtgaaattgacctgcccgtgaagaggcgggcataacacagcaagacgagaagaccctatggagctttaatttattaatgcaaacagtacctaacaaacccacaggtcctaaactaccaaacctgcattaaaaatttcggttggggcgacctcggagcagaacccaacctccgagcagtacatgctaagacttcaccagtcaaagcgaactactatactcaattgatccaataacttgaccaacggaacaagttaccctagggataacagcgcaatcctattctagagtccatatcaacaatagggtttacgacctcgatgttggatcaggacatcccaatggtgcagccgctattaaaggttcgtttgttcaacgattaaagtcctacgtgatctgagttcagaccggagtaatccaggtcggtttctatctacnttcaaattcctccctgtacgaaaggacaagagaaataaggcctacttcacaaagcgccttcccccgtaaatgatatcatctcaacttagtattatacccacacccacccaagaacagggtttgttaagatggcagagcccggtaatcgcataaaacttaaaactttacagtcagaggttcaattcctcttcttaacaacatacccatggccaacctcctactcctcattgtacccattctaatcgcaatggcattcctaatgcttaccgaacgaaaaattctaggctatatacaactacgcaaaggccccaacgttgtaggcccctacgggctactacaacccttcgctgacgccataaaactcttcaccaaagagcccctaaaacccgccacatctaccatcaccctctacatcaccgccccgaccttagctctcaccatcgctcttctactatgaacccccctccccatacccaaccccctggtcaacctcaacctaggcctcctatttattctagccacctctagcctagccgtttactcaatcctctgatcagggtgagcatcaaactcaaactacgccctgatcggcgcactgcgagcagtagcccaaacaatctcatatgaagtcaccctagccatcattctactatcaacattactaataagtggctcctttaacctctccacccttatcacaacacaagaacacctctgattactcctgccatcatgacccttggccataatatgatttatctccacactagcagagaccaaccgaacccccttcgaccttgccgaaggggagtccgaactagtctcaggcttcaacatcgaatacgccgcaggccccttcgccctattcttcatagccgaatacacaaacattattataataaacaccctcaccactacaatcttcctaggaacaacatatgacgcactctcccctgaactctacacaacatattttgtcaccaagaccctacttctaacctccctgttcttatgaattcgaacagcatacccccgattccgctacgaccaactcatacacctcctatgaaaaaacttcctaccactcaccctagcattacttatatgatatgtctccatacccattacaatctccagcattccccctcaaacctaagaaatatgtctgataaaagagttactttgatagagtaaataataggagcttaaacccccttatttctaggactatgagaatcgaacccatccctgagaatccaaaattctccgtgccacctatcacaccccatcctaaagtaaggtcagctaaataagctatcgggcccataccccgaaaatgttggttatacccttcccgtactaattaatcccctggcccaacccgtcatctactctaccatctttgcaggcacactcatcacagcgctaagctcgcactgattttttacctgagtaggcctagaaataaacatgctagcttttattccagttctaaccaaaaaaataaaccctcgttccacagaagctgccatcaagtatttcctcacgcaagcaaccgcatccataatccttctaatagctatcctcttcaacaatatactctccggacaatgaaccataaccaatactaccaatcaatactcatcattaataatcataatggctatagcaataaaactaggaatagccccctttcacttctgagtcccagaggttacccaaggcacccctctgacatccggcctgcttcttctcacatgacaaaaactagcccccatctcaatcatataccaaatctctccctcactaaacgtaagccttctcctcactctctcaatcttatccatcatagcaggcagttgaggtggattaaaccaaacccagctacgcaaaatcttagcatactcctcaattacccacataggatgaataatagcagttctaccgtacaaccctaacataaccattcttaatttaactatttatattatcctaactactaccgcattcctactactcaacttaaactccagcaccacgaccctactactatctcgcacctgaaacaagctaacatgactaacacccttaattccatccaccctcctctccctaggaggcctgcccccgctaaccggctttttgcccaaatgggccattatcgaagaattcacaaaaaacaatagcctcatcatccccaccatcatagccaccatcaccctccttaacctctacttctacctacgcctaatctactccacctcaatcacactactccccatatctaacaacgtaaaaataaaatgacagtttgaacatacaaaacccaccccattcctccccacactcatcgcccttaccacgctactcctacctatctccccttttatactaataatcttatagaaatttaggttaaatacagaccaagagccttcaaagccctcagtaagttgcaatacttaatttctgtaacagctaaggactgcaaaaccccactctgcatcaactgaacgcaaatcagccactttaattaagctaagcccttactagaccaatgggacttaaacccacaaacacttagttaacagctaagcaccctaatcaactggcttcaatctacttctcccgccgccgggaaaaaaggcgggagaagccccggcaggtttgaagctgcttcttcgaatttgcaattcaatatgaaaatcacctcagagctggtaaaaagaggcctaacccctgtctttagatttacagtccaatgcttcactcagccattttacctcacccccactgatgttcgccgaccgttgactattctctacaaaccacaaagacattggaacactatacctattattcggcgcatgagctggagtcctaggcacagctctaagcctccttattcgagccgagctgggccagccaggcaaccttctaggtaacgaccacatctacaacgttatcgtcacagcccatgcatttgtaataatcttcttcatagtaatacccatcataatcggaggctttggcaactgactagttcccctaataatcggtgcccccgatatggcgtttccccgcataaacaacataagcttctgactcttacctccctctctcctactcctgctcgcatctgctatagtggaggccggagcaggaacaggttgaacagtctaccctcccttagcagggaactactcccaccctggagcctccgtagacctaaccatcttctccttacacctagcaggtgtctcctctatcttaggggccatcaatttcatcacaacaattatcaatataaaaccccctgccataacccaataccaaacgcccctcttcgtctgatccgtcctaatcacagcagtcctacttctcctatctctcccagtcctagctgctggcatcactatactactaacagaccgcaacctcaacaccaccttcttcgaccccgccggaggaggagaccccattctataccaacacctattctgatttttcggtcaccctgaagtttatattcttatcctaccaggcttcggaataatctcccatattgtaacttactactccggaaaaaaagaaccatttggatacataggtatggtctgagctatgatatcaattggcttcctagggtttatcgtgtgagcacaccatatatttacagtaggaatagacgtagacacacgagcatatttcacctccgctaccataatcatcgctatccccaccggcgtcaaagtatttagctgactcgccacactccacggaagcaatatgaaatgatctgctgcagtgctctgagccctaggattcatctttcttttcaccgtaggtggcctgactggcattgtattagcaaactcatcactagacatcgtactacacgacacgtactacgttgtagcccacttccactatgtcctatcaataggagctgtatttgccatcataggaggcttcattcactgatttcccctattctcaggctacaccctagaccaaacctacgccaaaatccatttcactatcatattcatcggcgtaaatctaactttcttcccacaacactttctcggcctatccggaatgccccgacgttactcggactaccccgatgcatacaccacatgaaacatcctatcatctgtaggctcattcatttctctaacagcagtaatattaataattttcatgatttgagaagccttcgcttcgaagcgaaaagtcctaatagtagaagaaccctccataaacctggagtgactatatggatgccccccaccctaccacacattcgaagaacccgtatacataaaatctagacaaaaaaggaaggaatcgaaccccccaaagctggtttcaagccaaccccatggcctccatgactttttcaaaaaggtattagaaaaaccatttcataactttgtcaaagttaaattataggctaaatcctatatatcttaatggcacatgcagcgcaagtaggtctacaagacgctacttcccctatcatagaagagcttatcacctttcatgatcacgccctcataatcattttccttatctgcttcctagtcctgtatgcccttttcctaacactcacaacaaaactaactaatactaacatctcagacgctcaggaaatagaaaccgtctgaactatcctgcccgccatcatcctagtcctcatcgccctcccatccctacgcatcctttacataacagacgaggtcaacgatccctcccttaccatcaaatcaattggccaccaatggtactgaacctacgagtacaccgactacggcggactaatcttcaactcctacatacttcccccattattcctagaaccaggcgacctgcgactccttgacgttgacaatcgagtagtactcccgattgaagcccccattcgtataataattacatcacaagacgtcttgcactcatgagctgtccccacattaggcttaaaaacagatgcaattcccggacgtctaaaccaaaccactttcaccgctacacgaccgggggtatactacggtcaatgctctgaaatctgtggagcaaaccacagtttcatgcccatcgtcctagaattaattcccctaaaaatctttgaaatagggcccgtatttaccctatagcaccccctctaccccctctagagcccactgtaaagctaacttagcattaaccttttaagttaaagattaagagaaccaacacctctttacagtgaaatgccccaactaaatactaccgtatggcccaccataattacccccatactccttacactattcctcatcacccaactaaaaatattaaacacaaactaccacctacctccctcaccaaagcccataaaaataaaaaattataacaaaccctgagaaccaaaatgaacgaaaatctgttcgcttcattcattgcccccacaatcctaggcctacccgccgcagtactgatcattctatttccccctctattgatccccacctccaaatatctcatcaacaaccgactaatcaccacccaacaatgactaatcaaactaacctcaaaacaaatgataaccatacacaacactaaaggacgaacctgatctcttatactagtatccttaatcatttttattgccacaactaacctcctcggactcctgcctcactcatttacaccaaccacccaactatctataaacctagccatggccatccccttatgagcgggcgcagtgattataggctttcgctctaagattaaaaatgccctagcccacttcttaccacaaggcacacctacaccccttatccccatactagttattatcgaaaccatcagcctactcattcaaccaatagccctggccgtacgcctaaccgctaacattactgcaggccacctactcatgcacctaattggaagcgccaccctagcaatatcaaccattaaccttccctctacacttatcatcttcacaattctaattctactgactatcctagaaatcgctgtcgccttgatccaagcctacgttttcacacttctagtaagcctctacctgcacgacaacacataatgacccaccaatcacatgcctatcatatagtaaaacccagcccatgacccctaacaggggccctctcagccctcctaatgacctccggcctagccatgtgatttcacttccactccataacgctcctcatactaggcctactaaccaacacactaaccatataccaatgatggcgcgatgtaacacgagaaagcacataccaaggccaccacacaccacctgtccaaaaaggccttcgatacgggataatcctatttattacctcagaagtttttttcttcgcaggatttttctgagccttttaccactccagcctagcccctaccccccaattaggagggcactggcccccaacaggcatcaccccgctaaatcccctagaagtcccactcctaaacacatccgtattactcgcatcaggagtatcaatcacctgagctcaccatagtctaatagaaaacaaccgaaaccaaataattcaagcactgcttattacaattttactgggtctctattttaccctcctacaagcctcagagtacttcgagtctcccttcaccatttccgacggcatctacggctcaacattttttgtagccacaggcttccacggacttcacgtcattattggctcaactttcctcactatctgcttcatccgccaactaatatttcactttacatccaaacatcactttggcttcgaagccgccgcctgatactggcattttgtagatgtggtttgactatttctgtatgtctccatctattgatgagggtcttactcttttagtataaatagtaccgttaacttccaattaactagttttgacaacattcaaaaaagagtaataaacttcgccttaattttaataatcaacaccctcctagccttactactaataattattacattttgactaccacaactcaacggctacatagaaaaatccaccccttacgagtgcggcttcgaccctatatcccccgcccgcgtccctttctccataaaattcttcttagtagctattaccttcttattatttgatctagaaattgccctccttttacccctaccatgagccctacaaacaactaacctgccactaatagttatgtcatccctcttattaatcatcatcctagccctaagtctggcctatgagtgactacaaaaaggattagactgaaccgaattggtatatagtttaaacaaaacgaatgatttcgactcattaaattatgataatcatatttaccaaatgcccctcatttacataaatattatactagcatttaccatctcacttctaggaatactagtatatcgctcacacctcatatcctccctactatgcctagaaggaataatactatcgctgttcattatagctactctcataaccctcaacacccactccctcttagccaatattgtgcctattgccatactagtctttgccgcctgcgaagcagcggtgggcctagccctactagtctcaatctccaacacatatggcctagactacgtacataacctaaacctactccaatgctaaaactaatcgtcccaacaattatattactaccactgacatgactttccaaaaaacacataatttgaatcaacacaaccacccacagcctaattattagcatcatccctctactattttttaaccaaatcaacaacaacctatttagctgttccccaaccttttcctccgaccccctaacaacccccctcctaatactaactacctgactcctacccctcacaatcatggcaagccaacgccacttatccagtgaaccactatcacgaaaaaaactctacctctctatactaatctccctacaaatctccttaattataacattcacagccacagaactaatcatattttatatcttcttcgaaaccacacttatccccaccttggctatcatcacccgatgaggcaaccagccagaacgcctgaacgcaggcacatacttcctattctacaccctagtaggctcccttcccctactcatcgcactaatttacactcacaacaccctaggctcactaaacattctactactcactctcactgcccaagaactatcaaactcctgagccaacaacttaatatggctagcttacacaatagcttttatagtaaagatacctctttacggactccacttatgactccctaaagcccatgtcgaagcccccatcgctgggtcaatagtacttgccgcagtactcttaaaactaggcggctatggtataatacgcctcacactcattctcaaccccctgacaaaacacatagcctaccccttccttgtactatccctatgaggcataattataacaagctccatctgcctacgacaaacagacctaaaatcgctcattgcatactcttcaatcagccacatagccctcgtagtaacagccattctcatccaaaccccctgaagcttcaccggcgcagtcattctcataatcgcccacgggcttacatcctcattactattctgcctagcaaactcaaactacgaacgcactcacagtcgcatcataatcctctctcaaggacttcaaactctactcccactaatagctttttgatgacttctagcaagcctcgctaacctcgccttaccccccactattaacctactgggagaactctctgtgctagtaaccacgttctcctgatcaaatatcactctcctacttacaggactcaacatactagtcacagccctatactccctctacatatttaccacaacacaatggggctcactcacccaccacattaacaacataaaaccctcattcacacgagaaaacaccctcatgttcatacacctatcccccattctcctcctatccctcaaccccgacatcattaccgggttttcctcttgtaaatatagtttaaccaaaacatcagattgtgaatctgacaacagaggcttacgaccccttatttaccgagaaagctcacaagaactgctaactcatgcccccatgtctaacaacatggctttctcaacttttaaaggataacagctatccattggtcttaggccccaaaaattttggtgcaactccaaataaaagtaataaccatgcacactactataaccaccctaaccctgacttccctaattccccccatccttaccaccctcgttaaccctaacaaaaaaaactcatacccccattatgtaaaatccattgtcgcatccacctttattatcagtctcttccccacaacaatattcatgtgcctagaccaagaagttattatctcgaactgacactgagccacaacccaaacaacccagctctccctaagcttcaaactagactacttctccataatattcatccctgtagcattgttcgttacatggtccatcatagaattctcactgtgatatataaactcagacccaaacattaatcagttcttcaaatatctactcatcttcctaattaccatactaatcttagttaccgctaacaacctattccaactgttcatcggctgagagggcgtaggaattatatccttcttgctcatcagttgatgatacgcccgagcagatgccaacacagcagccattcaagcaatcctatacaaccgtatcggcgatatcggtttcatcctcgccttagcatgatttatcctacactccaactcatgagacccacaacaaatagcccttctaaacgctaatccaagcctcaccccactactaggcctcctcctagcagcagcaggcaaatcagcccaattaggtctccacccctgactcccctcagccatagaaggccccaccccagtctcagccctactccactcaagcactatagttgtagcaggaatcttcttactcatccgcttccaccccctagcagaaaatagcccactaatccaaactctaacactatgcttaggcgctatcaccactctgttcgcagcagtctgcgcccttacacaaaatgacatcaaaaaaatcgtagccttctccacttcaagtcaactaggactcataatagttacaatcggcatcaaccaaccacacctagcattcctgcacatctgtacccacgccttcttcaaagccatactatttatgtgctccgggtccatcatccacaaccttaacaatgaacaagatattcgaaaaataggaggactactcaaaaccatacctctcacttcaacctccctcaccattggcagcctagcattagcaggaatacctttcctcacaggtttctactccaaagaccacatcatcgaaaccgcaaacatatcatacacaaacgcctgagccctatctattactctcatcgctacctccctgacaagcgcctatagcactcgaataattcttctcaccctaacaggtcaacctcgcttccccacccttactaacattaacgaaaataaccccaccctactaaaccccattaaacgcctggcagccggaagcctattcgcaggatttctcattactaacaacatttcccccgcatcccccttccaaacaacaatccccctctacctaaaactcacagccctcgctgtcactttcctaggacttctaacagccctagacctcaactacctaaccaacaaacttaaaataaaatccccactatgcacattttatttctccaacatactcggattctaccctagcatcacacaccgcacaatcccctatctaggccttcttacgagccaaaacctgcccctactcctcctagacctaacctgactagaaaagctattacctaaaacaatttcacagcaccaaatctccacctccatcatcacctcaacccaaaaaggcataattaaactttacttcctctctttcttcttcccactcatcctaaccctactcctaatcacataacctattcccccgagcaatctcaattacaatatatacaccaacaaacaatgttcaaccagtaactactactaatcaacgcccataatcatacaaagcccccgcaccaataggatcctcccgaatcaaccctgacccctctccttcataaattattcagcttcctacactattaaagtttaccacaaccaccaccccatcatactctttcacccacagcaccaatcctacctccatcgctaaccccactaaaacactcaccaagacctcaacccctgacccccatgcctcaggatactcctcaatagccatcgctgtagtatatccaaagacaaccatcattccccctaaataaattaaaaaaactattaaacccatataacctcccccaaaattcagaataataacacacccgaccacaccgctaacaatcaatactaaacccccataaataggagaaggcttagaagaaaaccccacaaaccccattactaaacccacactcaacagaaacaaagcatacatcattattctcgcacggactacaaccacgaccaatgatatgaaaaaccatcgttgtatttcaactacaagaacaccaatgaccccaatacgcaaaactaaccccctaataaaattaattaaccactcattcatcgacctccccaccccatccaacatctccgcatgatgaaacttcggctcactccttggcgcctgcctgatcctccaaatcaccacaggactattcctagccatgcactactcaccagacgcctcaaccgccttttcatcaatcgcccacatcactcgagacgtaaattatggctgaatcatccgctaccttcacgccaatggcgcctcaatattctttatctgcctcttcctacacatcgggcgaggcctatattacggatcatttctctactcagaaacctgaaacatcggcattatcctcctgcttgcaactatagcaacagccttcataggctatgtcctcccgtgaggccaaatatcattctgaggggccacagtaattacaaacttactatccgccatcccatacattgggacagacctagttcaatgaatctgaggaggctactcagtagacagtcccaccctcacacgattctttacctttcacttcatcttgcccttcattattgcagccctagcagcactccacctcctattcttgcacgaaacgggatcaaacaaccccctaggaatcacctcccattccgataaaatcaccttccacccttactacacaatcaaagacgccctcggcttacttctcttccttctctccttaatgacattaacactattctcaccagacctcctaggcgacccagacaattataccctagccaaccccttaaacacccctccccacatcaagcccgaatgatatttcctattcgcctacacaattctccgatccgtccctaacaaactaggaggcgtccttgccctattactatccatcctcatcctagcaataatccccatcctccatatatccaaacaacaaagcataatatttcgcccactaagccaatcactttattgactcctagccgcagacctcctcattctaacctgaatcggaggacaaccagtaagctacccttttaccatcattggacaagtagcatccgtactatacttcacaacaatcctaatcctaataccaactatctccctaattgaaaacaaaatactcaaatgggcctgtccttgtagtataaactaatacaccagtcttgtaaaccggagatgaaaacctttttccaaggacaaatcagagaaaaagtctttaactccaccattagcacccaaagctaagattctaatttaaactattctctgttctttcatggggaagcagatttgggtaccacccaagtattgactcacccatcaacaaccgctatgtatttcgtacattactgccagccaccatgaatattgtacggtaccataaatacttgaccacctgtagtacataaaaacccaatccacatcaaaaccccctccctatgcttacaagcaagtacagcaatcaaccctcaactatcacacatcaactgcaactccaaagccaccccccacccactaggataccaacaaacctacccacccttaacagtacatagtacataaagccatttaccgtacatagcacattacagtcaaatcccttctcgtccccatggatgacccccctcagataggggtcccttgaccaccatcctccgtgaaatcaatatcccgcacaagagtgctactctcctcgctccgggcccataacacttgggggtagctaaagtgaactgtatccgacatctggttcctacttcagggccataaagcctaaatagcccacacgttccccttaaataagacatcacgatg

SEQ ID NO: 454 - DNA, 16570 bp, Homo sapiens mitochondrial
  3108: "n" refers to a nucleotide at position 3107 of the Cambridge Reference Sequence (CRS, Anderson et al. 1981 Nature 290:457-465), later determined to be absent from the human mtDNA sequence according to the revised CRS (rCRS, Andrews et al. 1999 Nature Genetics 23:147); "n" therefore represents a single nucleotide deletion at a position corresponding to nucleotide 3107 of SEQ ID NO:1 as provided herein.
gatcacaggtctatcaccctattaaccactcacgggagctctccatgcatttggtattttcgtctggggggtatgcacgcgatagcattgcgagacgctggagccggagcaccctatgtcgcagtatctgtctttgattcctgcctcatcccattatttatcgcacctacgttcaatattacaggcgaacatacttactaaagtgtgttaattaattaatgcttgtaggacataataataacaattgaatgtctgcacagccgctttccacacagacatcataacaaaaaatttccaccaaaccccccctcccccgccttctggccacagcacttaaacacatctctgccaaaccccaaaaacaaagaaccctaacaccagcctaaccagatttcaaattttatcttttggcggtatgcacttttaacagtcaccccccaactaacacattattttcccctcccactcccatactactaatctcatcaatacaacccccgcccatcctacccagcacacacacaccgctgctaaccccataccccgaaccaaccaaaccccaaagacaccccccacagtttatgtagcttacctcctcaaagcaatacactgaaaatgtttagacgggctcacatcaccccataaacaaataggtttggtcctagcctttctattagctcttagtaagattacacatgcaagcatccccgttccagtgagttcaccctctaaatcaccacgatcaaaagggacaagcatcaagcacgcagcaatgcagctcaaaacgcttagcctagccacacccccacgggaaacagcagtgattaacctttagcaataaacgaaagtttaactaagctatactaaccccagggttggtcaatttcgtgccagccaccgcggtcacacgattaacccaagtcaatagaagccggcgtaaagagtgttttagatcaccccctccccaataaagctaaaactcacctgagttgtaaaaaactccagttgacacaaaatagactacgaaagtggctttaacatatctgaacacacaatagctaagacccaaactgggattagataccccactatgcttagccctaaacctcaacagttaaatcaacaaaactgctcgccagaacactacgagccacagcttaaaactcaaaggacctggcggtgcttcatatccctctagaggagcctgttctgtaatcgataaaccccgatcaacctcaccacctcttgctcagcctatataccgccatcttcagcaaaccctgatgaaggctacaaagtaagcgcaagtacccacgtaaagacgttaggtcaaggtgtagcccatgaggtggcaagaaatgggctacattttctaccccagaaaactacgatagcccttatgaaacttaagggtcgaaggtggatttagcagtaaactgagagtagagtgcttagttgaacagggccctgaagcgcgtacacaccgcccgtcaccctcctcaagtatacttcaaaggacatttaactaaaacccctacgcatttatatagaggagacaagtcgtaacatggtaagtgtactggaaagtgcacttggacgaaccagagtgtagcttaacacaaagcacccaacttacacttaggagatttcaacttaacttgaccgctctgagctaaacctagccccaaacccactccaccttactaccagacaaccttagccaaaccatttacccaaataaagtataggcgatagaaattgaaacctggcgcaatagatatagtaccgcaagggaaagatgaaaaattataaccaagcataatatagcaaggactaacccctataccttctgcataatgaattaactagaaataactttgcaaggagagccaaagctaagacccccgaaaccagacgagctacctaagaacagctaaaagagcacacccgtctatgtagcaaaatagtgggaagatttataggtagaggcgacaaacctaccgagcctggtgatagctggttgtccaagatagaatcttagttcaactttaaatttgcccacagaaccctctaaatccccttgtaaatttaactgttagtccaaagaggaacagctctttggacactaggaaaaaaccttgtagagagagtaaaaaatttaacacccatagtaggcctaaaagcagccaccaattaagaaagcgttcaagctcaacacccactacctaaaaaatcccaaacatataactgaactcctcacacccaattggaccaatctatcaccctatagaagaactaatgttagtataagtaacatgaaaacattctcctccgcataagcctgcgtcagattaaaacactgaactgacaattaacagcccaatatctacaatcaaccaacaagtcattattaccctcactgtcaacccaacacaggcatgctcataaggaaaggttaaaaaaagtaaaaggaactcggcaaatcttaccccgcctgtttaccaaaaacatcacctctagcatcaccagtattagaggcaccgcctgcccagtgacacatgtttaacggccgcggtaccctaaccgtgcaaaggtagcataatcacttgttccttaaatagggacctgtatgaatggctccacgagggttcagctgtctcttacttttaaccagtgaaattgacctgcccgtgaagaggcgggcataacacagcaagacgagaagaccctatggagctttaatttattaatgcaaacagtacctaacaaacccacaggtcctaaactaccaaacctgcattaaaaatttcggttggggcgacctcggagcagaacccaacctccgagcagtacatgctaagacttcaccagtcaaagcgaactactatactcaattgatccaataacttgaccaacggaacaagttaccctagggataacagcgcaatcctattctagagtccatatcaacaatagggtttacgacctcgatgttggatcaggacatcccgatggtgcagccgctattaaaggttcgtttgttcaacgattaaagtcctacgtgatctgagttcagaccggagtaatccaggtcggtttctatctacnttcaaattcctccctgtacgaaaggacaagagaaataaggcctacttcacaaagcgccttcccccgtaaatgatatcatctcaacttagtattatacccacacccacccaagaacagggtttgttaagatggcagagcccggtaatcgcataaaacttaaaactttacagtcagaggttcaattcctcttcttaacaacatacccatggccaacctcctactcctcattgtacccattctaatcgcaatggcattcctaatgcttaccgaacgaaaaattctaggctatatacaactacgcaaaggccccaacgttgtaggcccctacgggctactacaacccttcgctgacgccataaaactcttcaccaaagagcccctaaaacccgccacatctaccatcaccctctacatcaccgccccgaccttagctctcaccatcgctcttctactatgaacccccctccccatacccaaccccctggtcaacctcaacctaggcctcctatttattctagccacctctagcctagccgtttactcaatcctctgatcagggtgagcatcaaactcaaactacgccctgatcggcgcactgcgagcagtagcccaaacaatctcatatgaagtcaccctagccatcattctactatcaacattactaataagtggctcctttaacctctccacccttatcacaacacaagaacacctctgattactcctgccatcatgacccttggccataatatgatttatctccacactagcagagaccaaccgaacccccttcgaccttgccgaaggggagtccgaactagtctcaggcttcaacatcgaatacgccgcaggccccttcgccctattcttcatagccgaatacacaaacattattataataaacaccctcaccactacaatcttcctaggaacaacatatgacgcactctcccctgaactctacacaacatattttgtcaccaagaccctacttctaacctccctgttcttatgaattcgaacagcatacccccgattccgctacgaccaactcatacacctcctatgaaaaaacttcctaccactcaccctagcattacttatatgatatgtctccatacccattacaatctccagcattccccctcaaacctaagaaatatgtctgataaaagagttactttgatagagtaaataataggagcttaaacccccttatttctaggactatgagaatcgaacccatccctgagaatccaaaattctccgtgccacctatcacaccccatcctaaagtaaggtcagctaaataagctatcgggcccataccccgaaaatgttggttatacccttcccgtactaattaatcccctggcccaacccgtcatctactctaccatctttgcaggcacactcatcacagcgctaagctcgcactgattttttacctgagtaggcctagaaataaacatgctagcttttattccagttctaaccaaaaaaataaaccctcgttccacagaagctgccatcaagtatttcctcacgcaagcaaccgcatccataatccttctaatagctatcctcttcaacaatatactctccggacaatgaaccataaccaatactaccaatcaatactcatcattaataatcataatggctatagcaataaaactaggaatagccccctttcacttctgagtcccagaggttacccaaggcacccctctgacatccggcctgcttcttctcacatgacaaaaactagcccccatctcaatcatataccaaatctctccctcactaaacgtaagccttctcctcactctctcaatcttatccatcatagcaggcagttgaggtggattaaaccaaacccagctacgcaaaatcttagcatactcctcaattacccacataggatgaataatagcagttctaccgtacaaccctaacataaccattcttaatttaactatttatattatcctaactactaccgcattcctactactcaacttaaactccagcaccacgaccctactactatctcgcacctgaaacaagctaacatgactaacacccttaattccatccaccctcctctccctaggaggcctgcccccgctaaccggctttttgcccaaatgggccattatcgaagaattcacaaaaaacaatagcctcatcatccccaccatcatagccaccatcaccctccttaacctctacttctacctacgcctaatctactccacctcaatcacactactccccatatctaacaacgtaaaaataaaatgacagtttgaacatacaaaacccaccccattcctccccacactcatcgcccttaccacgctactcctacctatctccccttttatactaataatcttatagaaatttaggttaaatacagaccaagagccttcaaagccctcagtaagttgcaatacttaatttctgtaacagctaaggactgcaaaaccccactctgcatcaactgaacgcaaatcagccactttaattaagctaagcccttactagaccaatgggacttaaacccacaaacacttagttaacagctaagcaccctaatcaactggcttcaatctacttctcccgccgccgggaaaaaaggcgggagaagccccggcaggtttgaagctgcttcttcgaatttgcaattcaatatgaaaatcacctcggagctggtaaaaagaggcctaacccctgtctttagatttacagtccaatgcttcactcagccattttacctcacccccactgatgttcgccgaccgttgactattctctacaaaccacaaagacattggaacactatacctattattcggcgcatgagctggagtcctaggcacagctctaagcctccttattcgagccgagctgggccagccaggcaaccttctaggtaacgaccacatctacaacgttatcgtcacagcccatgcatttgtaataatcttcttcatagtaatacccatcataatcggaggctttggcaactgactagttcccctaataatcggtgcccccgatatggcgtttccccgcataaacaacataagcttctgactcttacctccctctctcctactcctgctcgcatctgctatagtggaggccggagcaggaacaggttgaacagtctaccctcccttagcagggaactactcccaccctggagcctccgtagacctaaccatcttctccctacacctagcaggtgtctcctctatcttaggggccatcaatttcatcacaacaattatcaatataaaaccccctgccataacccaataccaaacgcccctcttcgtctgatccgtcctaatcacagcagtcctacttctcctatctctcccagtcctagctgctggcatcactatactactaacagaccgcaacctcaacaccaccttcttcgaccccgccggaggaggagaccccattctataccaacacctattctgatttttcggtcaccctgaagtttatattcttatcctaccaggcttcggaataatctcccatattgtaacttactactccggaaaaaaagaaccatttggatacataggtatggtctgagctatgatatcaattggcttcctagggtttatcgtgtgagcacaccacatatttacagtaggaatagacgtagacacacgagcatatttcacctccgctaccataatcatcgctatccccaccggcgtcaaagtatttagctgactcgccacactccacggaagcaatatgaaatgatctgctgcagtgctctgagccctaggattcatctttcttttcaccgtaggtggcctgactggcattgtattagcaaactcatcactagacatcgtactacacgacacgtactacgttgtagcccacttccactatgtcctatcaataggagctgtatttgccatcataggaggcttcattcactgatttcccctattctcaggctacaccctagaccaaacctacgccaaaatccatttcactatcatattcatcggcgtaaatctaactttcttcccacaacactttctcggcctatccggaatgccccgacgttactcggactaccccgatgcatacaccacatgaaacatcctatcatctgtaggctcattcatttctctaacagcagtaatattaataattttcatgatttgagaagccttcgcttcgaagcgaaaagtcctaatagtagaagaaccctccataaacctggagtgactatatggatgccccccaccctaccacacattcgaagaacccgtatacataaaatctagacaaaaaaggaaggaatcgaaccccccaaagctggtttcaagccaaccccatggcctccatgactttttcaaaaaggtattagaaaaaccatttcataactttgtcaaagttaaattataggctaaatcctatatatcttaatggcacatgcagcgcaagtaggtctacaagacgctacttcccctatcatagaagagcttatcacctttcatgatcacgccctcataatcattttccttatctgcttcctagtcctgtatgcccttttcctaacactcacaacaaaactaactaatactaacatctcagacgctcaggaaatagaaaccgtctgaactatcctgcccgccatcatcctagtcctcatcgccctcccatccctacgcatcctttacataacagacgaggtcaacgatccctcccttaccatcaaatcaattggccaccaatggtactgaacctacgagtacaccgactacggcggactaatcttcaactcctacatacttcccccattattcctagaaccaggcgacctgcgactccttgacgttgacaatcgagtagtactcccgattgaagcccccattcgtataataattacatcacaagacgtcttgcactcatgagctgtccccacattaggcttaaaaacagatgcaattcccggacgtctaaaccaaaccactttcaccgctacacgaccgggggtatactacggtcaatgctctgaaatctgtggagcaaaccacagtttcatgcccatcgtcctagaattaattcccctaaaaatctttgaaatagggcccgtatttaccctatagcaccccctctaccccctctagagcccactgtaaagctaacttagcattaaccttttaagttaaagattaagagaaccaacacctctttacagtgaaatgccccaactaaatactaccgtatggcccaccataattacccccatactccttacactattcctcatcacccaactaaaaatattaaacacaaactaccacctacctccctcaccaaagcccataaaaataaaaaattataacaaaccctgagaaccaaaatgaacgaaaatctgttcgcttcattcattgcccccacaatcctaggcctacccgccgcagtactgatcattctatttccccctctattgatccccacctccaaatatctcatcaacaaccgactaatcaccacccaacaatgactaatcaaactaacctcaaaacaaatgataaccatacacaacactaaaggacgaacctgatctcttatactagtatccttaatcatttttattgccacaactaacctcctcggactcctgcctcactcatttacaccaaccacccaactatctataaacctagccatggccatccccttatgagcgggcgcagtgattataggctttcgctctaagattaaaaatgccctagcccacttcttaccacaaggcacacctacaccccttatccccatactagttattatcgaaaccatcagcctactcattcaaccaatagccctggccgtacgcctaaccgctaacattactgcaggccacctactcatgcacctaattggaagcgccaccctagcaatatcaaccattaaccttccctctacacttatcatcttcacaattctaattctactgactatcctagaaatcgctgtcgccttaatccaagcctacgttttcacacttctagtaagcctctacctgcacgacaacacataatgacccaccaatcacatgcctatcatatagtaaaacccagcccatgacccctaacaggggccctctcagccctcctaatgacctccggcctagccatgtgatttcacttccactccataacgctcctcatactaggcctactaaccaacacactaaccatataccaatgatggcgcgatgtaacacgagaaagcacataccaaggccaccacacaccacctgtccaaaaaggccttcgatacgggataatcctatttattacctcagaagtttttttcttcgcaggatttttctgagccttttaccactccagcctagcccctaccccccaattaggagggcactggcccccaacaggcatcaccccgctaaatcccctagaagtcccactcctaaacacatccgtattactcgcatcaggagtatcaatcacctgagctcaccatagtctaatagaaaacaaccgaaaccaaataattcaagcactgcttattacaattttactgggtctctattttaccctcctacaagcctcagagtacttcgagtctcccttcaccatttccgacggcatctacggctcaacattttttgtagccacaggcttccacggacttcacgtcattattggctcaactttcctcactatctgcttcatccgccaactaatatttcactttacatccaaacatcactttggcttcgaagccgccgcctgatactggcattttgtagatgtggtttgactatttctgtatgtctccatctattgatgagggtcttactcttttagtataaatagtaccgttaacttccaattaactagttttgacaacattcaaaaaagagtaataaacttcgccttaattttaataatcaacaccctcctagccttactactaataattattacattttgactaccacaactcaacggctacatagaaaaatccaccccttacgagtgcggcttcgaccctatatcccccgcccgcgtccctttctccataaaattcttcttagtagctattaccttcttattatttgatctagaaattgccctccttttacccctaccatgagccctacaaacaactaacctgccactaatagttatgtcatccctcttattaatcatcatcctagccctaagtctggcctatgagtgactacaaaaaggattagactgaaccgaattggtatatagtttaaacaaaacgaatgatttcgactcattaaattatgataatcatatttaccaaatgcccctcatttacataaatattatactagcatttaccatctcacttctaggaatactagtatatcgctcacacctcatatcctccctactatgcctagaaggaataatactatcgctgttcattatagctactctcataaccctcaacacccactccctcttagccaatattgtgcctattgccatactagtctttgccgcctgcgaagcagcggtgggcctagccctactagtctcaatctccaacacatatggcctagactacgtacataacctaaacctactccaatgctaaaactaatcgtcccaacaattatattactaccactgacatgactttccaaaaaacacataatttgaatcaacacaaccacccacagcctaattattagcatcatccctctactattttttaaccaaatcaacaacaacctatttagctgttccccaaccttttcctccgaccccctaacaacccccctcctaatactaactacctgactcctacccctcacaatcatggcaagccaacgccacttatccagtgaaccactatcacgaaaaaaactctacctctctatactaatctccctacaaatctccttaattataacattcacagccacagaactaatcatattttatatcttcttcgaaaccacacttatccccaccttggctatcatcacccgatgaggcaaccagccagaacgcctgaacgcaggcacatacttcctattctacaccctagtaggctcccttcccctactcatcgcactaatttacactcacaacaccctaggctcactaaacattctactactcactctcactgcccaagaactatcaaactcctgagccaacaacttaatatgactagcttacacaatagcttttatagtaaagatacctctttacggactccacttatgactccctaaagcccatgtcgaagcccccatcgctgggtcaatagtacttgccgcagtactcttaaaactaggcggctatggtataatacgcctcacactcattctcaaccccctgacaaaacacatagcctaccccttccttgtactatccctatgaggcataattataacaagctccatctgcctacgacaaacagacctaaaatcgctcattgcatactcttcaatcagccacatagccctcgtagtaacagccattctcatccaaaccccctgaagcttcaccggcgcagtcattctcataatcgcccacgggcttacatcctcattactattctgcctagcaaactcaaactacgaacgcactcacagtcgcatcataatcctctctcaaggacttcaaactctactcccactaatagctttttgatgacttctagcaagcctcgctaacctcgccttaccccccactattaacctactgggagaactctctgtgctagtaaccacgttctcctgatcaaatatcactctcctacttacaggactcaacatactagtcacagccctatactccctctacatatttaccacaacacaatggggctcactcacccaccacattaacaacataaaaccctcattcacacgagaaaacaccctcatgttcatacacctatcccccattctcctcctatccctcaaccccgacatcattaccgggttttcctcttgtaaatatagtttaaccaaaacatcagattgtgaatctgacaacagaggcttacgaccccttatttaccgagaaagctcacaagaactgctaactcatgcccccatgtctaacaacatggctttctcaacttttaaaggataacagctatccattggtcttaggccccaaaaattttggtgcaactccaaataaaagtaataaccatgcacactactataaccaccctaaccctgacttccctaattccccccatccttaccaccctcgttaaccctaacaaaaaaaactcatacccccattatgtaaaatccattgtcgcatccacctttattatcagtctcttccccacaacaatattcatgtgcctagaccaagaagttattatctcgaactgacactgagccacaacccaaacaacccagctctccctaagcttcaaactagactacttctccataatattcatccctgtagcattgttcgttacatggtccatcatagaattctcactgtgatatataaactcagacccaaacattaatcagttcttcaaatatctactcatcttcctaattaccatactaatcttagttaccgctaacaacctattccaactgttcatcggctgagagggcgtaggaattatatccttcttgctcatcagttgatgatacgcccgagcagatgccaacacagcagccattcaagcaatcctatacaaccgtatcggcgatatcggtttcatcctcgccttagcatgatttatcctacactccaactcatgagacccacaacaaatagcccttctaaacgctaatccaagcctcaccccactactaggcctcctcctagcagcagcaggcaaatcagcccaattaggtctccacccctgactcccctcagccatagaaggccccaccccagtctcagccctactccactcaagcactatagttgtagcaggaatcttcttactcatccgcttccaccccctagcagaaaatagcccactaatccaaactctaacactatgcttaggcgctatcaccactctgttcgcagcagtctgcgcccttacacaaaatgacatcaaaaaaatcgtagccttctccacttcaagtcaactaggactcataatagttacaatcggcatcaaccaaccacacctagcattcctgcacatctgtacccacgccttcttcaaagccatactatttatgtgctccgggtccatcatccacaaccttaacaatgaacaagatattcgaaaaataggaggactactcaaaaccatacctctcacttcaacctccctcaccattggcagcctagcattagcaggaatacctttcctcacaggtttctactccaaagaccacatcatcgaaaccgcaaacatatcatacacaaacgcctgagccctatctattactctcatcgctacctccctgacaagcgcctatagcactcgaataattcttctcaccctaacaggtcaacctcgcttccccacccttactaacattaacgaaaataaccccaccctactaaaccccattaaacgcctggcagccggaagcctattcgcaggatttctcattactaacaacatttcccccgcatcccccttccaaacaacaatccccctctacctaaaactcacagccctcgctgtcactttcctaggacttctaacagccctagacctcaactacctaaccaacaaacttaaaataaaatccccactatgcacattttatttctccaacatactcggattctaccctagcatcacacaccgcacaatcccctatctaggccttcttacgagccaaaacctgcccctactcctcctagacctaacctgactagaaaagctattacctaaaacaatttcacagcaccaaatctccacctccatcatcacctcaacccaaaaaggcataattaaactttacttcctctctttcttcttcccactcatcctaaccctactcctaatcacataacctattcccccgagcaatctcaattacaatatatacaccaacaaacaatgttcaaccagtaactactactaatcaacgcccataatcatacaaagcccccgcaccaataggatcctcccgaatcaaccctgacccctctccttcataaattattcagcttcctacactattaaagtttaccacaaccaccaccccatcatactctttcacccacagcaccaatcctacctccatcgctaaccccactaaaacactcaccaagacctcaacccctgacccccatgcctcaggatactcctcaatagccatcgctgtagtatatccaaagacaaccatcattccccctaaataaattaaaaaaactattaaacccatataacctcccccaaaattcagaataataacacacccgaccacaccgctaacaatcaatactaaacccccataaataggagaaggcttagaagaaaaccccacaaaccccattactaaacccacactcaacagaaacaaagcatacatcattattctcgcacggactacaaccacgaccaatgatatgaaaaaccatcgttgtatttcaactacaagaacaccaatgaccccaatacgcaaaactaaccccctaataaaattaattaaccactcattcatcgacctccccaccccatccaacatctccgcatgatgaaacttcggctcactccttggcgcctgcctgatcctccaaatcaccacaggactattcctagccatgcactactcaccagacgcctcaaccgccttttcatcaatcgcccacatcactcgagacgtaaattatggctgaatcatccgctaccttcacgccaatggcgcctcaatattctttatctgcctcttcctacacatcgggcgaggcctatattacggatcatttctctactcagaaacctgaaacatcggcattatcctcctgcttgcaactatagcaacagccttcataggctatgtcctcccgtgaggccaaatatcattctgaggggccacagtaattacaaacttactatccgccatcccatacattgggacagacctagttcaatgaatctgaggaggctactcagtagacagtcccaccctcacacgattctttacctttcacttcatcttgcccttcattattgcagccctagcagcactccacctcctattcttgcacgaaacgggatcaaacaaccccctaggaatcacctcccattccgataaaatcaccttccacccttactacacaatcaaagacgccctcggcttacttctcttccttctctccttaatgacattaacactattctcaccagacctcctaggcgacccagacaattataccctagccaaccccttaaacacccctccccacatcaagcccgaatgatatttcctattcgcctacacaattctccgatccgtccctaacaaactaggaggcgtccttgccctattactatccatcctcatcctagcaataatccccatcctccatatatccaaacaacaaagcataatatttcgcccactaagccaatcactttattgactcctagccgcagacctcctcattctaacctgaatcggaggacaaccagtaagctacccttttaccatcattggacaagtagcatccgtactatacttcacaacaatcctaatcctaataccaactatctccctaattgaaaacaaaatactcaaatgggcctgtccttgtagtataaactaatacaccagtcttgtaaaccggagatgaaaacctttttccaaggacaaatcagagaaaaagtctttaactccaccattagcacccaaagctaagattctaatttaaactattctctgttctttcatggggaagcagatttgggtaccacccaagtattgactcacccatcaacaaccgctatgtatttcgtacattactgccagccaccatgaatattgtacggtaccataaatacttgaccacctgtagtacataaaaacccaatccacatcaaaaccccccccccatgcttacaagcaagtacagcaatcaaccctcaactatcacacatcaactgcaactccaaagccacccctcacccactaggataccaacaaacctacccacccttaacagtacatagtacataaagccatttaccgtacatagcacattacagtcaaatcccttctcgtccccatggatgacccccctcagataggggtcccttgaccaccatcctccgtgaaatcaatatcccgcacaagagtgctactctcctcgctccgggcccataacacttgggggtagctaaagtgaactgtatccgacatctggttcctacttcagggccataaagcctaaatagcccacacgttccccttaaataagacatcacgatg

SEQ ID NO: 455 - DNA, 16571 bp, Homo sapiens mitochondrial
  3109: "n" refers to a nucleotide at position 3107 of the Cambridge Reference Sequence (CRS, Anderson et al. 1981 Nature 290:457-465), later determined to be absent from the human mtDNA sequence according to the revised CRS (rCRS, Andrews et al. 1999 Nature Genetics 23:147); "n" therefore represents a single nucleotide deletion at a position corresponding to nucleotide 3107 of SEQ ID NO:1 as provided herein.
gatcacaggtctatcaccctattaaccactcacgggagctctccatgcatttggtattttcgtctggggggtgtgcacgcgatagcattgcgagacgctggagccggagcaccctatgtcgcagtatctgtctttgattcctgcctcattctattatttatcgcacctacgttcaatattacaggcgaacatacttactaaagtgtgttaattaattaatgcttgtaggacataataataacaattgaatgtctgcacagccgctttccacacagacatcataacaaaaaatttccaccaaaccccccctcccccgccttctggccacagcacttaaacacatctctgccaaaccccaaaaacaaagaaccctaacaccagcctaaccagatttcaaattttatcttttggcggtatgcacttttaacagtcaccccccaactaacacattattttcccctcccactcccatactactaatctcatcaatacaacccccgcccatcctacccagcacacacacaccgctgctaaccccataccccgaaccaaccaaaccccaaagacaccccccacagtttatgtagcttacctcctcaaagcaatacactgaaaatgtttagacgggctcacatcaccccataaacaaataggtttggtcctagcctttctattagctcttagtaagattacacatgcaagcatccccgttccagtgagttcgccctctaaatcaccacgatcaaaagggacaagcatcaagcacgcagcaatgcagctcaaaacgcttagcctagccacacccccacgggaaacagcagtgattaacctttagcaataaacgaaagtttaactaagctatactaaccccagggttggtcaatttcgtgccagccaccgcggtcacacgattaacccaagtcaatagaagccggcgtaaagagtgttttagatcacccccctccccaataaagctaaaactcacctgagttgtaaaaaactccagttgacacaaaatagactacgaaagtggctttaacatatctgaacacacaatagctaagacccaaactgggattagataccccactatgcttagccctaaacctcaacagttaaatcaacaaaactgctcgccagaacactacgagccacagcttaaaactcaaaggacctggcggtgcttcatatccctctagaggagcctgttctgtaatcgataaaccccgatcaacctcaccacctcttgctcagcctatataccgccatcttcagcaaaccctgatgaaggctacaaagtaagcgcaagtacccacgtaaagacgttaggtcaaggtgtagcccatgaggtggcaagaaatgggctacattttctaccccagaaaactacgatagcccttatgaaacttaagggtcgaaggtggatttagcagtaaactgagagtagagtgcttagttgaacagggccctgaagcgcgtacacaccgcccgtcaccctcctcaagtatacttcaaaggacatttaactaaaacccctacgcatttatatagaggagacaagtcgtaacatggtaagtgtactggaaagtgcacttggacgaaccagagtgtagcttaacacaaagcacccaacttacacttaggagatttcaacttaacttgaccgctctgagctaaacctagccccaaacccactccaccttactaccagacaaccttagctaaaccatttacccaaataaagtataggcgatagaaattgaaacctggcgcaatagatatagtaccgcaagggaaagatgaaaaattataaccaagcataatatagcaaggactaacccctataccttctgcataatgaattaactagaaataactttgcaaggagagccaaagctaagacccccgaaaccagacgagctacctaagaacagctaaaagagcacacccgtctatgtagcaaaatagtgggaagatttataggtagaggcgacaaacctaccgagcctggtgatagctggttgtccaagatagaatcttagttcaactttaaatttgcccacagaaccctctaaatccccttgtaaatttaactgttagtccaaagaggaacagctctttggacactaggaaaaaaccttgtagagagagtaaaaaatttaacacccatagtaggcctaaaagcagccaccaattaagaaagcgttcaagctcaacacccactacctaaaaaatcccaaacatataactgaactcctcacacccaattggaccaatctatcaccctatagaagaactaatgttagtataagtaacatgaaaacattctcctccgcataagcctgcgtcagattaaaacactgaactgacaattaacagcccaatatctacaatcaaccaacaagtcattattaccctcactgtcaacccaacacaggcatgctcataaggaaaggttaaaaaaagtaaaaggaactcggcaaatcttaccccgcctgtttaccaaaaacatcacctctagcatcaccagtattagaggcaccgcctgcccagtgacacatgtttaacggccgcggtaccctaaccgtgcaaaggtagcataatcacttgttccttaaatagggacctgtatgaatggctccacgagggttcagctgtctcttacttttaaccagtgaaattgacctgcccgtgaagaggcgggcatgacacagcaagacgagaagaccctatggagctttaatttattaatgcaaacagtacctaacaaacccacaggtcctaaactaccaaacctgcattaaaaatttcggttggggcgacctcggagcagaacccaacctccgagcagtacatgctaagacttcaccagtcaaagcgaactactatactcaattgatccaataacttgaccaacggaacaagttaccctagggataacagcgcaatcctattctagagtccatatcaacaatagggtttacgacctcgatgttggatcaggacatcccgatggtgcagccgctattaaaggttcgtttgttcaacgattaaagtcctacgtgatctgagttcagaccggagtaatccaggtcggtttctatctacnttcaaattcctccctgtacgaaaggacaagagaaataaggcctacttcacaaagcgccttcccccgtaaatgatatcatctcaacttagcattatacccacacccacccaagaacagggtttgttaagatggcagagcccggtaatcgcataaaacttaaaactttacagtcagaggttcaattcctcttcttaacaacatacccatggccaacctcctactcctcattgtacccattctaatcgcaatggcattcctaatgcttaccgaacgaaaaattctaggctatatacaactacgcaaaggccccaacgttgtaggcccctacgggctactacaacccttcgctgacgccataaaactcttcaccaaagagcccctaaaacccgccacatctaccatcaccctctacatcaccgccccgaccttagctctcaccatcgctcttctactatgaacccccctccccatacccaaccccctggtcaacctcaacctaggcctcctatttattctagccacctctagcctagccgtttactcaatcctctgatcagggtgagcatcaaactcaaactacgccctgatcggcgcactgcgagcagtagcccaaacaatctcatatgaagtcaccctagccatcattctactatcaacattactaataagtggctcctttaacctctccacccttatcacaacacaagaacacctctgattactcctgccatcatgacccttggccataatatgatttatctccacactagcagagaccaaccgaacccccttcgaccttgccgaaggggagtccgaactagtctcaggcttcaacatcgaatacgccgcaggccccttcgccctattcttcatagccgaatacacaaacattattataataaacaccctcaccactacaatcttcctaggaacaacatatgacgcactctcccctgaactctacacaacatattttgtcaccaagaccctacttctaacctccctgttcttatgaattcgaacagcatacccccgattccgctacgaccaactcatacacctcctatgaaaaaacttcctaccactcaccctagcattacttatatgatatgtctccatacccattacaatctccagcattccccctcaaacctaagaaatatgtctgataaaagagttactttgatagagtaaataataggagcttaaacccccttatttctaggactatgagaatcgaacccatccctgagaatccaaaattctccgtgccacctatcacaccccatcctaaagtaaggtcagctaaataagctatcgggcccataccccgaaaatgttggttatacccttcccgtactaattaatcccctggcccaacccgtcatctactctaccatctttgcaggcacactcatcacagcgctaagctcgcactgattttttacctgagtaggcctagaaataaacatgctagcttttattccagttctaaccaaaaaaataaaccctcgttccacagaagctgccatcaagtatttcctcacgcaagcaaccgcatccataatccttctaatagctatcctcttcaacaatatactctccggacaatgaaccataaccaatactaccaatcaatactcatcattaataatcataatggctatagcaataaaactaggaatagccccctttcacttctgagtcccagaggttacccaaggcacccctctgacatccggcctgcttcttctcacatgacaaaaactagcccccatctcaatcatataccaaatctctccctcactaaacgtaagccttctcctcactctctcaatcttatccatcatagcaggcagttgaggtggattaaaccaaacccagctacgcaaaatcttagcatactcctcaattacccacataggatgaataatagcagttctaccgtacaaccctaacataaccattcttaatttaactatttatattatcctaactactaccgcattcctactactcaacttaaactccagcaccacgaccctactactatctcgcacctgaaacaagctaacatgactaacacccttaattccatccaccctcctctccctaggaggcctgcccccgctaaccggctttttgcccaaatgggccattatcgaagaattcacaaaaaacaatagcctcatcatccccaccatcatagccaccatcaccctccttaacctctacttctacctgcgcctaatctactccacctcaatcacactactccccatatctaacaacgtaaaaataaaatgacagtttgaacatacaaaacccaccccattcctccccacactcatcgcccttaccacgctactcctacctatctccccttttatactaataatcttatagaaatttaggttaaatacagaccaagagccttcaaagccctcagtaagttgcaatacttaatttctgtaacagctaaggactgcaaaaccccactctgcatcaactgaacgcaaatcagccactttaattaagctaagcccttactagaccaatgggacttaaacccacaaacacttagttaacagctaagcaccctaatcaactggcttcaatctacttctcccgccgccgggaaaaaaggcgggagaagccccggcaggtttgaagctgcttcttcgaatttgcaattcaatatgaaaatcacctcggagctggtaaaaagaggcctaacccctgtctttagatttacagtccaatgcttcactcagccattttacctcacccccactgatgttcgccgaccgttgactattctctacaaaccacaaagacattggaacactatacctattattcggcgcatgagctggagtcctaggcacagctctaagcctccttattcgagccgaactgggccagccaggcaaccttctaggtaacgaccacatctacaacgttatcgtcacagcccatgcatttgtaataatcttcttcatagtaatacccatcataatcggaggctttggcaactgactagttcccctaataatcggtgcccccgatatggcgtttccccgcataaacaacataagcttctgactcttacctccctctctcctactcctgctcgcatctgctatagtggaggccggagcaggaacaggttgaacagtctaccctcccttagcagggaactactcccaccctggagcctccgtagacctaaccatcttctccttacacctagcaggtgtctcctctatcttaggggccatcaatttcatcacaacaattatcaatataaaaccccctgccataacccaataccaaacgcccctcttcgtctgatccgtcctaatcacagcagtcctacttctcctatctctcccagtcctagctgctggcatcactatactactaacagaccgcaacctcaacaccaccttcttcgaccccgccggaggaggagaccccattctataccaacacctattctgatttttcggtcaccctgaagtttatattcttatcctaccaggcttcggaataatctcccatattgtaacttactactccggaaaaaaagaaccatttggatacataggtatggtctgagctatgatatcaattggcttcctagggtttatcgtgtgagcacaccatatatttacagtaggaatagacgtagacacacgagcatatttcacctccgctaccataatcatcgctatccccaccggcgtcaaagtatttagctgactcgccacactccacggaagcaatatgaaatgatctgctgcagtgctatgagccctaggattcatctttcttttcaccgtaggtggcctgactggcattgtattagcaaactcatcactagacatcgtactacacgacacgtactacgttgtagctcacttccactatgtcctatcaataggagctgtatttgccatcataggaggcttcattcactgatttcccctattctcaggctacaccctagaccaaacctacgccaaaatccatttcactatcatattcatcggcgtaaatctaactttcttcccacaacactttctcggcctatccggaatgccccgacgttactcggactaccccgatgcatacaccacatgaaacatcctatcatctgtaggctcattcatttctctaacagcagtaatattaataattttcatgatttgagaagccttcgcttcgaagcgaaaagtcctaatagtagaagaaccctccataaacctggagtgactatatggatgccccccaccctaccacacattcgaagaacccgtatacataaaatctagacaaaaaaggaaggaatcgaaccccccaaagctggtttcaagccaaccccatggcctccatgactttttcaaaaaggtattagaaaaaccatttcataactttgtcaaagttaaattataggctaaatcctatatatcttaatggcacatgcagcgcaagtaggtctacaagacgctacttcccctatcatagaagagcttatcacctttcatgatcacgccctcataatcattttccttatctgcttcctagtcctgtatgcccttttcctaacactcacaacaaaactaactaatactaacatctcagacgctcaggaaatggaaaccgtctgaactatcctgcccgccatcatcctagtcctcatcgccctcccatccctacgcatcctttacataacagacgaggtcaacgatccctcccttaccatcaaatcaattggccaccaatggtactgaacctacgagtacaccgactacggcggactaatcttcaactcctacatacttcccccattattcctagaaccaggcgacctgcgactccttgacgttgacaatcgagtagtactcccgattgaagcccccattcgtataataattacatcacaagacgtcttgcactcatgagctgtccccacattaggcttaaaaacagatgcaattcccggacgtctaaaccaaaccactttcaccgctacacgaccgggggtatactacggtcaatgctctgaaatctgtggagcaaaccacagtttcatgcccatcgtcctagaattaattcccctaaaaatctttgaaatagggcccgtatttaccctatagcaccccctctaccccctctagagcccactgtaaagctaacttagcattaaccttttaagttaaagattaagagaaccaacacctctttacagtgaaatgccccaactaaatactaccgtatggcccaccataattacccccatactccttacactattcctcatcacccaactaaaaatattaaacacaaactaccacctacctccctcaccaaagcccataaaaataaaaaattataacaaaccctgagaaccaaaatgaacgaaaatctgttcgcttcattcattgcccccacaatcctaggcctacccgccgcagtactgatcattctatttccccctctattgatccccacctccaaatatctcatcaacaaccgactaatcaccacccaacaatgactaatcaaactaacctcaaaacaaatgataaccatacacaacactaaaggacgaacctgatctcttatactagtatccttaatcatttttattgccacaactaacctcctcggactcctgcctcactcatttacaccaaccacccaactatctataaacctagccatggccatccccttatgagcgggcgcagtgattataggctttcgctctaagattaaaaatgccctagcccacttcttaccacaaggcacacctacaccccttatccccatactagttattatcgaaaccatcagcctactcattcaaccaatagccctggccgtacgcctaaccgctaacattactgcaggccacctactcatgcacctaattggaagcgccaccctagcaatatcaaccattaaccttccctctacacttatcatcttcacaattctaattctactgactatcctagaaatcgctgtcgccttaatccaagcctacgttttcacacttctagtaagcctctacctgcacgacaacacataatgacccaccaatcacatgcctatcatatagtaaaacccagcccatgacccctaacaggggccctctcagccctcctaatgacctccggcctagccatgtgatttcacttccactccataacgctcttcatactaggcctactaaccaacacactaaccatataccaatgatggcgcgatgtaacacgagaaagcacataccaaggccaccacacaccacctgtccaaaaaggccttcgatacgggataatcctatttattacctcagaaatttttttcttcgcaggatttttctgagccttttaccactccagcctagcccctaccccccaattaggagggcactggcccccaacaggcatcaccccgctaaatcccctagaagtcccactcctaaacacatccgtattactcgcatcaggagtatcaatcacctgagctcaccatagtctaatagaaaacaaccgaaaccaaataattcaagcactgcttattacaattttactgggtctctattttaccctcctacaagcctcagagtacttcgagtctcccttcaccatttccgacggcatctacggctcaacattttttgtagccacaggcttccacggacttcacgtcattattggctcaactttcctcactatctgcttcatccgtcaactaatatttcactttacatccaaacatcactttggcttcgaagccgccgcctgatactggcattttgtagatgtggtttgactatttctgtatgtctccatctattgatgagggtcttactcttttagtataaatagtaccgttaacttccaattaactagttttgacaacattcaaaaaagagtaataaacttcgccttaattttaataatcaacaccctcctagccttactactaataattattacattttgactaccacaactcaacggctacatagaaaaatccaccccttacgagtgcggcttcgaccctatatcccccgcccgcgtccctttctccataaaattcttcttagtagctattaccttcttattatttgatctagaaattgccctccttttacccctaccatgagccctacaaacaactaacctgccactaatagttatgtcatccctcttattaatcatcatcctagccctaagtctggcctatgagtgactacaaaaaggattagactgaaccgaattggtatatagtttaaacaaaacgaatgatttcgactcattaaattatgataatcatatttaccaaatgcccctcatttacataaatattatactagcatttaccatctcacttctaggaatactagtatatcgctcacacctcatatcctccctactatgcctagaaggaataatactatcgctgttcattatagctactctcataaccctcaacacccactccctcttagccaatattgtgcctattgccatactagtctttgccgcctgcgaagcagcggtgggcctagccctactagtctcaatctccaacacatatggcctagactacgtacataacctaaacctactccaatgctaaaactaatcgtcccaacaattatattactaccactgacatgactttccaaaaaacacataatttgaatcaacacaaccacccacagcctaattattagcatcatccctctactattttttaaccaaatcaacaacaacctatttagctgttccccaaccttttcctccgaccccctaacaacccccctcctaatactaactacctgactcctacccctcacaatcatggcaagccaacgccacttatccagtgaaccactatcacgaaaaaaactctacctctctatactaatctccctacaaatctccttaattataacattcacagccacagaactaatcatattttatatcttcttcgaaaccacacttatccccaccttggctatcatcacccgatgaggcaaccagccagaacgcctgaacgcaggcacatacttcctattctacaccctagtaggctcccttcccctactcatcgcactaatttacactcacaacaccctaggctcactaaacattctactactcactctcactgcccaagaactatcaaactcctgagccaacaacttaatatgactagcttacacaatagcttttatagtaaagatacctctttacggactccacttatgactccctaaagcccatgtcgaagcccccatcgctgggtcaatagtacttgccgcagtactcttgaaactaggcggctatggtataatacgcctcacactcattctcaaccccctgacaaaacacatagcctaccccttccttgtactatccctatgaggcataattataacaagctccatctgcctacgacaaacagacctaaaatcgctcattgcatactcttcaatcagccacatagccctcgtagtaacagccattctcatccaaaccccctgaagcttcaccggcgcagtcattctcataatcgcccacggacttacatcctcattactattctgcctagcaaactcaaactacgaacgcactcacagtcgcatcataatcctctctcaaggacttcaaactctactcccactaatagctttttgatgacttctagcaagcctcgctaacctcgccttaccccccactattaacctactgggagaactctctgtgctagtaaccacgttctcctgatcaaatatcactctcctacttacaggactcaacatactagtcacagccctatactccctctacatatttaccacaacacaatggggctcactcacccaccacattaacaacataaaaccctcattcacacgagaaaacaccctcatgttcatacacctatcccccattctcctcctatccctcaaccccgacatcattaccgggttttcctcttgtaaatatagtttaaccaaaacatcagattgtgaatctgacaacagaggcttacgaccccttatttaccgagaaagctcacaagaactgctaactcatgcccccatgtctaacaacatggctttctcaacttttaaaggataacagctatccattggtcttaggccccaagaattttggtgcaactccaaataaaagtaataaccatgcacactactataaccaccctaaccctaacttccctaattccccccatccttaccaccctcgttaaccctaacaaaaaaaactcatacccccattatgtaaaatccattgtcgcatccacctttattatcagtctcttccccacaacaatattcatgtgcctagaccaagaagttattatctcgaactgacactgagccacaacccaaacaacccagctctccctaagcttcaaactagactacttctccataatattcatccctgtagcattgttcgttacatggtccatcatagaattctcactgtgatatataaactcagacccaaacattaatcagttcttcaaatatctactcatcttcctaattaccatactaatcttagttaccgctaacaacctattccaactgttcatcggctgagagggcgtaggaattatatccttcttgctcatcagttgatgatacgcccgagcagatgccaacacagcagccattcaagcaatcctatacaaccgtatcggcgatatcggtttcatcctcgccttagcatgatttatcctacactccaactcatgagacccacaacaaatagcccttctaaacgctaatccaagcctcaccccactactaggcctcctcctagcagcagcaggcaaatcagcccaattgggtctccacccctgactcccctcagccatagaaggccccaccccagtctcagccctactccactcaagcactatagttgtagcaggaatcttcttactcatccgcttccaccccctagcagaaaatagcccactaatccaaactctaacactatgcttaggcgctatcaccactctgttcgcagcagtctgcgcccttacacaaaatgacatcaaaaaaatcgtagccttctccacttcaagtcaactaggactcataatagttacaatcggcatcaaccaaccacacctagcattcctgcacatctgtacccacgccttcttcaaagccatactatttatgtgctccgggtccatcatccacaaccttaacaatgaacaagatattcgaaaaataggaggactactcaaaaccatgcctctcacttcaacctccctcaccattggcagcctagcattagcaggaatacctttcctcacaggtttctactccaaagaccacatcatcgaaaccgcaaacatatcatacacaaacgcctgagccctatctattactctcatcgctacctccctgacaagcgcctatagcactcgaataatccttctcaccctaacaggtcgacctcgcttccccacccttactaacattaacgaaaataaccccaccctactaaaccccattaaacgcctggcagccggaagcctattcgcaggatttctcattactaacaacatttcccccgcatcccccttccaaacaacaatccccctctacctaaaactcacagccctcgctgtcactttcctaggacttctaacagccctagacctcaactacctaaccaacaaacttaaaataaaatccccactatgcacattttatttctccaacatactcggattctaccctagcatcacacaccgcacaatcccctatctaggccttcttacgagccaaaacctgcccctactcctcctagacctaacctgactagaaaagctattacctaaaacaatttcacagcaccaaatctccacctccatcatcacctcaacccaaaaaggcataattaaactttacttcctctctttcttcttcccactcatcctaaccctactcctaatcacataacctattcccccgagcaatctcaattacaatatacacaccaacaaacaatgttcaaccagtaactactactaatcaacgcccataatcatacaaagcccccgcaccaataggatcctcccgaatcaaccctgacccctctccttcataaattattcagcttcctacactattaaagtttaccacaaccaccaccccatcatactctttcacccacagcaccaatcctacctccatcgctaaccccactaaaacactcaccaagacctcaacccctgacccccatgcctcaggatactcctcaatagccatcgctgtagtatatccaaagacaaccatcattccccctaaataaattaaaaaaactattaaacccatataacctcccccaaaattcagaataataacacacccgaccacaccgctaacaatcaatactaaacccccataaataggagaaggcttagaagaaaaccccacaaaccccattactaaacccacactcaacagaaacaaagcatacatcattattctcgcacggactacaaccacgaccaatgatatgaaaaaccatcgttgtatttcaactacaagaacaccaatgaccccaatacgcaaaattaaccccctaataaaattaattaaccactcattcatcgacctccccaccccatccaacatctccgcatgatgaaacttcggctcactccttggcgcctgcctgatcctccaaatcaccacaggactattcctagccatgcactactcaccagacgcctcaaccgccttttcatcaatcgcccacatcactcgagacgtaaattatggctgaatcatccgctaccttcacgccaatggcgcctcaatattctttatctgcctcttcctacacatcgggcgaggcctatattacggatcatttctctactcagaaacctgaaacatcggcattatcctcctgcttgcaactatagcaacagccttcataggctatgtcctcccgtgaggccaaatatcattctgaggggccacagtaattacaaacttactatccgccatcccatacattgggacagacctagttcaatgaatctgaggaggctactcagtagacagtcccaccctcacacgattctttacctttcacttcatcttgcccttcattattacagccctagcagcactccacctcctattcttgcacgaaacgggatcaaacaaccccctaggaatcacctcccattccgataaaatcaccttccacccttactacacaatcaaagacgccctcggcttacttctcttccttctctccttaatgacattaacactattctcaccagacctcctaggcgacccagacaattataccctagccaaccccttaaacacccctccccacatcaagcccgaatgatatttcctattcgcctacacaattctccgatccgtccctaacaaactaggaggcgtccttgccctattactatccatcctcatcctagcaataatccccatcctccatatatccaaacaacaaagcataatatttcgcccactaagccaatcactttattgactcctagccgcagacctcctcattctaacctgaatcggaggacaaccagtaagctacccttttaccatcattggacaagtagcatccgtactatacttcacaacaatcctaatcctaataccaactatctccctaattgaaaacaaaatactcaaatgggcctgtccttgtagtataaactaatacaccagtcttgtaaaccggagatgaaaacctttttccaaggacaaatcagagaaaaagtctttaactccaccattagcacccaaagctaagattctaatttaaactattctctgttctttcatggggaagcagatttgggtaccacccaagtattgactcacccatcaacaaccgctatgtatttcgtacattactgccagccaccatgaatattgtacggtaccataaatacttgaccacctgtagtacataaaaacccaatccacatcaaaaccccctccccatgcttacaagcaagtacagcaatcaaccctcaactatcacacatcaactgcaactccaaagccacccctcacccattaggataccaacaaacctacccacccttaacagtacatagtacataaagccatttaccgtacatagcacattacagtcaaatcccttctcgtccccatggatgacccccctcagataggggtcccttgaccaccatcctccgtgaaatcaatatcccgcacaagagtgctactctcctcgctccgggcccataacacttgggggtagctaaagtgaactgtatccgacatctggttcctacttcagggtcataaagcctaaatagcccacacgttccccttaaataagacatcacgatg

SEQ ID NO: 456 - DNA, 16568 bp, Homo sapiens mitochondrial
  3106: "n" refers to a nucleotide at position 3107 of the Cambridge Reference Sequence (CRS, Anderson et al. 1981 Nature 290:457-465), later determined to be absent from the human mtDNA sequence according to the revised CRS (rCRS, Andrews et al. 1999 Nature Genetics 23:147); "n" therefore represents a single nucleotide deletion at a position corresponding to nucleotide 3107 of SEQ ID NO:1 as provided herein.
gatcacaggtctatcaccctattaaccactcacgggagctctccatgcatttggtattttcgtctggggggtatgcacgcgatagcattgcgggacgctggagccggagcaccctatgtcgcagtatctgtctttgattcctgcctcatcctattatttatcgcacctacgttcaatattacaggcgaacatacttactaaagtgtgttaattaattaatgcttgtaggacataataataacaattgaatgtctgcacagccgctttccacacagacatcataacaaaaaatttccaccaaaccccccctcccccgccttctggccacagcacttaaacacatctctgccaaaccccaaaaacaaagaaccctaacaccagcctaaccagatttcaaattttatcttttggcggtatgcacttttaacagtcaccccccaactaacacattattttcccctcccactcccatactactaatctcatcaatacaacccccgcccatcctacccagcacacacaccgctgctaaccccataccccgaaccaaccaaaccccaaagacaccccccacagtttatgtagcttacctcctcaaagcaatacactgaaaatgtttagacgggctcacatcaccccataaacaaataggtttggtcctagcctttctattagctcttagtaagattacacatgcaagcatccccgttccagtgagttcaccctctaaatcaccacgatcaaaagggacaagcatcaagcacgcagcaatgcagctcaaaacgcttagcctagccacacccccacgggaaacagcagtgattaacctttagcaataaacgaaagtttaactaagctatactaaccccagggttggtcaatttcgtgccagccaccgcggtcacacgattaacccaagtcaatagaagccggcgtaaagagtgttttagatcaccccctccccaataaagctaaaactcacctgagttgtaaaaaactccagttgacacaaaatagactacgaaagtggctttaacatatctgaacacacaatagctaagacccaaactgggattagataccccactatgcttagccctaaacctcaacagttaaatcaacaaaactgctcgccagaacactacgagccacagcttaaaactcaaaggacctggcggtgcttcatatccctctagaggagcctgttctgtaatcgataaaccccgatcaacctcaccacctcttgctcagcctatataccgccatcttcagcaaaccctgatgaaggctacaaagtaagcgcaagtacccacgtaaagacgttaggtcaaggtgtagcccatgaggtggcaagaaatgggctacattttctaccccagaaaactacgatagcccttatgaaacttaagggtcgaaggtggatttagcagtaaactgagagtagagtgcttagttgaacagggccctgaagcgcgtacacaccgcccgtcaccctcctcaagtatacttcaaaggacatttaactaaaacccctacgcatttatatagaggagacaagtcgtaacatggtaagtgtactggaaagtgcacttggacgaaccagagtgtagcttaacacaaagcacccaacttacacttaggagatttcaacttaacttgaccgctctgagctaaacctagccccaaacccactccaccttactaccagacaaccttagccaaaccatttacccaaataaagtataggcgatagaaattgaaacctggcgcaatagatatagtaccgcaagggaaagatgaaaaattataaccaagcataatatagcaaggactaacccctataccttctgcataatgaattaactagaaataactttgcaaggagagccaaagctaagacccccgaaaccagacgagctacctaagaacagctaaaagagcacacccgtctatgtagcaaaatagtgggaagatttataggtagaggcgacaaacctaccgagcctggtgatagctggttgtccaagatagaatcttagttcaactttaaatttgcccacagaaccctctaaatccccttgtaaatttaactgttagtccaaagaggaacagctctttggacactaggaaaaaaccttgtagagagagtaaaaaatttaacacccatagtaggcctaaaagcagccaccaattaagaaagcgttcaagctcaacacccactacctaaaaaatcccaaacatataactgaactcctcacacccaattggaccaatctatcaccctatagaagaactaatgttagtataagtaacatgaaaacattctcctccgcataagcctgcgtcagattaaaacactgaactgacaattaacagcccaatatctacaatcaaccaacaagtcattattaccctcactgtcaacccaacacaggcatgctcataaggaaaggttaaaaaaagtaaaaggaactcggcaaatcttaccccgcctgtttaccaaaaacatcacctctagcatcaccagtattagaggcaccgcctgcccagtgacacatgtttaacggccgcggtaccctaaccgtgcaaaggtagcataatcacttgttccttaaatagggacctgtatgaatggctccacgagggttcagctgtctcttacttttaaccagtgaaattgacctgcccgtgaagaggcgggcataacacagcaagacgagaagaccctatggagctttaatttattaatgcaaacagtacctaacaaacccacaggtcctaaactaccaaacctgcattaaaaatttcggttggggcgacctcggagcagaacccaacctccgagcagtacatgctaagacttcaccagtcaaagcgaactactatactcaattgatccaataacttgaccaacggaacaagttaccctagggataacagcgcaatcctattctagagtccatatcaacaatagggtttacgacctcgatgttggatcaggacatcccaatggtgcagccgctattaaaggttcgtttgttcaacgattaaagtcctacgtgatctgagttcagaccggagtaatccaggtcggtttctatctacnttcaaattcctccctgtacgaaaggacaagagaaataaggcctacttcacaaagcgccttcccccgtaaatgatatcatctcaacttagtattatacccacacccacccaagaacagggtttgttaagatggcagagcccggtaatcgcataaaacttaaaactttacagtcagaggttcaattcctcttcttaacaacatacccatggccaacctcctactcctcattgtacccattctaatcgcaatggcattcctaatgcttaccgaacgaaaaattctaggctatatacaactacgcaaaggccccaacgttgtaggcccctacgggctactacaacccttcgctgacgccataaaactcttcaccaaagaacccctaaaacccgccacatctaccatcaccctctacatcaccgccccgaccttagctctcaccatcgctcttctactatgaacccccctccccatacccaaccccctggtcaacctcaacctaggcctcctatttattctagccacctctagcctagccgtttactcaatcctctgatcagggtgagcatcaaactcaaactacgccctgatcggcgcactgcgagcagtagcccaaacaatctcatatgaagtcaccctagccatcattctactatcaacattactaataagtggctcctttaacctctccacccttatcacaacacaagaacacctctgattactcctgccatcatgacccttggccataatatgatttatctccacactagcagagaccaaccgaacccccttcgaccttgccgaaggggagtccgaactagtctcaggcttcaacatcgaatacgccgcaggccccttcgccctattcttcatagccgaatacacaaacattattataataaacaccctcaccactacaatcttcctaggaacaacatatgacgcactctcccctgaactctacacaacatattttgtcaccaagaccctacttctaacctccctgttcttatgaattcgaacagcatacccccgattccgctacgaccaactcatacacctcctatgaaaaaacttcctaccactcaccctagcattacttatatgatatgtctccatacccattacaatctccagcattccccctcaaacctaagaaatatgtctgataaaagagttactttgatagagtaaataataggagcttaaacccccttatttctaggactatgagaatcgaacccatccctgagaatccaaaattctccgtgccacctatcacaccccatcctaaagtaaggtcagctaaataagctatcgggcccataccccgaaaatgttggttatacccttcccgtactaattaatcccctggcccaacccgtcatctactctaccatctttgcaggcacactcatcacagcgctaagctcgcactgattttttacctgagtaggcctagaaataaacatgctagcttttattccagttctaaccaaaaaaataaaccctcgttccacagaagctgccatcaagtatttcctcacgcaagcaaccgcatccataatccttctaatagctatcctcttcaacaatatactctccggacaatgaaccataaccaatactaccaatcaatactcatcattaataatcataatggctatagcaataaaactaggaatagccccctttcacttctgagtcccagaggttacccaaggcacccctctgacatccggcctgcttcttctcacatgacaaaaactagcccccatctcaatcatataccaaatctctccctcactaaacgtaagccttctcctcactctctcaatcttatccatcatagcaggcagttgaggtggattaaaccaaacccagctacgcaaaatcttagcatactcctcaattacccacataggatgaataatagcagttctaccgtacaaccctaacataaccattcttaatttaactatttatattatcctaactactaccgcattcctactactcaacttaaactccagcaccacgaccctactactatctcgcacctgaaacaagctaacatgactaacacccttaattccatccaccctcctctccctaggaggcctgcccccgctaaccggctttttgcccaaatgggccattatcgaagaattcacaaaaaacaatagcctcatcatccccaccatcatagccaccatcaccctccttaacctctacttctacctacgcctaatctactccacctcaatcacactactccccatatctaacaacgtaaaaataaaatgacagtttgaacatacaaaacccaccccattcctccccacactcatcgcccttaccacgctactcctacctatctccccttttatactaataatcttatagaaatttaggttaaatacagaccaagagccttcaaagccctcagtaagttgcaatacttaatttctgtaacagctaaggactgcaaaaccccactctgcatcaactgaacgcaaatcagccactttaattaagctaagcccttactagaccaatgggacttaaacccacaaacacttagttaacagctaagcaccctaatcaactggcttcaatctacttctcccgccgccgggaaaaaaggcgggagaagccccggcaggtttgaagctgcttcttcgaatttgcaattcaatatgaaaatcacctcggagctggtaaaaagaggcctaacccctgtctttagatttacagtccaatgcttcactcagccattttacctcacccccactgatgttcgccgaccgttgactattctctacaaaccacaaagacattggaacactatacctattattcggcgcatgagctggagtcctaggcacagctctaagcctccttattcgagccgagctgggccagccaggcaaccttctaggtaacgaccacatctacaacgttatcgtcacagcccatgcatttgtaataatcttcttcatagtaatacccatcataatcggaggctttggcaactgactagttcccctaataatcggtgcccccgatatggcgtttccccgcataaacaacataagcttctgactcttacctccctctctcctactcctgctcgcatctgctatagtggaggccggagcaggaacaggttgaacagtctaccctcccttagcagggaactactcccaccctggagcctccgtagacctaaccatcttctccttacacctagcaggtgtctcctctatcttaggggccatcaatttcatcacaacaattatcaatataaaaccccctgccataacccaataccaaacgcccctcttcgtctgatccgtcctaatcacagcagtcctacttctcctatctctcccagtcctagctgctggcatcactatactactaacagaccgcaacctcaacaccaccttcttcgaccccgccggaggaggagaccccattctataccaacacctattctgatttttcggtcaccctgaagtttatattcttatcctaccaggcttcggaataatctcccatattgtaacttactactccggaaaaaaagaaccatttggatacataggtatggtctgagctatgatatcaattggcttcctagggtttatcgtgtgagcacaccatatatttacagtaggaatagacgtagacacacgagcatatttcacctccgctaccataatcatcgctatccccaccggcgtcaaagtatttagctgactcgccacactccacggaagcaatatgaaatgatctgctgcagtgctctgagccctaggattcatctttcttttcaccgtaggtggcctgactggcattgtattagcaaactcatcactagacatcgtactacacgacacgtactacgttgtagcccacttccactatgtcctatcaataggagctgtatttgccatcataggaggcttcattcactgatttcccctattctcaggctacaccctagaccaaacctacgccaaaatccatttcactatcatattcatcggcgtaaatctaactttcttcccacaacactttctcggcctatccggaatgccccgacgttactcggactaccccgatgcatacaccacatgaaacatcctatcatctgtaggctcattcatttctctaacagcagtaatattaataattttcatgatttgagaagccttcgcttcgaagcgaaaagtcctaatagtagaagaaccctccataaacctggagtgactatatggatgccccccaccctaccacacattcgaagaacccgtatacataaaatctagacaaaaaaggaaggaatcgaaccccccaaagctggtttcaagccaaccccatggcctccatgactttttcaaaaaggtattagaaaaaccatttcataactttgtcaaagttaaattataggctaaatcctatatatcttaatggcacatgcagcgcaagtaggtctacaagacgctacttcccctatcatagaagagcttatcacctttcatgatcacgccctcataatcattttccttatctgcttcctagtcctgtatgcccttttcctaacactcacaacaaaactaactaatactaacatctcagacgctcaggaaatagaaaccgtctgaactatcctgcccgccatcatcctagtcctcatcgccctcccatccctacgcatcctttacataacagacgaggtcaacgatccctcccttaccatcaaatcaattggccaccaatggtactgaacctacgagtacaccgactacggcggactaatcttcaactcctacatacttcccccattattcctagaaccaggcgacctgcgactccttgacgttgacaatcgagtagtactcccgattgaagcccccattcgtataataattacatcacaagacgtcttgcactcatgagctgtccccacattaggcttaaaaacagatgcaattcccggacgtctaaaccaaaccactttcaccgctacacgaccgggggtatactacggtcaatgctctgaaatctgtggagcaaaccacagtttcatgcccatcgtcctagaattaattcccctaaaaatctttgaaatagggcccgtatttaccctatagcaccccctctaccccctctagagcccactgtaaagctaacttagcattaaccttttaagttaaagattaagagaaccaacacctctttacagtgaaatgccccaactaaatactaccgtatggcccaccataattacccccatactccttacactattcctcatcacccaactaaaaatattaaacacaaactaccacctacctccctcaccaaagcccataaaaataaaaaattataacaaaccctgagaaccaaaatgaacgaaaatctgttcgcttcattcattgcccccacaatcctaggcctacccgccgcagtactgatcattctatttccccctctattgatccccacctccaaatatctcatcaacaaccgactaatcaccacccaacaatgactaatcaaactaacctcaaaacaaatgataaccatacacaacactaaaggacgaacctgatctcttatactagtatccttaatcatttttattgccacaactaacctcctcggactcctgcctcactcatttacaccaaccacccaactatctataaacctagccatggccatccccttatgagcgggcgcagtgattataggctttcgctctaagattaaaaatgccctagcccacttcttaccacaaggcacacctacaccccttatccccatactagttattatcgaaaccatcagcctactcattcaaccaatagccctggccgtacgcctaaccgctaacattactgcaggccacctactcatgcacctaattggaagcgccaccctagcaatatcaaccattaaccttccctctacacttatcatcttcacaattctaattctactgactatcctagaaatcgctgtcgccttaatccaagcctacgttttcacacttctagtaagcctctacctgcacgacaacacataatgacccaccaatcacatgcctatcatatagtaaaacccagcccatgacccctaacaggggccctctcagccctcctaatgacctccggcctagccatgtgatttcacttccactccataacgctcctcatactaggcctactaaccaacacactaaccatataccaatgatggcgcgatgtaacacgagaaagcacataccaaggccaccacacaccacctgtccaaaaaggccttcgatacgggataatcctatttattacctcagaagtttttttcttcgcaggatttttctgagccttttaccactccagcctagcccctaccccccaattaggagggcactggcccccaacaggcatcaccccgctaaatcccctagaagtcccactcctaaacacatccgtattactcgcatcaggagtatcaatcacctgagctcaccatagtctaatagaaaacaaccgaaaccaaataattcaagcactgcttattacaattttactgggtctctattttaccctcctacaagcctcagagtacttcgagtctcccttcaccatttccgacggcatctacggctcaacattttttgtagccacaggcttccacggacttcacgtcattattggctcaactttcctcactatctgcttcatccgccaactaatatttcactttacatccaaacatcactttggcttcgaagccgccgcttgatactggcattttgtagatgtggtttgactatttctgtatgtctccatctattgatgagggtcttactcttttagtataaatagtaccgttaacttccaattaactagttttgacaacattcaaaaaagagtaataaacttcgccttaattttaataatcaacaccctcctagccttactactaataattattacattttgactaccacaactcaacggctacatagaaaaatccaccccttacgagtgcggcttcgaccctatatcccccgcccgcgtccctttctccataaaattcttcttagtagctattaccttcttattatttgatctagaaattgccctccttttacccctaccatgagccctacaaacaactaacctgccactaatagttatgtcatccctcttattaatcatcatcctagccctaagtctggcctatgagtgactacaaaaaggattagactgaaccgaattggtatatagtttaaacaaaacgaatgatttcgactcattaaattatgataatcatatttaccaaatgcccctcatttacataaatattatactagcatttaccatctcacttctaggaatactagtatatcgctcacacctcatatcctccctactatgcctagaaggaataatactatcactgttcattatagctactctcataaccctcaacacccactccctcttagccaatattgtgcctattgccatactagtctttgccgcctgcgaagcagcggtgggcctagccctactagtctcaatctccaacacatatggcctagactacgtacataacctaaacctactccaatgctaaaactaatcgtcccaacaattatattactaccactgacatgactttccaaaaaacacataatttgaatcaacacaaccacccacagcctaattattagcatcatccctctactattttttaaccaaatcaacaacaacctatttagctgttccccaaccttttcctccgaccccctaacaacccccctcctaatactaactacctgactcctacccctcacaatcatggcaagccaacgccacttatccagtgaaccactatcacgaaaaaaactctacctctctatactaatctccctacaaatctccttaattataacattcacagccacagaactaatcatattttatatcttcttcgaaaccacacttatccccaccttggctatcatcacccgatgaggcaaccagccagaacgcctgaacgcaggcacatacttcctattctacaccctagtaggctcccttcccctactcatcgcactaatttacactcacaacaccctaggctcactaaacattctactactcactctcactgcccaagaactatcaaactcctgagccaacaacttaatatgactagcttacacaatagcttttatagtaaagatacctctttacggactccacttatgactccctaaagcccatgtcgaagcccccatcgctgggtcaatagtacttgccgcagtactcttaaaactaggcggctatggtataatacgcctcacactcattctcaaccccctgacaaaacacatagcctaccccttccttgtactatccctatgaggcataattataacaagctccatctgcctacgacaaacagacctaaaatcgctcattgcatactcttcaatcagccacatagccctcgtagtaacagccattctcatccaaaccccctgaagcttcaccggcgcagtcattctcataatcgcccacgggcttacatcctcattactattctgcctagcaaactcaaactacgaacgcactcacagtcgcatcataatcctctctcaaggacttcaaactctactcccactaatagctttttgatgacttctagcaagcctcgctaacctcgccttaccccccactattaacctactgggagaactctctgtgctagtaaccacgttctcctgatcaaatatcactctcctacttacaggactcaacatactagtcacagccctatactccctctacatatttaccacaacacaatggggctcactcacccaccacattaacaacataaaaccctcattcacacgagaaaacaccctcatgttcatacacctatcccccattctcctcctatccctcaaccccgacatcattaccgggttttcctcttgtaaatatagtttaaccaaaacatcagattgtgaatctgacaacagaggcttacgaccccttatttaccgagaaagctcacaagaactgctaactcatgcccccatgtctaacaacatggctttctcaacttttaaaggataacagctatccattggtcttaggccccaaaaattttggtgcaactccaaataaaagtaataaccatgcacactactataaccaccctaaccctgacttccctaattccccccatccttaccaccctcgttaaccctaacaaaaaaaactcatacccccattatgtaaaatccattgtcgcatccacctttattatcagtctcttccccacaacaatattcatgtgcctagaccaagaagttattatctcgaactgacactgagccacaacccaaacaacccagctctccctaagcttcaaactagactacttctccataatattcatccctgtagcattgttcgttacatggtccatcatagaattctcactgtgatatataaactcagacccaaacattaatcagttcttcaaatatctactcatcttcctaattaccatactaatcttagttaccgctaacaacctattccaactgttcatcggctgagagggcgtaggaattatatccttcttgctcatcagttgatgatacgcccgagcagatgccaacacagcagccattcaagcaatcctatacaaccgtatcggcgatatcggtttcatcctcgccttagcatgatttatcctacactccaactcatgagacccacaacaaatagcccttctaaacgctaatccaagcctcaccccactactaggcctcctcctagcagcagcaggcaaatcagcccaattaggtctccacccctgactcccctcagccatagaaggccccaccccagtctcagccctactccactcaagcactatagttgtagcaggaatcttcttactcatccgcttccaccccctagcagaaaatagcccactaatccaaactctaacactatgcttaggcgctatcaccactctgttcgcagcagtctgcgcccttacacaaaatgacatcaaaaaaatcgtagccttctccacttcaagtcaactaggactcataatagttacaatcggcatcaaccaaccacacctagcattcctgcacatctgtacccacgccttcttcaaagccatactatttatgtgctccgggtccatcatccacaaccttaacaatgaacaagatattcgaaaaataggaggactactcaaaaccatacctctcacttcaacctccctcaccattggcagcctagcattagcaggaatacctttcctcacaggtttctactccaaagaccacatcatcgaaaccgcaaacatatcatacacaaacgcctgagccctatctattactctcatcgctacctccctgacaagcgcctatagcactcgaataattcttctcaccctaacaggtcaacctcgcttccccacccttactaacattaacgaaaataaccccaccctactaaaccccattaaacgcctggcagccggaagcctattcgcaggatttctcattactaacaacatttcccccgcatcccccttccaaacaacaatccccctctacctaaaactcacagccctcgctgtcactttcctaggacttctaacagccctagacctcaactacctaaccaacaaacttaaaataaaatccccactatgcacattttatttctccaacatactcggattctaccctagcatcacacaccgcacaatcccctatctaggccttcttacgagccaaaacctgcccctactcctcctagacctaacctgactagaaaagctattacctaaaacaatttcacagcaccaaatctccacctccatcatcacctcaacccaaaaaggcataattaaactttacttcctctctttcttcttcccactcatcctaaccctactcctaatcacataacctattcccccgagcaatctcaattacaatatatacaccaacaaacaatgttcaaccagtaactactactaatcaacgcccataatcatacaaagcccccgcaccaataggatcctcccgaatcaaccctgacccctctccttcataaattattcagcttcctacactattaaagtttaccacaaccaccaccccatcatactctttcacccacagcaccaatcctacctccatcgctaaccccactaaaacactcaccaagacctcaacccctgacccccatgcctcaggatactcctcaatagccatcgctgtagtatatccaaagacaaccatcattccccctaaataaattaaaaaaactattaaacccatataacctcccccaaaattcagaataataacacacccgaccacaccgctaacaatcaatactaaacccccataaataggagaaggcttagaagaaaaccccacaaaccccattactaaacccacactcaacagaaacaaagcatacatcattattctcgcacggactacaaccacgaccaatgatatgaaaaaccatcgttgtatttcaactacaagaacaccaatgaccccaatacgcaaaatcaaccccctaataaaattaattaaccactcattcatcgacctccccaccccatccaacatctccgcatgatgaaacttcggctcactccttggcgcctgcctgatcctccaaatcaccacaggactattcctagccatgcactactcaccagacgcctcaaccgccttttcatcaatcgcccacatcactcgagacgtaaattatggctgaatcatccgctaccttcacgccaatggcgcctcaatattctttatctgcctcttcctacacatcgggcgaggcctatattacggatcatttctctactcagaaacctgaaacatcggcattatcctcctgcttgcaactatagcaacagccttcataggctatgtcctcccgtgaggccaaatatcattctgaggggccacagtaattacaaacttactatccgccatcccatacattgggacagacctagttcaatgaatctgaggaggctactcagtagacagtcccaccctcacacgattctttacctttcacttcatcttgcccttcattattgcagccctagcagcactccacctcctattcttgcacgaaacgggatcaaacaaccccctaggaatcacctcccattccgataaaatcaccttccacccttactacacaatcaaagacgccctcggcttacttctcttccttctctccttaatgacattaacactattctcaccagacctcctaggcgacccagacaattataccctagccaaccccttaaacacccctccccacatcaagcccgaatgatatttcctattcgcctacacaattctccgatccgtccctaacaaactaggaggcgtccttgccctattactatccatcctcatcctagcaataatccccatcctccatatatccaaacaacaaagcataatatttcgcccactaagccaatcactttattgactcctagccgcagacctcctcattctaacctgaatcggaggacaaccagtaagctacccttttaccatcattggacaagtagcatccgtactatacttcacaacaatcctaatcctaataccaactatctccctaattgaaaacaaaatactcaaatgggcctgtccttgtagtataaactaatacaccagtcttgtaaaccggagatgaaaacctttttccaaggacaaatcagagaaaaagtctttaactccaccattagcacccaaagctaagattctaatttaaactattctctgttctttcatggggaagcagatttgggtaccacccaagtattgactcacccatcaacaaccgctatgtatttcgtacattactgccagccaccatgaatattgtacggtaccataaatacttgaccacctgtagtacataaaaacctaatccacatcaaaaccccctccccatgcttacaagcaagtacagcaattaaccctcaactatcacacatcaactgcaactccaaagccacccctcacccactaggataccaacaaacctacccacccttaacagtacatagtacataaagtcatttaccgtacatagcacattacagtcaaatcccttctcgtccccatggatgacccccctcagataggggtcccttgaccaccatcctccgtgaaatcaatatcccgcacaagagtgctactctcctcgctccgggcccataacacttgggggtagctaaagtgaactgtatccgacatctggttcctacttcagggccataaagcctaaatagcccacacgttccccttaaataagacatcacgatg

SEQ ID NO: 457 - DNA, 16570 bp, Homo sapiens mitochondrial
  3108: "n" refers to a nucleotide at position 3107 of the Cambridge Reference Sequence (CRS, Anderson et al. 1981 Nature 290:457-465), later determined to be absent from the human mtDNA sequence according to the revised CRS (rCRS, Andrews et al. 1999 Nature Genetics 23:147); "n" therefore represents a single nucleotide deletion at a position corresponding to nucleotide 3107 of SEQ ID NO:1 as provided herein.
gatcacaggtctatcaccctattaaccactcacgggagctctccatgcatttggtattttcgtctggggggtatgcacgcgatagcattgcgagacgctggagccggagcaccctatgtcgcagtatctgtctttgattcctgcctcatcctattatttatcgcacctacgttcaatattacaggcgaacatacttactaaagtgtgttaattaattaatgcttgtaggacataataataacaattgaatgtctgcacagccgctttccacacagacatcataacaaaaaatttccaccaaaccccccctcccccgccttctggccacagcacttaaacacatctctgccaaaccccaaaaacaaagaaccctaacaccagcctaaccagatttcaaattttatcttttggcggtatgcacttttaacagtcaccccccaactaacacattattttcccctcccactcccatactactaatctcatcaatacaacccccgcccatcctacccagcacacacacaccgctgctaaccccataccccgaaccaaccaaaccccaaagacaccccccacagtttatgtagcttacctcctcaaagcaatacactgaaaatgtttagacgggctcacatcaccccataaacaaataggtttggtcctagcctttctattagctcttagtaagattacacatgcaagcatccccgttccagtgagttcaccctctaaatcaccacgatcaaaagggacaagcatcaagcacgcagcaatgcagctcaaaacgcttagcctagccacacccccacgggaaacagcagtgattaacctttagcaataaacgaaagtttaactaagctatactaaccccagggttggtcaatttcgtgccagccaccgcggtcacacgattaacccaagtcaatagaagccggcgtaaagagtgttttagatcaccccctccccaataaagctaaaactcacctgagttgtaaaaaactccagttgacacaaaatagactacgaaagtggctttaacatatctgaacacacaatagctaagacccaaactgggattagataccccactatgcttagccctaaacctcaacagttaaatcaacaaaactgctcgccagaacactacgagccacagcttaaaactcaaaggacctggcggtgcttcatatccctctagaggagcctgttctgtaatcgataaaccccgatcaacctcaccacctcttgctcagcctatataccgccatcttcagcaaaccctgatgaaggctacaaagtaagcgcaagtacccacgtaaagacgttaggtcaaggtgtagcccatgaggtggcaagaaatgggctacattttctaccccagaaaactacgatagcccttatgaaacttaagggtcgaaggtggatttagcagtaaactaagagtagagtgcttagttgaacagggccctgaagcgcgtacacaccgcccgtcaccctcctcaagtatacttcaaaggacatttaactaaaacccctacgcatttatatagaggagacaagtcgtaacatggtaagtgtactggaaagtgcacttggacgaaccagagtgtagcttaacacaaagcacccaacttacacttaggagatttcaacttaacttgaccgctctgagctaaacctagccccaaacccactccaccttactaccagacaaccttagccaaaccatttacccaaataaagtataggcgatagaaattgaaacctggcgcaatagatatagtaccgcaagggaaagatgaaaaattataaccaagcataatatagcaaggactaacccctataccttctgcataatgaattaactagaaataactttgcaaggagagccaaagctaagacccccgaaaccagacgagctacctaagaacagctaaaagagcacacccgtctatgtagcaaaatagtgggaagatttataggtagaggcgacaaacctaccgagcctggtgatagctggttgtccaagatagaatcttagttcaactttaaatttgcccacagaaccctctaaatccccttgtaaatttaactgttagtccaaagaggaacagctctttggacactaggaaaaaaccttgtagagagagtaaaaaatttaacacccatagtaggcctaaaagcagccaccaattaagaaagcgttcaagctcaacacccactacctaaaaaatcccaaacatataactgaactcctcacacccaattggaccaatctatcaccctatagaagaactaatgttagtataagtaacatgaaaacattctcctccgcataagcctgcgtcagattaaaacactgaactgacaattaacagcccaatatctacaatcaaccaacaagtcattattaccctcactgtcaacccaacacaggcatgctcataaggaaaggttaaaaaaagtaaaaggaactcggcaaatcttaccccgcctgtttaccaaaaacatcacctctagcatcaccagtattagaggcaccgcctgcccagtgacacatgtttaacggccgcggtaccctaaccgtgcaaaggtagcataatcacttgttccttaaatagggacctgtatgaatggctccacgagggttcagctgtctcttacttttaaccagtgaaattgacctgcccgtgaagaggcgggcataacacagcaagacgagaagaccctatggagctttaatttattaatgcaaacagtacctaacaaacccacaggtcctaaactaccaaacctgcattaaaaatttcggttggggcgacctcggagcagaacccaacctccgagcagtacatgctaagacttcaccagtcaaagcgaactactatactcaattgatccaataacttgaccaacggaacaagttaccctagggataacagcgcaatcctattctagagtccatatcaacaatagggtttacgacctcgatgttggatcaggacatcccgatggtgcagccgctattaaaggttcgtttgttcaacgattaaagtcctacgtgatctgagttcagaccggagtaatccaggtcggtttctatctacnttcaaattcctccctgtacgaaaggacaagagaaataaggcctacttcacaaagcgccttcccccgtaaatgatatcatctcaacttagtattatacccacacccacccaagaacagggtttgttaagatggcagagcccggtaatcgcataaaacttaaaactttacagtcagaggttcaattcctcttcttaacaacatacccatggccaacctcctactcctcattgtacccattctaatcgcaatggcattcctaatgcttaccgaacgaaaaattctaggctatatacaactacgcaaaggccccaacgttgtaggcccctacgggctactacaacccttcgctgacgccataaaactcttcaccaaagagcccctaaaacccgccacatctaccatcaccctctacatcaccgccccgaccttagctctcaccatcgctcttctactatgaacccccctccccatacccaaccccctggtcaacctcaacctaggcctcctatttattctagccacctctagcctagccgtttactcaatcctctgatcagggtgagcatcaaactcaaactacgccctgatcggcgcactgcgagcagtagcccaaacaatctcatatgaagtcaccctagccatcattctactatcaacattactaataagtggctcctttaacctctccacccttatcacaacacaagaacacctctgattactcctgccatcatgacccttggccataatatgatttatctccacactagcagagaccaaccgaacccccttcgaccttgccgaaggggagtccgaactagtctcaggcttcaacatcgaatacgccgcaggccccttcgccctattcttcatagccgaatacacaaacattattataataaacaccctcaccactacaatcttcctaggaacaacatatgacgcactctcccctgaactctacacaacatattttgtcaccaagaccctacttctaacctccctgttcttatgaattcgaacagcatacccccgattccgctacgaccaactcatacacctcctatgaaaaaacttcctaccactcaccctagcattacttatatgatatgtctccatacccattacaatctccagcattccccctcaaacctaagaaatatgtctgataaaagagttactttgatagagtaaataataggagcttaaacccccttatttctaggactatgagaatcgaacccatccctgagaatccaaaattctccgtgccacctatcacaccccatcctaaagtaaggtcagctaaataagctatcgggcccataccccgaaaatgttggttatacccttcccgtactaattaatcccctggcccaacccgtcatctactctaccatctttgcaggcacactcatcacagcgctaagctcgcactgattttttacctgagtaggcctagaaataaacatgctagcttttattccagttctaaccaaaaaaataaaccctcgttccacagaagctgccatcaagtatttcctcacgcaagcaaccgcatccataatccttctaatagctatcctcttcaacaatatactctccggacaatgaaccataaccaatactaccaatcaatactcatcattaataatcataatagctatagcaataaaactaggaatagccccctttcacttctgagtcccagaggttacccaaggcacccctctgacatccggcctgcttcttctcacatgacaaaaactagcccccatctcaatcatataccaaatctctccctcactaaacgtaagccttctcctcactctctcaatcttatccatcatagcaggcagttgaggtggattaaaccaaacccagctacgcaaaatcttagcatactcctcaattacccacataggatgaataatagcagttctaccgtacaaccctaacataaccattcttaatttaactatttatattatcctaactactaccgcattcctactactcaacttaaactccagcaccacgaccctactactatctcgcacctgaaacaagctaacatgactaacacccttaattccatccaccctcctctccctaggaggcctgcccccgctaaccggctttttgcccaaatgggccattatcgaagaattcacaaaaaacaatagcctcatcatccccaccatcatagccaccatcaccctccttaacctctacttctacctacgcctaatctactccacctcaatcacactactccccatatctaacaacgtaaaaataaaatgacagtttgaacatacaaaacccaccccattcctccccacactcatcgcccttaccacgctactcctacctatctccccttttatactaataatcttatagaaatttaggttaaatacagaccaagagccttcaaagccctcagtaagttgcaatacttaatttctgtaacagctaaggactgcaaaaccccactctgcatcaactgaacgcaaatcagccactttaattaagctaagcccttactagaccaatgggacttaaacccacaaacacttagttaacagctaagcaccctaatcaactggcttcaatctacttctcccgccgccgggaaaaaaggcgggagaagccccggcaggtttgaagctgcttcttcgaatttgcaattcaatatgaaaatcacctcggagctggtaaaaagaggcctaacccctgtctttagatttacagtccaatgcttcactcagccattttacctcacccccactgatgttcgccgaccgttgactattctctacaaaccacaaagacattggaacactatacctattattcggcgcatgagctggagtcctaggcacagctctaagcctccttattcgagccgagctgggccagccaggcaaccttctaggtaacgaccacatctacaacgttatcgtcacagcccatgcatttgtaataatcttcttcatagtaatacccatcataatcggaggctttggcaactgactagttcccctaataatcggtgcccccgatatggcgtttccccgcataaacaacataagcttctgactcttacctccctctctcctactcctgctcgcatctgctatagtggaggccggagcaggaacaggttgaacagtctaccctcccttagcagggaactactcccaccctggagcctccgtagacctaaccatcttctccttacacctagcaggtgtctcctctatcttaggggccatcaatttcatcacaacaattatcaatataaaaccccctgccataacccaataccaaacgcccctcttcgtctgatccgtcctaatcacagcagtcctacttctcctatctctcccagtcctagctgctggcatcactatactactaacagaccgcaacctcaacaccaccttcttcgaccccgccggaggaggagaccccattctataccaacacctattctgatttttcggtcaccctgaagtttatattcttatcctaccaggcttcggaataatctcccatattgtaacttactactccggaaaaaaagaaccatttggatacataggtatggtctgagctatgatatcaattggcttcctagggtttatcgtgtgagcacaccatatatttacagtaggaatagacgtagacacacgagcatatttcacctccgctaccataatcatcgctatccccaccggcgtcaaagtatttagctgactcgccacactccacggaagcaatatgaaatgatctgctgcagtgctctgagccctaggattcatctttcttttcaccgtaggtggcctgactggcattgtattagcaaactcatcactagacatcgtactacacgacacgtactacgttgtagcccacttccactatgtcctatcaataggagctgtatttgccatcataggaggcttcattcactgatttcccctattctcaggctacaccctagaccaaacctacgccaaaatccatttcactatcatattcatcggcgtaaatctaactttcttcccacaacactttctcggcctatccggaatgccccgacgttactcggactaccccgatgcatacaccacatgaaacatcctatcatctgtaggctcattcatttctctaacagcagtaatattaataattttcatgatttgagaagccttcgcttcgaagcgaaaagtcctaatagtagaagaaccctccataaacctggagtgactatatggatgccccccaccctaccacacattcgaagaacccgtatacataaaatctagacaaaaaaggaaggaatcgaaccccccaaagctggtttcaagccaaccccatggcctccatgactttttcaaaaaggtattagaaaaaccatttcataactttgtcaaagttaaattataggctaaatcctatatatcttaatggcacatgcagcgcaagtaggtctacaagacgctacttcccctatcatagaagagcttatcacctttcatgatcacgccctcataatcattttccttatctgcttcctagtcctgtatgcccttttcctaacactcacaacaaaactaactaatactaacatctcagacgctcaggaaatagaaaccgtctgaactatcctgcccgccatcatcctagtcctcatcgccctcccatccctacgcatcctttacataacagacgaggtcaacgatccctcccttaccatcaaatcaattggccaccaatggtactgaacctacgagtacaccgactacggcggactaatcttcaactcctacatacttcccccattattcctagaaccaggcgacctgcgactccttgacgttgacaatcgagtagtactcccgattgaagcccccattcgtataataattacatcacaagacgtcttgcactcatgagctgtccccacattaggcttaaaaacagatgcaattcccggacgtctaaaccaaaccactttcaccgctacacgaccgggggtatactacggtcaatgctctgaaatctgtggagcaaaccacagtttcatgcccatcgtcctagaattaattcccctaaaaatctttgaaatagggcccgtatttaccctatagcaccccctctaccccctctagagcccactgtaaagctaacttagcattaaccttttaagttaaagattaagagaaccaacacctctttacagtgaaatgccccaactaaatactaccgtatggcccaccataattacccccatactccttacactattcctcatcacccaactaaaaatattaaacacaaactaccacctacctccctcaccaaagcccataaaaataaaaaattataacaaaccctgagaaccaaaatgaacgaaaatctgttcgcttcattcattgcccccacaatcctaggcctacccgccgcagtactgatcattctatttccccctctattgatccccacctccaaatatctcatcaacaaccgactaatcaccacccaacaatgactaatcaaactaacctcaaaacaaatgataaccatacacaacactaaaggacgaacctgatctcttatactagtatccttaatcatttttattgccacaactaacctcctcggactcctgcctcactcatttacaccaaccacccaactatctataaacctagccatggccacccccttatgagcgggcgcagtgattataggctttcgctctaagattaaaaatgccctagcccacttcttaccacaaggcacacctacaccccttatccccatactagttattatcgaaaccatcagcctactcattcaaccaatagccctggccgtacgcctaaccgctaacattactgcaggccacctactcatgcacctaattggaagcgccaccctagcaatatcaaccattaaccttccctctacacttatcatcttcacaattctaattctactgactatcctagaaatcgctgtcgccttaatccaagcctacgttttcacacttctagtaagcctctacctgcacgacaacacataatgacccaccaatcacatgcctatcatatagtaaaacccagcccatgacccctaacaggggccctctcagccctcctaatgacctccggcctagccatgtgatttcacttccactccataacgctcctcatactaggcctactaaccaacacactaaccatataccaatgatggcgcgatgtaacacgagaaagcacataccaaggccaccacacaccacctgtccaaaaaggccttcgatacgggataatcctatttattacctcagaagtttttttcttcgcaggatttttctgagccttttaccactccagcctagcccctaccccccaattaggagggcactggcccccaacaggcatcaccccgctaaatcccctagaagtcccactcctaaacacatccgtattactcgcatcaggagtatcaatcacctgagctcaccatagtctaatagaaaacaaccgaaaccaaataattcaagcactgcttattacaattttactgggtctctattttaccctcctacaagcctcagagtacttcgagtctcccttcaccatttccgacggcatctacggctcaacattttttgtagccacaggcttccacggacttcacgtcattattggctcaactttcctcactatctgcttcatccgccaactaatatttcactttacatccaaacatcactttggcttcgaagccgccgcctgatactggcattttgtagatgtggtttgactatttctgtatgtctccatctattgatgagggtcttactcttttagtataaatagtaccgttaacttccaattaactagttttgacaacattcaaaaaagagtaataaacttcgccttaattttaataatcaacaccctcctagccttactactaataattattacattttgactaccacaactcaacggctacatagaaaaatccaccccttacgagtgcggcttcgaccctatatcccccgcccgcgtccctttctccataaaattcttcttagtagctattaccttcttattatttgatctagaaattgccctccttttacccctaccatgagccctacaaacaactaacctgccactaatagttatgtcatccctcttattaatcatcatcctagccctaagtctggcctatgagtgactacaaaaaggattagactgaaccgaattggtatatagtttaaacaaaacgaatgatttcgactcattaaattatgataatcatatttaccaaatgcccctcatttacataaatattatactagcatttaccatctcacttctaggaatactagtatatcgctcacacctcatatcctccctactatgcctagaaggaataatactatcgctgttcattatagctactctcataaccctcaacacccactccctcttagccaatattgtgcctattgccatactagtctttgccgcctgcgaagcagcggtgggcctagccctactagtctcaatctccaacacatatggcctagactacgtacataacctaaacctactccaatgctaaaactaatcgtcccaacaattatattactaccactgacatgactttccaaaaaacacataatttgaatcaacacaaccacccacagcctaattattagcatcatccctctactattttttaaccaaatcaacaacaacctatttagctgttccccaaccttttcctccgaccccctaacaacccccctcctaatactaactacctgactcctacccctcacaatcatggcaagccaacgccacttatccagtgaaccactatcacgaaaaaaactctacctctctatactaatctccctacaaatctccttaattataacattcacagccacagaactaatcatattttatatcttcttcgaaaccacacttatccccaccttggctatcatcacccgatgaggcaaccagccagaacgcctgaacgcaggcacatacttcctattctacaccctagtaggctcccttcccctactcatcgcactaatttacactcacaacaccctaggctcactaaacattctactactcactctcactgcccaagaactatcaaactcctgagccaacaacttaatatgactagcttacacaatagcttttatagtaaagatacctctttacggactccacttatgactccctaaagcccatgtcgaagcccccatcgctgggtcaatagtacttgccgcagtactcttaaaactaggcggctatggtataatacgcctcacactcattctcaaccccctgacaaaacacatagcctaccccttccttgtactatccctatgaggcataattataacaagctccatctgcctacgacaaacagacctaaaatcgctcattgcatactcttcaatcagccacatagccctcgtagtaacagccattctcatccaaaccccctgaagcttcaccggcgcagtcattctcataatcgcccacgggcttacatcctcattactattctgcctagcaaactcaaactacgaacgcactcacagtcgcatcataatcctctctcaaggacttcaaactctactcccactaatagctttttgatgacttctagcaagcctcgctaacctcgccttaccccccactattaacctactgggagaactctctgtgctagtaaccacgttctcctgatcaaatatcactctcctacttacaggactcaacatactagtcacagccctatactccctctacatatttaccacaacacaatggggctcactcacccaccacattaacaacataaaaccctcattcacacgagaaaacaccctcatgttcatacacctatcccccattctcctcctatccctcaaccccgacatcattaccgggttttcctcttgtaaatatagtttaaccaaaacatcagattgtgaatctgacaacagaggcttacgaccccttatttaccgagaaagctcacaagaactgctaactcatgcccccatgtctaacaacatggctttctcaacttttaaaggataacagctatccattggtcttaggccccaaaaattttggtgcaactccaaataaaagtaataaccatgcacactactataaccaccctaaccctgacttccctaattccccccatccttaccaccctcgttaaccctaacaaaaaaaactcatacccccattatgtaaaatccattgtcgcatccacctttattatcagtctcttccccacaacaatattcatgtgcctagaccaagaagttattatctcgaactgacactgagccacaacccaaacaacccagctctccctaagcttcaaactagactacttctccataatattcatccctgtagcattgttcgttacatggtccatcatagaattctcactgtgatatataaactcagacccaaacattaatcagttcttcaaatatctactcatcttcctaattaccatactaatcttagttaccgctaacaacctattccaactgttcatcggctgagagggcgtaggaattatatccttcttgctcatcagttgatgatacgcccgagcagatgccaacacagcagccattcaagcaatcctatacaaccgtatcggcgatatcggtttcatcctcgccttagcatgatttatcctacactccaactcatgagacccacaacaaatagcccttctaaacgctaatccaagcctcaccccactactaggcctcctcctagcagcagcaggcaaatcagcccaattaggtctccacccctgactcccctcagccatagaaggccccaccccagtctcagccctactccactcaagcactatagttgtagcaggaatcttcttactcatccgcttccaccccctagcagaaaatagcccactaatccaaactctaacactatgcttaggcgctatcaccactctgttcgcagcagtctgcgcccttacacaaaatgacatcaaaaaaatcgtagccttctccacttcaagtcaactaggactcataatagttacaatcggcatcaaccaaccacacctagcattcctgcacatctgtacccacgccttcttcaaagccatactatttatgtgctccgggtccatcatccacaaccttaacaatgaacaagatattcgaaaaataggaggactactcaaaaccatacctctcacttcaacctccctcaccattggcagcctagcattagcaggaatacctttcctcacaggtttctactccaaagaccacatcatcgaaaccgcaaacatatcatacacaaacgcctgagccctatctattactctcatcgctacctccctgacaagcgcctatagcactcgaataattcttctcaccctaacaggtcaacctcgcttccccacccttactaacattaacgaaaataaccccaccctactaaaccccattaaacgcctgacagccggaagcctattcgcaggatttctcattactaacaacatttcccccgcatcccccttccaaacaacaatccccctctacctaaaactcacagccctcgctgtcactttcctaggacttctaacagccctagacctcaactacctaaccaacaaacttaaaataaaatccccactatgcacattttatttctccaacatactcggattctaccctagcatcacacaccgcacaatcccctatctaggccttcttacgagccaaaacctgcccctactcctcctagacctaacctgactagaaaagctattacctaaaacaatttcacagcaccaaatctccacctccatcatcacctcaacccaaaaaggcataattaaactttacttcctctctttcttcttcccactcatcctaaccctactcctaatcacataacctattcccccgagcaatctcaattacaatatatacaccaacaaacaatgttcaaccagtaactactactaatcaacgcccataatcatacaaagcccccgcaccaataggatcctcccgaatcaaccctgacccctctccttcataaattattcagcttcctacactattaaagtttaccacaaccaccaccccatcatactctttcacccacagcaccaatcctacctccatcgctaaccccactaaaacactcaccaagacctcaacccctgacccccatgcctcaggatactcctcaatagccatcgctgtagtatatccaaagacaaccatcattccccctaaataaattaaaaaaactattaaacccatataacctcccccaaaattcagaataataacacacccgaccacaccgctaacaatcaatactaaacccccataaataggagaaggcttagaagaaaaccccacaaaccccattactaaacccacactcaacagaaacaaagcatacatcattattctcgcacggactacaaccacgaccaatgatatgaaaaaccatcgttgtatttcaactacaagaacaccaatgaccccaatacgcaaaactaaccccctaataaaattaattaaccactcattcatcgacctccccaccccatccaacatctccgcatgatgaaacttcggctcactccttggcgcctgcctgatcctccaaatcaccacaggactattcctagccatgcactactcaccagacgcctcaaccgccttttcatcaatcgcccacatcactcgagacgtaaattatggctgaatcatccgctaccttcacgccaatggcgcctcaatattctttatctgcctcttcctacacatcgggcgaggcctatattacggatcatttctctactcagaaacctgaaacatcggcattatcctcctgcttgcaactatagcaacagccttcataggctatgtcctcccgtgaggccaaatatcattctgaggggccacagtaattacaaacttactatccgccatcccatacattgggacagacctagttcaatgaatctgaggaggctactcagtagacagtcccaccctcacacgattctttacctttcacttcatcttgcccttcattattgcagccctagcagcactccacctcctattcttgcacgaaacgggatcaaacaaccccctaggaatcacctcccattccgataaaatcaccttccacccttactacacaatcaaagacgccctcggcttacttctcttccttctctccttaatgacattaacactattctcaccagacctcctaggcgacccagacaattataccctagccaaccccttaaacacccctccccacatcaagcccgaatgatatttcctattcgcctacacaattctccgatccgtccctaacaaactaggaggcgtccttgccctattactatccatcctcatcctagcaataatccccatcctccatatatccaaacaacaaagcataatatttcgcccactaagccaatcactttattgactcctagccgcagacctcctcattctaacctgaatcggaggacaaccagtaagctacccttttaccatcattggacaagtagcatccgtactatacttcacaacaatcctaatcctaataccaactatctccctaattgaaaacaaaatactcaaatgggcctgtccttgtagtataaactaatacaccagtcttgtaaaccggagatgaaaacctttttccaaggacaaatcagagaaaaagtctttaactccaccattagcacccaaagctaagattctaatttaaactattctctgttctttcatggggaagcagatttgggtaccacccaagtattgactcacccatcaacaaccgctatgtatttcgtacattactgccagccaccatgaatattgtacggtaccataaatacttgaccacctgtagtacataaaaacccaatccacatcaaaaccccctccccatgcttacaagcaagtacagcaatcaaccctcaactatcacacatcaactgcaactccaaagccacccctcacccactaggataccaacaaacctacccacccttaacagtacatggtacataaagccatttaccgtacatagcacattacagtcaaatcccttctcgtccccatggatgacccccctcagataggggtcccttgaccaccatcctccgtgaaatcaatatcccgcacaagagtgctactctcctcgctccgggcccataacacttgggggtagctaaagtgaactgtatccgacatctggttcctacttcagggccataaagcctaaatagcccacacgttccccttaaataagacatcacgatg

SEQ ID NO: 458 - DNA, 16570 bp, Homo sapiens mitochondrial
  3108: "n" refers to a nucleotide at position 3107 of the Cambridge Reference Sequence (CRS, Anderson et al. 1981 Nature 290:457-465), later determined to be absent from the human mtDNA sequence according to the revised CRS (rCRS, Andrews et al. 1999 Nature Genetics 23:147); "n" therefore represents a single nucleotide deletion at a position corresponding to nucleotide 3107 of SEQ ID NO:1 as provided herein.
gatcacaggtctatcaccctattaaccactcacgggagctctccatgcatttggtattttcgtctggggggtgtgcacgcgatagcattgcgagacgctggagccggagcaccctatgtcgcagtatctgtctttgattcctgccccatcctattatttatcgcacctacgttcaatattacaggcgaacatacttactaaagtgtgttaattaattaatgcttgtaggacataataataacaattgaatgtctgcacagccgctttccacacagacatcataacaaaaaatttccaccaaaccccccctcccccgccttctggccacagcacttaaacacatctctgccaaaccccaaaaacaaagaaccctaacaccagcctaaccagatttcaaattttatcttttggcggtatgcacttttaacagtcaccccccaactaacacattattttcccctcccactcccatactactaatctcatcaatacaacccccgcccatcctacccagcacacacacaccgctgctaaccccataccccgaaccaaccaaaccccaaagacaccccccacagtttatgtagcttacctcctcaaagcaatacactgaaaatgtttagacgggctcacatcaccccataaacaaataggtttggtcctagcctttctattagctcttagtaagattacacatgcaagcatccccgttccagtgagttcaccctctaaatcaccacgatcaaaagggacaagcatcaagcacgcagcaatgcagctcaaaacgcttagcctagccacacccccacgggaaacagcagtgattaacctttagcaataaacgaaagtttaactaagctatactaaccccagggttggtcaatttcgtgccagccaccgcggtcacacgattaacccaagtcaatagaagccggcgtaaagagtgttttagatcaccccctccccaataaagctaaaactcacctgagttgtaaaaaactccagttgacacaaaatagactacgaaagtggctttaacatatctgaacacacaatagctaagacccaaactgggattagataccccactatgcttagccctaaacctcaacagttaaatcaacaaaactgctcgccagaacactacgagccacagcttaaaactcaaaggacctggcggtgcttcatatccctctagaggagcctgttctgtaatcgataaaccccgatcaacctcaccacctcttgctcagcctatataccgccatcttcagcaaaccctgatgaaggctacaaagtaagcgcaagtacccacgtaaagacgttaggtcaaggtgtagcccatgaggtggcaagaaatgggctacattttctaccccagaaaactacgatagcccttatgaaacttaagggtcgaaggtggatttagcagtaaactgagagtagagtgcttagttgaacagggccctgaagcgcgtacacaccgcccgtcaccctcctcaagtatacttcaaaggacatttaactaaaacccctacgcatttatatagaggagacaagtcgtaacatggtaagtgtactggaaagtgcacttggacgaaccagagtgtagcttaacacaaagcacccaacttacacttaggagatttcaacttaacttgaccgctctgagctaaacctagccccaaacccactccaccttactaccagacaaccttagccaaaccatttacccaaataaagtataggcgatagaaattgaaacctggcgcaatagatatagtaccgcaagggaaagatgaaaaattatagccaagcataatatagcaaggactaacccctataccttctgcataatgaattaactagaaataactttgcaaggagagccaaagctaagacccccgaaaccagacgagctacctaagaacagctaaaagagcacacccgtctatgtagcaaaatagtgggaagatttataggtagaggcgacaaacctaccgagcctggtgatagctggttgtccaagatagaatcttagttcaactttaaatttgcccacagaaccctctaaatccccttgtaaatttaactgttagtccaaagaggaacagctctttggacactaggaaaaaaccttgtagagagagtaaaaaatttaacacccatagtaggcctaaaagcagccaccaattaagaaagcgttcaagctcaacatccactacctaaaaaatcccaaacatataactgaactcctcacacccaattggaccaatctatcaccctatagaagaactaatgttagtataagtaacatgaaaacattctcctccgcataagcctgcgtcagattaaaacactgaactgacaattaacagcccaatatctacaatcaaccaacaagtcattattaccctcactgtcaacccaacacaggcatgctcataaggaaaggttaaaaaaagtaaaaggaactcggcaaatcttaccccgcctgtttaccaaaaacatcacctctagcatcaccagtattagaggcaccgcctgcccagtgacacatgtttaacggccgcggtaccctaaccgtgcaaaggtagcataatcacttgttccttaaatagggacctgtatgaatggctccacgagggttcagctgtctcttacttttaaccagtgaaattgacctgcccgtgaagaggcgggcatgacacagcaagacgagaagaccctatggagctttaatttattaatgcaaacagtacctaacaaacccacaggtcctaaactaccaaacctgcattaaaaatttcggttggggcgacctcggagcagaacccaacctccgagcagtacatgctaagacttcaccagtcaaagcgaactactatactcaattgatccaataacttgaccaacggaacaagttaccctagggataacagcgcaatcctattctagagtccatatcaacaatagggtttacgacctcgatgttggatcaggacatcccgatggtgcagccgctattaaaggttcgtttgttcaacgattaaagtcctacgtgatctgagttcagaccggagtaatccaggtcggtttctatctacnttcaaattcctccctgtacgaaaggacaagagaaataaggcctacttcacaaagcgccttcccccgtaaatgatatcatctcaacttagtattatacccacacccacccaagaacagggtttgttaagatggcagagcccggtaatcgcataaaacttaaaactttacagtcagaggttcaattcctcttcttaacaacatacccatggccaacctcctactcctcattgtacccattctaatcgcaatggcattcctaatgcttaccgaacgaaaaattctaggctatatacaactacgcaaaggccccaacgttgtaggcccctacgggctactacaacccttcgctgacgccataaaactcttcaccaaggagcccctaaaacccgccacatctaccatcaccctctacatcaccgccccgaccttagctctcaccatcgctcttctactatgaacccccctccccatacccaaccccctggtcaacctcaacctaggcctcctatttattctagccacctctagcctagccgtttactcaatcctctgatcagggtgagcatcaaactcaaactacgccctgatcggcgcactgcgagcagtagcccaaacaatctcatatgaagtcaccctagccatcattctactatcaacattactaataagtggctcctttaacctctccacccttatcacaacacaagaacacctctgattactcctgccatcatgacccttggccataatatgatttatctccacactagcagagaccaaccgaacccccttcgaccttgccgaaggggagtccgaactagtctcaggcttcaacatcgaatacgccgcaggccccttcgccctattcttcatagccgaatacacaaacattattataataaacaccctcaccactacaatcttcctaggaacaacatatgacgcactctcccctgaactctacacaacatattttgtcaccaagaccctacttctaacctccctgttcttatgaattcgaacagcatacccccgattccgctacgaccaactcatacacctcctatgaaaaaacttcctaccactcaccctagcattacttatatgatatgtctccatacccattacaatctccagcattccccctcaaacctaagaaatatgtctgataaaagagttactttgatagagtaaataataggagcttaaacccccttatttctaggactatgagaatcgaacccatccctgagaatccaaaattctccgtgccacctatcacaccccatcctaaagtaaggtcagctaaataagctatcgggcccataccccgaaaatgttggttatacccttcccgtactaattaatcccctggcccaacccgtcatctactctaccatctttgcaggcacactcatcacagcgctaagctcgcactgattttttacctgagtaggcctagaaataaacatgctagcttttattccagttctaaccaaaaaaataaaccctcgttccacagaagctgccatcaagtatttcctcacgcaagcaaccgcatccataatccttctaatagctatcctcttcaacaatatactctccggacaatgaaccataaccaatactaccaatcaatactcatcattaataatcataatggctatagcaataaaactaggaatagccccctttcacttctgagtcccagaggttacccaaggcacccctctgacatccggcctgcttcttctcacatgacaaaaactagcccccatctcaatcatataccaaatctctccctcactaaacgtaagccttctcctcactctctcaatcttatccatcatagcaggcagttgaggtggattaaaccaaacccagctacgcaaaatcttagcatactcctcaattacccacataggatgaataatagcagttctaccgtacaaccctaacataaccattcttaatttaactatttatattatcctaactactaccgcattcctactactcaacttaaactccagcaccacgaccctactactatctcgcacctgaaacaagctaacatgactaacacccttaattccatccaccctcctctccctaggaggcctacccccgctaaccggctttttgcccaaatgggccattatcgaagaattcacaaaaaacaatagcctcatcatccccaccatcatagccaccatcaccctccttaacctctacttctacctacgcctaatctactccacctcaatcacactactccccatatctaacaacgtaaaaataaaatgacagtttgaacatacaaaacccaccccattcctccccacactcatcgcccttaccacgctactcctacctatctccccttttatactaataatcttatagaaatttaggttaaatacagaccaagagccttcaaagccctcagtaagttgcaatacttaatttctgtaacagctaaggactgcaaaaccccactctgcatcaactgaacgcaaatcagccactttaattaagctaagcccttactagaccaatgggacttaaacccacaaacacttagttaacagctaagcaccctaatcaactggcttcaatctacttctcccgccgccgggaaaaaaggcgggagaagccccggcaggtttgaagctgcttcttcgaatttgcaattcaatatgaaaatcacctcggagctggtaaaaagaggcctaacccctgtctttagatttacagtccaatgcttcactcagccattttacctcacccccactgatgttcgccgaccgttgactattctctacaaaccacaaagacattggaacactatacctattattcggcgcatgagctggagtcctaggcacagctctaagcctccttattcgagccgagctgggccagccaggcaaccttctaggtaacgaccacatctacaacgttatcgtcacagcccatgcatttgtaataatcttcttcatagtaatacccatcataatcggaggctttggcaactgactagttcccctaataatcggtgcccccgatatggcgtttccccgcataaacaacataagcttctgactcttacctccctctctcctactcctgctcgcatctgctatagtggaggccggagcaggaacaggttgaacagtctaccctcccttagcagggaactactcccaccctggagcctccgtagacctaaccatcttctccttacacctagcaggtgtctcctctatcttaggggccatcaatttcatcacaacaattatcaatataaaaccccctgccataacccaataccaaacgcccctcttcgtctgatccgtcctaatcacagcagtcctacttctcctatctctcccagtcctagctgctggcatcactatactactaacagaccgcaacctcaacaccaccttcttcgaccccgccggaggaggagaccccattctataccaacacctattctgatttttcggtcaccctgaagtttatattcttatcctaccaggcttcggaataatctcccatattgtaacttactactccggaaaaaaagaaccatttggatacataggtatggtctgagctatgatatcaattggcttcctagggtttatcgtgtgagcacaccatatatttacagtaggaatagacgtagacacacgagcatatttcacctccgctaccataatcatcgctatccccaccggcgtcaaagtatttagctgactcgccacactccacggaagcaatatgaaatgatctgctgcagtgctctgagccctaggattcatctttcttttcaccgtaggtggcctgactggcattgtattagcaaactcatcactagacatcgtactacacgacacgtactacgttgtagctcacttccactatgtcctatcaataggagctgtatttgccatcataggaggcttcattcactgatttcccctattctcaggctacaccctagaccaaacctacgccaaaatccatttcactatcatattcatcggcgtaaatctaactttcttcccacaacactttctcggcctatccggaatgccccgacgttactcggactaccccgatgcatacaccacatgaaacatcctatcatctgtaggctcattcatttctctaacagcagtaatattaataattttcatgatttgagaagccttcgcttcgaagcgaaaagtcctaatagtagaagaaccctccataaacctggagtgactatatggatgccccccaccctaccacacattcgaagaacccgtatacataaaatctagacaaaaaaggaaggaatcgaaccccccaaagctggtttcaagccaaccccatggcctccatgactttttcaaaaaggtattagaaaaaccatttcataactttgtcaaagttaaattataggctaaatcctatatatcttaatggcacatgcagcgcaagtaggtctacaagacgctacttcccctatcatagaagagcttatcacctttcatgatcacgccctcataatcattttccttatctgcttcctagtcctgtatgcccttttcctaacactcacaacaaaactaactaatactaacatctcagacgctcaggaaatagaaaccgtctgaactatcctgcccgccatcatcctagtcctcatcgccctcccatccctacgcatcctttacataacagacgaggtcaacgatccctcccttaccatcaaatcaattggccaccaatggtactgaacctacgagtacaccgactacggcggactaatcttcaactcctacatacttcccccattattcctagaaccaggcgacctgcgactccttgacgttgacaatcgagtagtactcccgattgaagcccccattcgtataataattacatcacaagacgtcttgcactcatgagctgtccccacattaggcttaaaaacagatgcaattcccggacgtctaaaccaaaccactttcaccgctacacgaccgggggtatactacggtcaatgctctgaaatctgtggagcaaaccacagtttcatgcccatcgtcctagaattaattcccctaaaaatctttgaaatagggcccgtatttaccctatagcaccccctctaccccctctagagcccactgtaaagctaacttagcattaaccttttaagttaaagattaagagaaccaacacctctttacagtgaaatgccccaactaaatactaccgtatggcccaccataattacccccatactccttacactattcctcatcacccaactaaaaatattaaacacaaactaccacctacctccctcaccaaagcccataaaaataaaaaattataacaaaccctgagaaccaaaatgaacgaaaatctgttcgcttcattcattgcccccacaatcctaggcctacccgccgcagtactgatcattctatttccccctctattgatccccacctccaaatatctcatcaacaaccgactaatcaccacccaacaatgactaatcaaactaacctcaaaacaaatgataaccatacacaacactaaaggacgaacctgatctcttatactagtatccttaatcatttttattgccacaactaacctcctcggactcctgcctcactcatttacaccaaccacccaactatctataaacctagccatggccatccccttatgagcgggcgcagtgattataggctttcgctctaagattaaaaatgccctagcccacttcttaccacaaggcacacctacaccccttatccccatactagttattatcgaaaccatcagcctactcattcaaccaatagccctggccgtacgcctaaccgctaacattactgcaggccacctactcatgcacctaattggaagcaccaccctagcaatatcaaccattaaccttccctctacacttatcatcttcacaattctaattctactgactatcctagaaatcgctgtcgccttaatccaagcctacgttttcacacttctagtaagcctctacctgcacgacaacacataatgacccaccaatcacatgcctatcatatagtaaaacccagcccatgacccctaacaggggccctctcagccctcctaatgacctccggcctagccatgtgatttcacttccactccataacgctcctcatactaggcctactaaccaacacactaaccatataccaatgatggcgcgatgtaacacgagaaagcacataccaaggccaccacacaccacctgtccaaaaaggccttcgatacgggataatcctatttattacctcagaagtttttttcttcgcaggatttttctgagccttttaccactccagcctagcccctaccccccaattaggagggcactggcccccaacaggcatcaccccgctaaatcccctagaagtcccactcctaaacacatccgtattactcgcatcaggagtatcaatcacctgagctcaccatagtctaatagaaaacaaccgaaaccaaataattcaagcactgctcattacaattttactgggcctctattttaccctcctacaagcctcagagtacttcgagtctcccttcaccatttccgacggcatctacggctcaacattttttgtagccacaggcttccacggacttcacgtcattattggctcaactttcctcactatctgcttcatccgccaactaatatttcactttacatccaaacatcactttggcttcgaagccgccgcctgatactggcattttgtagatgtggtttgactatttctgtatgtctccatctattgatgagggtcttactcttttagtataaatagtaccgttaacttccaattaactagttttgacaacattcaaaaaagagtaataaacttcgccttaattttaataatcaacaccctcctagccttactactaataattattacattttgactaccacaactcaacggctacatagaaaaatccaccccttacgagtgcggcttcgaccctatatcccccgcccgcgtccctttctccataaaattcttcttagtagctattaccttcttattatttgatctagaaattgccctccttttacccctaccatgagccctacaaacaactaacctgccactaatagttatgtcatccctcttattaatcatcatcctagccctaagtctggcctatgagtgactacaaaaaggattagactgaaccgaattggtatatagtttaaacaaaacgaatgatttcgactcattaaattatgataatcatatttaccaaatgcccctcatttacataaatattatactagcatttaccatctcacttctaggaatactagtatatcgctcacacctcatgtcctccctactatgcctagaaggaataatactatcgctgttcattatagctactctcataaccctcaacacccactccctcttagccaatattgtgcctattgccatactagtctttgccgcctgcgaagcagcggtgggcctagccctactagtctcaatctccaacacatatggcctagactacgtacataacctaaacctactccaatgctaaaactaatcgtcccaacaattatattactaccactgacatgactttccaaaaaacacataatttgaatcaacacaaccacccacagcctaattattagcatcatccctctactattttttaaccaaatcaacaacaacctatttagctgttccccaaccttttcctccgaccccctaacaacccccctcctaatactaactacctgactcctacccctcacaatcatggcaagccaacgccacttatccagtgaaccactatcacgaaaaaaactctacctctctatactaatctccctacaaatctccttaattataacattcacagccacagaactaatcatattttatatcttcttcgaaaccacacttatccccaccttggctatcatcacccgatgaggcaaccagccagaacgcctgaacgcaggcacatacttcctattctacaccctagtaggctcccttcccctactcatcgcactaatttacactcacaacaccctaggctcactaaacattctactactcaccctcactgcccaagaactatcaaactcctgagccaacaacttaatatgactagcttacacaatagcttttatagtaaagatacctctttacggactccacttatgactccctaaagcccatgtcgaagcccccatcgctgggtcaatagtacttgccgcagtactcttgaaactaggcggctatggtataatacgcctcacactcattctcaaccccctgacaaaacacatagcctaccccttccttgtactatccctatgaggcataattataacaagctccatctgcctacgacaaacagacctaaaatcgctcattgcatactcttcaatcagccacatagccctcgtagtaacagccattctcatccaaaccccctgaagcttcaccggcgcagtcattctcataatcgcccacggacttacatcctcattactattctgcctagcaaactcaaactacgaacgcactcacagtcgcatcataatcctctctcaaggacttcaaactctactcccactaatagctttttgatgacttctagcaagcctcgctaacctcgccttaccacccactattaacctactgggagaactctctgtgctagtaaccacgttctcctgatcaaatatcactctcctacttacaggactcaacatactagtcacagccctatactccctctacatatttaccacaacacaatggggctcactcacccaccacattaacaacataaaaccctcattcacacgagaaaacaccctcatgttcatacacctatcccccattctcctcctatccctcaaccccgacatcattaccgggttttcctcttgtaaatatagtttaaccaaaacatcagattgtgaatctgacaacagaggcttacgaccccttatttaccgagaaagctcacaagaactgctaactcatgcccccatgtctaacaacatggctttctcaacttttaaaggataacagctatccattggtcttaggccccaagaattttggtgcaactccaaataaaagtaataaccatgcacactactataaccaccctaaccctaacttccctaattccccccatccttaccaccctcgttaaccctaacaaaaaaaactcatacccccattatgtaaaatccattgtcgcatccacctttattatcagtctcttccccacaacaatattcatgtgcctagaccaagaagttattatctcgaactgacactgagccacaacccaaacaacccagctctccctaagcttcaaactagactacttctccataatattcatccctgtagcattgttcgttacatggtccatcatagaattctcactgtgatatataaactcagacccaaacattaatcagttcttcaaatatctactcatcttcctaattaccatactaatcttagttaccgctaacaacctattccaactgttcatcggctgagagggcgtaggaattatatccttcttgctcatcagttgatgatacgcccgagcagatgccaacacagcagccattcaagcaatcctatacaaccgtatcggcgatatcggtttcatcctcgccttagcatgatttatcctacactccaactcatgagacccacaacaaatagcccttctaaacgctaatccaagcctcaccccactactaggcctcctcctagcagcagcaggcaaatcagcccaattaggtctccacccctgactcccctcagccatagaaggccccaccccagtctcagccctactccactcaagcactatagttgtagcaggaatcttcttactcatccgcttccaccccctaacagaaaatagcccactaatccaaactctaacactatgcttaggcgctatcaccactctgttcgcagcagtctgcgcccttacacaaaatgacatcaaaaaaatcgtagccttctccacttcaagtcaactaggactcataatagttacaatcggcatcaaccaaccacacctagcattcctgcacatctgtacccacgccttcttcaaagccatactatttatgtgctccgggtccatcatccacaaccttaacaatgaacaagatattcgaaaaataggaggactactcaaaaccatacctctcacttcaacctccctcaccattggcagcctagcattagcaggaatacctttcctcacaggtttctactccaaagaccacatcatcgaaaccgcaaacatatcatacacaaacgcctgagccctatctattactctcatcgctacctccctgacaagcgcctatagcactcgaataattcttctcaccctaacaggtcaacctcgcttccccacccttactaacattaacgaaaataaccccaccctactaaaccccattaaacgcctggcagccggaagcctattcgcaggatttctcattactaacaacatttcccccgcatcccccttccaaacaacaatccccctctacctaaaactcacagccctcgctgtcactttcctaggacttctaacagccctagacctcaactacctaaccaacaaacttaaaataaaatccccactatgcacattttatttctccaacatactcggattctaccctagcatcacacaccgcacaatcccctatctaggccttcttacgagccaaaacctgcccctactcctcctagacctaacctgactagaaaagctattacctaaaacaatttcgcagcaccaaatctccacctccatcatcacctcaacccaaaaaggcataattaaactttacttcctctctttcttcttcccactcatcctaaccctactcctaatcacataacctattcccccgagcaatttcaattacaatatatacaccaacaaacaatgttcaaccagtaactactactaatcaacgcccataatcatacaaagcccccgcaccaataggatcctcccgaatcaaccctgacccctctccttcataaattattcagcttcctacactattaaagtttaccacaaccaccaccccatcatactctttcacccacagcaccaatcctacctccatcgctaaccccactaaaacactcaccaagacctcaacccctgacccccatgcctcaggatactcctcaatagccatcgctgtagtatatccaaagacaaccatcattccccctaaataaattaaaaaaactattaaacccatataacctcccccaaaattcagaataataacacacccgaccacaccgctaacaatcaatactaaacccccataaataggagaaggcttagaagaaaaccccacaaaccccattactaaacccacactcaacagaaacaaagcatacatcattattctcgcacggactacaaccacgaccaatgatatgaaaaaccatcgttgtatttcaactacaagaacaccaatgaccccaatacgcaaaattaaccccctaataaaattaattaaccactcactcatcgacctccccaccccatccaacatctccgcatgatgaaacttcggctcactccttggcgcctgcctgatcctccaaatcaccacaggactattcctagccatgcactactcaccagacgcctcaaccgccttttcatcaatcgcccacatcactcgagacgtaaattatggctgaatcatccgctaccttcacgccaatggcgcctcaatattctttatctgcctcttcctacacatcgggcgaggcctatattacggatcatttctctactcagaaacctgaaacatcggcattatcctcctgcttgcaactatagcaacagccttcataggctatgtcctcccgtgaggccaaatatcattctgaggggccacagtaattacaaacttactatccgccatcccatacattgggacagacctagttcaatgaatctgaggaggctactcagtagacagtcccaccctcacacgattctttacctttcacttcatcttgcccttcattattgcagccctagcagcactccacctcctattcttgcacgaaacgggatcaaacaaccccctaggaatcacctcccattccgataaaatcaccttccacccttactacacaatcaaagacgccctcggcttacttctcttccttctctccttaatgacattaacactattctcaccagacctcctaggcgacccagacaattataccctagccaaccccttaaacacccctccccacatcaagcccgaatgatatttcctattcgcctacacaattctccgatccgtccctaacaaactaggaggcgtccttgccctattactatccatcctcatcctagcaataatccccatcctccatatatccaaacaacaaagcataatatttcgcccactaagccaatcactttattgactcctagccgcagacctcctcattctaacctgaatcggaggacaaccagtaagctacccttttaccatcattggacaagtagcatccgtactatacttcacaacaatcctaatcctaataccaactatctccctaattgaaaacaaaatactcaaatgggcctgtccttgtagtataaactaatacaccagtcttgtaaaccggagatgaaaacctttttccaaggacaaatcagagaaaaagtctttaactccaccattagcacccaaagctaagattctaatttaaactattctctgttctttcatggggaagcagatttgggtaccacccaagtattgactcacccatcaacaaccgctatgtatttcgtacattactgccagccaccatgaatattgtacggtaccataaatacttgaccacctgtagtacataaaaacccaatccacatcaaaaccccctccccatgcttacaagcaagtacagcaatcaactcccaactatcacacatcaactgcaactccaaagccacccctcacccattaggataccaacaaacctacccacccttaacagcacatagcacataaagccatttaccgtacatagcacattacagtcaaatcccttctcgtccccatggatgacccccctcagataggggtcccttgaccaccatcctccgtgaaatcaatatcccgcacaagagtgctactctcctcgctccgggcccataacacttgggggtagctaaagtgaactgtatccgacatctggttcctacttcagggccataaagcctaaatagcccacacgttccccttaaataagacatcacgatg

SEQ ID NO: 459 - DNA, 16570 bp, Homo sapiens mitochondrial
  3108: "n" refers to a nucleotide at position 3107 of the Cambridge Reference Sequence (CRS, Anderson et al. 1981 Nature 290:457-465), later determined to be absent from the human mtDNA sequence according to the revised CRS (rCRS, Andrews et al. 1999 Nature Genetics 23:147); "n" therefore represents a single nucleotide deletion at a position corresponding to nucleotide 3107 of SEQ ID NO:1 as provided herein.
gatcacaggtctatcaccctattaaccactcacgggagctctccatgcatttggtattttcgtctggggggtgtgcacgcgatagcattgcgagacgctggagccggagcaccctatgtcgcagtatctgtctttgattcctgcctcatcctattatttatcgcacctacgttcaatattacaggcgaacatacttactaaagtgtgttaattaattaatgcttgtaggacataataataacaattgaatgtctgcacagccgctttccacacagacatcataacaaaaaatttccaccaaaccccccctcccccgccttctggccacagcacttaaacacatctctgccaaaccccaaaaacaaagaaccctaacaccagcctaaccagatttcaaattttatcttttggcggtatgcacttttaacagtcaccccccaactaacacattattttcccctcccactcccatactactaatctcatcaatacaacccccgcccatcctacccagcacacacacaccgctgctaaccccataccccgaaccaaccaaaccccaaagacaccccccacagtttatgtagcttacctcctcaaagcaatacactgaaaatgtttagacgggctcacatcaccccataaacaaataggtttggtcctagcctttctattagctcttagtaagattacacatgcaagcatccccgttccagtgagttcaccctctaaatcaccacgatcaaaagggacaagcatcaagcacgcagcaatgcagctcaaaacgcttagcctagccacacccccacgggaaacagcagtgattaacctttagcaataaacgaaagtttaactaagctatactaaccccagggttggtcaatttcgtgccagccaccgcggtcacacgattaacccaagtcaatagaagccggcgtaaagagtgttttagatcaccccctccccaataaagctaaaactcacctgagttgtaaaaaactccagttgacacaaaatagactacgaaagtggctttaacatatctgaacacacaatagctaagacccaaactgggattagataccccactatgcttagccctaaacctcaacagttaaatcaacaaaactgctcgccagaacactacgagccacagcttaaaactcaaaggacctggcggtgcttcatatccctctagaggagcctgttctgtaatcgataaaccccgatcaacctcaccacctcttgctcagcctatataccgccatcttcagcaaaccctgatgaaggctacaaagtaagcgcaagtacccacgtaaagacgttaggtcaaggtgtagcccatgaggtggcaagaaatgggctacattttctaccccagaaaactacgatagcccttatgaaacttaagggtcgaaggtggatttagcagtaaactgagagtagagtgcttagttgaacagggccctgaagcgcgtacacaccgcccgtcaccctcctcaagtatacttcaaaggacatttaactaaaacccctacgcatttatatagaggagacaagtcgtaacatggtaagtgtactggaaagtgcacttggacgaaccagagtgtagcttaacacaaagcacccaacttacacttaggagatttcaacttaacttgaccgctctgagctaaacctagccccaaacccactccaccttactaccagacaaccttagccaaaccatttacccaaataaagtataggcgatagaaattgaaacctggcgcaatagatatagtaccgcaagggaaagatgaaaaattataaccaagcataatatagcaaggactaacccctataccttctgcataatgaattaactagaaataactttgcaaggagagccaaagctaagacccccgaaaccagacgagctacctaagaacagctaaaagagcacacccgtctatgtagcaaaatagtgggaagatttataggtagaggcgacaaacctaccgagcctggtgatagctggttgtccaagatagaatcttagttcaactttaaatttgcccacagaaccctctaaatccccttgtaaatttaactgttagtccaaagaggaacagctctttggacactaggaaaaaaccttgtagagagagtaaaaaatttaacacccatagtaggcctaaaagcagccaccaattaagaaagcgttcaagctcaacacccactacctaaaaaatcccaaacatataactgaactcctcacacccaattggaccaatctatcaccctatagaagaactaatgttagtataagtaacatgaaaacattctcctccgcataagcctgcgtcagattaaaacactgaactgacaattaacagcccaatatctacaatcaaccaacaagtcattattaccctcactgtcaacccaacacaggcatgctcataaggaaaggttaaaaaaagtaaaaggaactcggcaaatcttaccccgcctgtttaccaaaaacatcacctctagcatcaccagtattagaggcaccgcctgcccagtgacacatgtttaacggccgcggtaccctaaccgtgcaaaggtagcataatcacttgttccttaaatagggacctgtatgaatggctccacgagggttcagctgtctcttacttttaaccagtgaaattgacctgcccgtgaagaggcgggcataacacagcaagacgagaagaccctatggagctttaatttattaatgcaaacagtacctaacaaacccacaggtcctaaactaccaaacctgcattaaaaatttcggttggggcgacctcggagcagaacccaacctccgagcagtacatgctaagacttcaccagtcaaagcgaactactatactcaattgatccaataacttgaccaacggaacaagttaccctagggataacagcgcaatcctattctagagtccatatcaacaatagggtttacgacctcgatgttggatcaggacatcccaatggtgcagccgctattaaaggttcgtttgttcaacgattaaagtcctacgtgatctgagttcagaccggagtaatccaggtcggtttctatctacnttcaaattcctccctgtacgaaaggacaagagaaataaggcctacttcacaaagcgccttcccccgtaaatgatatcatctcaacttagtattatacccacacccacccaagaacagggtttgttaagatggcagagcccggtaatcgcataaaacttaaaactttacagtcagaggttcaattcctcttcttaacaacatacccatggccaacctcctactcctcattgtacccattctaatcgcaatggcattcctaatgcttaccgaacgaaaaattctaggctatatacaactacgcaaaggccccaacgttgtaggcccctacgggctactacaacccttcgctgacgccataaaactcttcaccaaagagcccctaaaacccgccacatctaccatcaccctctacatcaccgccccgaccttagctctcaccatcgctcttctactatgaacccccctccccatacccaaccccctggtcaacctcaacctaggcctcctatttattctagccacctctagcctagccgtttactcaatcctctgatcagggtgagcatcaaactcaaactacgccctgatcggcgcactgcgagcagtagcccaaacaatctcatatgaagtcaccctagccatcattctactatcaacattactaataagtggctcctttaacctctccacccttatcacaacacaagaacacctctgattactcctgccatcatgacccttggccataatatgatttatctccacactagcagagaccaaccgaacccccttcgaccttgccgaaggggagtccgaactagtctcaggcttcaacatcgaatacgccgcaggccccttcgccctattcttcatagccgaatacacaaacattattataataaacaccctcaccactacaatcttcctaggaacaacatatgacgcactctcccctgaactctacacaacatattttgtcaccaagaccctacttctaacctccctgttcttatgaattcgaacagcatacccccgattccgctacgaccaactcatacacctcctatgaaaaaacttcctaccactcaccctagcattacttatatgatatgtctccatacccattacaatctccagcattccccctcaaacctaagaaatatgtctgataaaagagttactttgatagagtaaataataggagcttaaacccccttatttctaggactatgagaatcgaacccatccctgagaatccaaaattctccgtgccacctatcacaccccatcctaaagtaaggtcagctaaataagctatcgggcccataccccgaaaatgttggttatacccttcccgtactaattaatcccctggcccaacccgtcatctactctaccatctttgcaggcacactcatcacagcgctaagctcgcactgattttttacctgagtaggcctagaaataaacatgctagcttttattccagttctaaccaaaaaaataaaccctcgttccacagaagctgccatcaagtatttcctcacgcaagcaaccgcatccataatccttctaatagctatcctcttcaacaatatactctccggacaatgaaccataaccaatactaccaatcaatactcatcattaataatcataatggctatagcaataaaactaggaatagccccctttcacttctgagtcccagaggttacccaaggcacccctctgacatccggcctgcttcttctcacatgacaaaaactagcccccatctcaatcatataccaaatctctccctcactaaacgtaagccttctcctcactctctcaatcttatccatcatagcaggcagttgaggtggattaaaccaaacccagctacgcaaaatcttagcatactcctcaattacccacataggatgaataatagcagttctaccgtacaaccctaacataaccattcttaatttaactatttatattatcctaactactaccgcattcctactactcaacttaaactccagcaccacgaccctactactatctcgcacctgaaacaagctaacatgactaacacccttaattccatccaccctcctctccctaggaggcctgcccccgctaaccggctttttgcccaaatgggccattatcgaagaattcacaaaaaacaatagcctcatcatccccaccatcatagccaccatcaccctccttaacctctacttctacctacgcctaatctactccacctcaatcacactactccccatatctaacaacgtaaaaataaaatgacagtttgaacatacaaaacccaccccattcctccccacactcatcgcccttaccacgctactcctacctatctccccttttatactaataatcttatagaaatttaggttaaatacagaccaagagccttcaaagccctcagtaagttgcaatacttaatttctgtaacagctaaggactgcaaaaccccactctgcatcaactgaacgcaaatcagccactttaattaagctaagcccttactagaccaatgggacttaaacccacaaacacttagttaacagctaagcaccctaatcaactggcttcaatctacttctcccgccgccgggaaaaaaggcgggagaagccccggcaggtttgaagctgcttcttcgaatttgcaattcaatatgaaaatcacctcggagctggtaaaaagaggcctaacccctgtctttagatttacagtccaatgcttcactcagccattttacctcacccccactgatgttcgccgaccgttgactattctctacaaaccacaaagacattggaacactatacctattattcggcgcatgagctggagtcctaggcacagctctaagcctccttattcgagccgagctgggccagccaggcaaccttctaggtaacgaccacatctacaacgttatcgtcacagcccatgcatttgtaataatcttcttcatagtaatacccatcataatcggaggctttggcaactgactagttcccctaataatcggtgcccccgatatggcgtttccccgcataaacaacataagcttctgactcttacctccctctctcctactcctgctcgcatctgctatagtggaggccggagcaggaacaggttgaacagtctaccctcccttagcagggaactactcccaccctggagcctccgtagacctaaccatcttctccttacacctagcaggcgtctcctctatcttaggggccatcaatttcatcacaacaattatcaatataaaaccccctgccataacccaataccaaacgcccctcttcgtctgatccgtcctaatcacagcagtcctacttctcctatctctcccagtcctagctgctggcatcactatactactaacagaccgcaacctcaacaccaccttcttcgaccccgccggaggaggagaccccattctataccaacacctattctgatttttcggtcaccctgaagtttatattcttatcctaccaggcttcggaataatctcccatattgtaacttactactccggaaaaaaagaaccatttggatacataggtatggtctgagctatgatatcaattggcttcctagggtttatcgtgtgagcacaccatatatttacagtaggaatagacgtagacacacgagcatatttcacctccgctaccataatcatcgctatccccaccggcgtcaaagtatttagctgactcgccacactccacggaagcaatatgaaatgatctgctgcagtgctctgagccctaggattcatctttcttttcaccgtaggtggcctgactggcattgtattagcaaactcatcactagacatcgtactacacgacacgtactacgttgtagcccacttccactatgtcctatcaataggagctgtatttgccatcataggaggcttcattcactgatttcccctattctcaggctacaccctagaccaaacctacgccaaaatccatttcactatcatattcatcggcgtaaatctaactttcttcccacaacactttctcggcctatccggaatgccccgacgttactcggactaccccgatgcatacaccacatgaaacatcctatcatctgtaggctcattcatttctctaacagcagtaatattaataattttcatgatttgagaagccttcgcttcgaagcgaaaagtcctaatagtagaagaaccctccataaacctggagtgactatatggatgccccccaccctaccacacattcgaagaacccgtatacataaaatctagacaaaaaaggaaggaatcgaaccccccaaagctggtttcaagccaaccccatggcctccatgactttttcaaaaaggtattagaaaaaccatttcataactttgtcaaagttaaattataggctaaatcctatatatcttaatggcacatgcagcgcaagtaggtctacaagacgctacttcccctatcatagaagagcttatcacctttcatgatcacgccctcataatcattttccttatctgcttcctagtcctgtatgcccttttcctaacactcacaacaaaactaactaatactaacatctcagacgctcaggaaatagaaaccgtctgaactatcctgcccgccatcatcctagtcctcatcgccctcccatccctacgcatcctttacataacagacgaggtcaacgatccctcccttaccatcaaatcaattggccaccaatggtactgaacctacgagtacaccgactacggcggactaatcttcaactcctacatacttcccccattattcctagaaccaggcgacctgcgactccttgacgttgacaatcgagtagtactcccgattgaagcccccattcgtataataattacatcacaagacgtcttgcactcatgagctgtccccacattaggcttaaaaacagatgcaattcccggacgtctaaaccaaaccactttcaccgctacacgaccgggggtatactacggtcaatgctctgaaatctgtggagcaaaccacagtttcatgcccatcgtcctagaattaattcccctaaaaatctttgaaatagggcccgtatttaccctatagcaccccctctaccccctctagagcccactgtaaagctaacttagcattaaccttttaagttaaagattaagagaaccaacacctctttacagtgaaatgccccaactaaatactaccgtatggcccaccataattacccccatactccttacactattcctcatcacccaactaaaaatattaaacacaaactaccacctacctccctcaccaaagcccataaaaataaaaaattataacaaaccctgagaaccaaaatgaacgaaaatctgttcgcttcattcattgcccccacaatcctaggcctacccgccgcagtactgatcattctatttccccctctattgatccccacctccaaatatctcatcaacaaccgactaatcaccacccaacaatgactaatcaaactaacctcaaaacaaatgataaccatacacaacactaaaggacgaacctgatctcttatactagtatccttaatcatttttattgccacaactaacctcctcggactcctgcctcactcatttacaccaaccacccaactatctataaacctagccatggccatccccttatgagcgggcgcagtgattataggctttcgctctaagattaaaaatgccctagcccacttcttaccacaaggcacacctacaccccttatccccatactagttattatcgaaaccatcagcctactcattcaaccaatagccctggccgtacgcctaaccgctaacattactgcaggccacctactcatgcacctaattggaagcgccaccctagcaatatcaaccattaaccttccctctacacttatcatcttcacaattctaattctactgactatcctagaaatcgctgtcgccttaatccaagcctacgttttcacacttctagtaagcctctacctgcacgacaacacataatgacccaccaatcacatgcctatcatatagtaaaacccagcccatgacccctaacaggggccctctcagccctcctaatgacctccggcctagccatgtgatttcacttccactccataacgctcctcatactaggcctactaaccaacacactaaccatataccaatgatggcgcgatgtaacacgagaaagcacataccaaggccaccacacaccacctgtccaaaaaggccttcgatacgggataatcctatttattacctcagaagtttttttcttcgcaggatttttctgagccttttaccactccagcctagcccctaccccccaattaggagggcactggcccccaacaggcatcaccccgctaaatcccctagaagtcccactcctaaacacatccgtattactcgcatcaggagtatcaatcacctgagctcaccatagtctaatagaaaacaaccgaaaccaaataattcaagcactgcttattacaattttactgggtctctattttaccctcctacaagcctcagagtacttcgagtctcccttcaccatttccgacggcatctacggctcaacattttttgtagccacaggcttccacggacttcacgtcattattggctcaactttcctcactatctgcttcatccgccaactaatatttcactttacatccaaacatcactttggcttcgaagccgccgcctgatactggcattttgtagatgtggtttgactatttctgtatgtctccatctattgatgagggtcttactcttttagtataaatagtaccgttaacttccaattaactagttttgacaacattcaaaaaagagtaataaacttcgccttaattttaataatcaacaccctcctagccttactactaataattattacattttgactaccacaactcaacggctacatagaaaaatccaccccttacgagtgcggcttcgaccctatatcccccgcccgcgtccctttctccataaaattcttcttagtagctattaccttcttattatttgatctagaaattgccctccttttacccctaccatgagccctacaaacaactaacctgccactaatagttatgtcatccctcttattaatcatcatcctagccctaagtctggcctatgagtgactacaaaaaggattagactgaaccgaattggtatatagtttaaacaaaacgaatgatttcgactcattaaattatgataatcatatttaccaaatgcccctcatttacataaatattatactagcatttaccatctcacttctaggaatactagtatatcgctcacacctcatatcctccctactatgcctagaaggaataatactatcgctgttcattatagctactctcataaccctcaacacccactccctcttagccaatattgtgcctattgccatactagtctttgccgcctgcgaagcagcggtgggcctagccctactagtctcaatctccaacacatatggcctagactacgtacataacctaaacctactccaatgctaaaactaatcgtcccaacaattatattactaccactgacatgactttccaaaaaacacataatttgaatcaacacaaccacccacagcctaattattagcatcatccctctactattttttaaccaaatcaacaacaacctatttagctgttccccaaccttttcctccgaccccctaacaacccccctcctaatactaactacctgactcctacccctcacaatcatggcaagccaacgccacttatccagtgaaccactatcacgaaaaaaactctacctctctatactaatctccctacaaatctccttaattataacattcacagccacagaactaatcatattttatatcttcttcgaaaccacacttatccccaccttggctatcatcacccgatgaggcaaccagccagaacgcctgaacgcaggcacatacttcctattctacaccctagtaggctcccttcccctactcatcgcactaatttacactcacaacaccctaggctcactaaacattctactactcactctcactgcccaagaactatcaaactcctgagccaacaacttaatatgactagcttacacaatagcttttatagtaaagatacctctttacggactccacttatgactccctaaagcccatgtcgaagcccccatcgctgggtcaatagtacttgccgcagtactcttaaaactaggcggctatggtataatacgcctcacactcattctcaaccccctgacaaaacacatagcctaccccttccttgtactatccctatgaggcataattataacaagctccatctgcctacgacaaacagacctaaaatcgctcattgcatactcttcaatcagccacatagccctcgtagtaacagccattctcatccaaaccccctgaagcttcaccggcgcagtcattctcataatcgcccacgggcttacatcctcattactattctgcctagcaaactcaaactacgaacgcactcacagtcgcatcataatcctctctcaaggacttcaaactctactcccactaatagctttttgatgacttctagcaagcctcgctaacctcgccttaccccccactattaacctactgggagaactctctgtgctagtaaccacgttctcctgatcaaatatcactctcctacttacaggactcaacatactagtcacagccctatactccctctacatatttaccacaacacaatggggctcactcacccaccacattaacaacataaaaccctcattcacacgagaaaacaccctcatgttcatacacctatcccccattctcctcctatccctcaaccccgacatcattaccgggttttcctcttgtaaatatagtttaaccaaaacatcagattgtgaatctgacaacagaggcttacgaccccttatttaccgagaaagctcacaagaactgctaactcatgcccccatgtctaacaacatggctttctcaacttttaaaggataacagctatccattggtcttaggccccaaaaattttggtgcaactccaaataaaagtaataaccatgcacactactataaccaccctaaccctgacttccctaattccccccatccttaccaccctcgttaaccctaacaaaaaaaactcatacccccattatgtaaaatccattgtcgcatccacctttattatcagtctcttccccacaacaatattcatgtgcctagaccaagaagttattatctcgaactgacactgagccacaacccaaacaacccagctctccctaagcttcaaactagactacttctccataatattcatccctgtagcattgttcgttacatggtccatcatagaattctcactgtgatatataaactcagacccaaacattaatcagttcttcaaatatctactcatcttcctaattaccatactaatcttagttaccgctaacaacctattccaactgttcatcggctgagagggcgtaggaattatatccttcttgctcatcagttgatgatacgcccgagcagatgccaacacagcagccattcaagcaatcctatacaaccgtatcggcgatatcggtttcatcctcgccttagcatgatttatcctacactccaactcatgagacccacaacaaatagcccttctaaacgctaatccaagcctcaccccactactaggcctcctcctagcagcagcaggcaaatcagcccaattaggtctccacccctgactcccctcagccatagaaggccccaccccagtctcagccctactccactcaagcactatagttgtagcaggaatcttcttactcatccgcttccaccccctagcagaaaatagcccactaatccaaactctaacactatgcttaggcgctatcaccactctgttcgcagcagtctgcgcccttacacaaaatgacatcaaaaaaatcgtagccttctccacttcaagtcaactaggactcataatagttacaatcggcatcaaccaaccacacctagcattcctgcacatctgtacccacgccttcttcaaagccatactatttatgtgctccgggtccatcatccacaaccttaacaatgaacaagatattcgaaaaataggaggactactcaaaaccatacctctcacttcaacctccctcaccattggcagcctagcattagcaggaatacctttcctcacaggtttctactccaaagaccacatcatcgaaaccgcaaacatatcatacacaaacgcctgagccctatctattactctcatcgctacctccctgacaagcgcctatagcactcgaataattcttctcaccctaacaggtcaacctcgcttccccacccttactaacattaacgaaaataaccccaccctactaaaccccattaaacgcctggcagccggaagcctattcgcaggatttctcattactaacaacatttcccccgcatcccccttccaaacaacaatccccctctacctaaaactcacagccctcgctgtcactttcctaggacttctaacagccctagacctcaactacctaaccaacaaacttaaaataaaatccccactatgcacattttatttctccaacatactcggattctaccctagcatcacacaccgcacaatcccctatctaggccttcttacgagccaaaacctgcccctactcctcctagacctaacctgactagaaaagctattacctaaaacaatttcacagcaccaaatctccacctccatcatcacctcaacccaaaaaggcataattaaactttacttcctctctttcttcttcccactcatcctaaccctactcctaatcacataacctattcccccgagcaatctcaattacaatatatacaccaacaaacaatgttcaaccagtaactactactaatcaacgcccataatcatacaaagcccccgcaccaataggatcctcccgaatcaaccctgacccctctccttcataaattattcagcttcctacactattaaagtttaccacaaccaccaccccatcatactctttcacccacagcaccaatcctacctccatcgctaaccccactaaaacactcaccaagacctcaacccctgacccccatgcctcaggatactcctcaatagccatcgctgtagtatatccaaagacaaccatcattccccctaaataaattaaaaaaactattaaacccatataacctcccccaaaattcagaataataacacacccgaccacaccgctaacaatcaatactaaacccccataaataggagaaggcttagaagaaaaccccacaaaccccattactaaacccacactcaacagaaacaaagcatacatcattattctcgcacggactacaaccacgaccaatgatatgaaaaaccatcgttgtatttcaactacaagaacaccaatgaccccaatacgcaaaactaaccccctaataaaattaattaaccactcattcatcgacctccccaccccatccaacatctccgcatgatgaaacttcggctcactccttggcgcctgcctgatcctccaaatcaccacaggactattcctagccatgcactactcaccagacgcctcaaccgccttttcatcaatcgcccacatcactcgagacgtaaattatggctgaatcatccgctaccttcacgccaatggcgcctcaatattctttatctgcctcttcctacacatcgggcgaggcctatattacggatcatttctctactcagaaacctgaaacatcggcattatcctcctgcttgcaactatagcaacagccttcataggctatgtcctcccgtgaggccaaatatcattctgaggggccacagtaattacaaacttactatccgccatcccatacattgggacagacctagttcaatgaatctgaggaggctactcagtagacagtcccaccctcacacgattctttacctttcacttcatcttgcccttcattattgcagccctagcagcactccacctcctattcttgcacgaaacgggatcaaacaaccccctaggaatcacctcccattccgataaaatcaccttccacccttactacacaatcaaagacgccctcggcttacttctcttccttctctccttaatgacattaacactattctcaccagacctcctaggcgacccagacaattataccctagccaaccccttaaacacccctccccacatcaagcccgaatgatatttcctattcgcctacacaattctccgatccgtccctaacaaactaggaggcgtccttgccctattactatccatcctcatcctagcaataatccccatcctccatatatccaaacaacaaagcataatatttcgcccactaagccaatcactttattgactcctagccgcagacctcctcattctaacctgaatcggaggacaaccagtaagctacccttttaccatcattggacaagtagcatccgtactatacttcacaacaatcctaatcctaataccaactatctccctaattgaaaacaaaatactcaaatgggcctgtccttgtagtataaactaatacaccagtcttgtaaaccggagatgaaaacctttttccaaggacaaatcagagaaaaagtctttaactccaccattagcacccaaagctaagattctaatttaaactattctctgttctttcatggggaagcagatttgggtaccacccaagtattgactcacccatcaacaaccgctatgtatttcgtacattactgccagccaccatgaatattgtacggtaccataaatacttgaccacctgtagtacatgaaaacccaatccacatcaaaaccccctccccatgcttacaagcaagcacagcaatcaaccctcaactatcacacatcaactgcaactccaaagccacccctcacccactaggataccaacaaacctacccacccttaacagtacatagtacataaagccatttaccgtacatagcacattacagtcaaatcccttctcgtccccatggatgacccccctcagataggggtcccttgaccaccatcctccgtgaaatcaatatcccgcacaagagtgctactctcctcgctccgggcccataacacttgggggtagctaaagtgaactgtatccgacatctggttcctacttcagggccataaagcctaaatagcccacacgttccccttaaataagacatcacgatg

SEQ ID NO: 460 - DNA, 16570 bp, Homo sapiens mitochondrial
  3108: "n" refers to a nucleotide at position 3107 of the Cambridge Reference Sequence (CRS, Anderson et al. 1981 Nature 290:457-465), later determined to be absent from the human mtDNA sequence according to the revised CRS (rCRS, Andrews et al. 1999 Nature Genetics 23:147); "n" therefore represents a single nucleotide deletion at a position corresponding to nucleotide 3107 of SEQ ID NO:1 as provided herein.
gatcacaggtctatcaccctattaaccactcacgggagctctccatgcatttggtattttcgtttggggggtgtgcacgcgatagcattgcgagacgctggagccggagcaccctatgtcgcagtatctgtctttgattcctgccccatcctgttatttatcgcacctacgttcaatattacaggcgaacatacttactaaagtgtgttaattaattaatgcttgtaggacatagtaataacaattgaatgtctgcacagccgctttccacacagacatcataacaaaaaatttccaccaaaccccccctccccccccgcttctggccacagcacttaaacacatctctgccaaaccccaaaaacaaagaaccctaacaccagcctaaccagatttcaaattttatcttttggcggtatgcacttttaacagtcaccccccaactaacacattattttcccctcccactcccatactactaatctcatcaatacaacccccgcccatcctacccagcacacacaccgctgctaaccccataccccgaaccaaccaaaccccaaagacaccccccacagtttatgtagcttacctcctcaaagcaatacactgaaaatgtttagacgggctcacatcaccccataaacaaataggtttggtcctggcctttctattagctcttagtaagattacacatgcaagcatccccgttccagtgagttcaccctctaaatcaccacgatcaaaagggacaagcatcaagcacgcagcaatgcagctcaaaacgcttagcctagccacacccccacgggaaacagcagtgattaacctttagcaataaacgaaagtttaactaagctatactaaccccagggttggtcaatttcgtgccagccaccgcggtcacacgattaacccaagtcaatagaagccggcgtaaagagtgttttagatcaccccctccccaataaagctaaaactcacctgagttgtaaaaaactccagttgacacaaaatagactacgaaagtggctttaacatatctgaacacacaatagctaagacccaaactgggattagataccccactatgcttagccctaaacctcaacagttaaatcaacaaaactgctcgccagaacactacgagccacagcttaaaactcaaaggacctggcggtgcttcatatccctctagaggagcctgttctgtaatcgataaaccccgatcaacctcaccacctcttgctcagcctatataccgccatcttcagcaaaccctgatgaaggctacaaagtaagcgcaagtacccacgtaaagacgttaggtcaaggtgtagcccatgaggtggcaagaaatgggctacattttctaccccagaaaactacgatagcccttatgaaacttaagggtcgaaggtggatttagcagtaaactgagagtagagtgcttagttgaacagggccctgaagcgcgtacacaccgcccgtcaccctcctcaagtatacttcaaaggacatttaactaaaacccctacgcatttatatagaggagacaagtcgtaacatggtaagtgtactggaaagtgcacttggacgaaccagagtgtagcttaacacaaagcacccaacttacacttaggagatttcaacttaacttgaccgctctgagctaaacctagccccaaacccactccaccttactaccagacaaccttagccaaaccatttacccagataaagtataggcgatagaaattgaaacctggcgcaatagatatagtaccgcaagggaaagatgaaaaattataaccaagcataatatagcaaggactaacccctataccttctgcataatgaattaactagaaataactttgcaaggagagccaaagctaagacccccgaaaccagacgagctacctaagaacagctaaaagagcacacccgtctatgtagcaaaatagtgggaagatttataggtagaggcgacaaacctaccgagcctggtgatagctggttgtccaagatagaatcttagttcaactttaaatttgcccacagaaccctctaaatccccttgtaaatttaactgttagtccaaagaggaacagctctttggacactaggaaaaaaccttgtagagagagtaaaaaatttaacacccatagtaggcctaaaagcagccaccaattaagaaagcgttcaagctcaacacccactacctaaaaaatcccaaacatataactgaactcctcacacccaattggaccaatctatcaccctatagaagaactaatgttagtataagtaacatgaaaacattctcctccgcataagcctgcgtcagattaaaacactgaactgacaattaacagcccaatatctacaatcaaccaacaagtcattattaccctcactgtcaacccaacacaggcatgctcataaggaaaggttaaaaaaagtaaaaggaactcggcaaatcttaccccgcctgtttaccaaaaacatcacctctagcatcaccagtattagaggcaccgcctgcccagtgacacatgtttaacggccgcggtaccctaaccgtgcaaaggtagcataatcacttgttccttaaatagggacctgtatgaatggctccacgagggttcagctgtctcttacttttaaccagtgaaattgacctgcccgtgaagaggcgggcatgacacagcaagacgagaagaccctatggagctttaatttattaatgcaaacagtacctaacaaacccacaggtcctaaactaccaaacctgcattaaaaatttcggttggggcgacctcggagcagaacccaacctccgagcagtacatgctaagacttcaccagtcaaagcgaactactatactcaattgatccaataacttgaccaacggaacaagttaccctagggataacagcgcaatcctattctagagtccatatcaacaatagggtttacgacctcgatgttggatcaggacatcccgatggtgcagccgctattaaaggttcgtttgttcaacgattaaagtcctacgtgatctgagttcagaccggagtaatccaggtcggtttctatctacnttcaaattcctccctgtacgaaaggacaagagaaataaggcctacttcacaaagcgccttcccccgtaaatgatatcatctcaacttagtattatacccacacccacccaagaacagggtttgttaagatggcagagcccggtaatcgcataaaacttaaaactttacagtcagaggttcaattcctcttcttaacaacatacccatggccaacctcctactcctcattgtacccattctaatcgcaatggcattcctaatgcttaccgaacgaaaaattctaggctatatacaactacgcaaaggccccaacgttgtaggcccctacgggctactacaacccttcgctgacgccataaaactcttcaccaaagagcccctaaaacccgccacatctaccatcaccctctacatcaccgccccgaccttagctctcaccatcgctcttctactatgaacccccctccccatacccaaccccctggtcaacctcaacctaggcctcctatttattctagccacctctagcctagccgtttactcaatcctctgatcagggtgagcatcaaactcaaactacgccctgatcggcgcactgcgagcagtagcccaaacaatctcatatgaagtcaccctagccatcattctactatcaacattactaataagtggctcctttaacctctccacccttatcacaacacaagaacacctctgattactcctgccatcatgacccttggccataatatgatttatctccacactagcagagaccaaccgaacccccttcgaccttgccgaaggggagtccgaactagtctcaggcttcaacatcgaatacgccgcaggccccttcgccctattcttcatagccgaatacacaaacattattataataaacaccctcaccactacaatcttcctaggaacaacatatgacgcactctcccctgaactctacacaacatattttgtcaccaagaccctacttctaacctccctgttcttatgaattcgaacagcatacccccgattccgctacgaccaactcatacacctcctatgaaaaaacttcctaccactcaccctagcattacttatatgatatgtctccatacccattacaatctccagcatcccccctcaaacctaagaaatatgtctgataaaagagttactttgatagagtaaataataggagcttaaacccccttatttctaggactatgagaatcgaacccatccctgagaatccaaaattctccgtgccacctatcacaccccatcctaaagtaaggtcagctaaataagctatcgggcccataccccgaaaatgttggttatacccttcccgtactaattaatcccctggcccaacccgtcatctactctaccatctttgcaggcacactcatcacagcgctaagctcgcactgattttttacctgagtaggcctagaaataaacatgctagcttttattccagttctaaccaaaaaaataaaccctcgttccacagaagctgccatcaagtatttcctcacgcaagcaaccgcatccataatccttctaatagctatcctcttcaacaatatactctccggacaatgaaccataaccaatactaccaatcaatactcatcattaataatcataatggctatagcaataaaactaggaatagccccctttcacttctgagtcccagaggttgcccaaggcacccctctgacatccggcctgcttcttctcacatgacaaaaactagcccccatctcaatcatataccaaatctctccctcactaaacgtaagccttctcctcactctctcaatcttatccatcatagcaggcagttgaggtggattaaaccaaacccagctacgcaaaatcttagcatactcctcaattacccacataggatgaataatagcagttctaccgtacaaccctaacataaccattcttaatttaactatttatattatcctaactactaccgcattcctactactcaacttaaactccagcaccacgaccctactactatctcgcacctgaaacaagctaacatgactaacacccttaattccatccaccctcctctccctaggaggcctgcccccgctaaccggctttttgcccaaatgggccattatcgaagaattcacaaaaaacaatagcctcatcatccccaccatcatagccaccatcaccctccttaacctctacttctacctacgcctaatctactccacctcaatcacactactccccatatctaacaacgtaaaaataaaatgacagtttgaacatacaaaacccaccccattcctccccacactcatcgcccttaccacgctactcctacctatctccccttttatactaataatcttatagaaatttaggttaaatacagaccaagagccttcaaagccctcagtaagttgcaatacttaatttctgtaacagctaaggactgcaaaaccccactctgcatcaactgaacgcaaatcagccactttaattaagctaagcccttactagaccaatgggacttaaacccacaaacacttagttaacagctaagcaccctaatcaactggcttcaatctacttctcccgccgccgggaaaaaaggcgggagaagccccggcaggtttgaagctgcttcttcgaatttgcaattcaatatgaaaatcacctcggagctggtaaaaagaggcctaacccctgtctttagatttacagtccaatgcttcactcagccattttacctcacccccactgatgttcgccgaccgttgactattctctacaaaccacaaagacattggaacactatacctattattcggcgcatgagctggagtcctaggcacagctctaagcctccttattcgagccgagctgggccagccaggcaaccttctaggtaacgaccacatctacaacgttatcgtcacagcccatgcatttgtaataatcttcttcatagtaatacccatcataatcggaggctttggcaactgactagttcccctaataatcggtgcccccgatatggcgtttccccgcataaacaacataagcttctgactcttacctccctctctcctactcctgctcgcatctgctatagtggaggccggagcaggaacaggttgaacagtctaccctcccttagcagggaactactcccaccctggagcctccgtagacctaaccatcttctccttacacctagcaggtgtctcctctatcttaggggccatcaatttcatcacaacaattatcaatataaaaccccctgccataacccaataccaaacgcccctcttcgtctgatccgtcctaatcacagcagtcctacttctcctatctctcccagtcctagctgctggcatcactatactactaacagaccgcaacctcaacaccaccttcttcgaccccgccggaggaggagaccccattctataccaacacctattctgatttttcggtcaccctgaagtttatattcttatcctaccaggcttcggaataatctcccatattgtaacttactactccggaaaaaaagaaccatttggatacataggtatggtctgagctatgatatcaattggcttcctagggtttatcgtgtgagcacaccatatatttacagtaggaatagacgtagacacacgagcatatttcacctccgctaccataatcatcgctatccccaccggcgtcaaagtatttagctgactcgccacactccacggaagcaatatgaaatgatctgctgcagtgctctgagccctaggattcatctttcttttcaccgtaggtggcctgactggcattgtattagcaaactcatcactagacatcgtactacacgacacgtactacgttgtagctcacttccactatgtcctatcaataggagctgtatttgccatcataggaggcttcattcactgatttcccctattctcaggctacaccctagaccaaacctacgccaaaatccatttcactatcatattcatcggcgtaaatctaactttcttcccacaacactttctcggcctatccggaatgccccgacgttactcggactaccccgatgcatacaccacatgaaacatcctatcatctgtaggctcattcatttctctaacagcagtaatattaataattttcatgatttgagaagccttcgcttcgaagcgaaaagtcctaatagtagaagaaccctccataaacctggagtgactatatggatgccccccaccctaccacacattcgaagaacccgtatacataaaatctagacaaaaaaggaaggaatcgaaccccccaaagctggtttcaagccaaccccatggcctccatgactttttcaaaaaggtattagaaaaaccatttcataactttgtcaaagttaaattataggctaaatcctatatatcttaatggcacatgcagcgcaagtaggtctacaagacgctacttcccctatcatagaagagcttatcacctttcatgatcacgccctcataatcattttccttatctgcttcctagtcctgtatgcccttttcctaacactcacaacaaaactaactaatactaacatctcagacgctcaggaaatagaaaccgtctgaactatcctgcccgccatcatcctagtcctcatcgccctcccatccctacgcatcctttacataacagacgaggtcaacgatccctcccttaccatcaaatcaattggccaccaatggtactgaacctacgagtacaccgactacggcggactaatcttcaactcctacatacttcccccattattcctagaaccaggcgacctgcgactccttgacgttgacaatcgagtagtactcccgattgaaacccccattcgtataataattacatcacaagacgtcttgcactcatgagctgtccccacattaggcttaaaaacagatgcaattcccggacgtctaaaccaaaccactttcaccgctacacgaccgggggtatactacggtcaatgctctgaaatctgtggagcaaaccacagtttcatgcccatcgtcctagaattaattcccctaaaaatctttgaaatagggcccgtatttaccctatagcaccccctctaccccctctagagcccactgtaaagctaacttagcattaaccttttaagttaaagattaagagaaccaacacctctttacagtgaaatgccccaactaaatactaccgtatggcccaccataattacccccatactccttacactattcctcatcacccaactaaaaatattaaacacaaactaccacctacctccctcaccaaagcccataaaaataaaaaattataacaaaccctgagaaccaaaatgaacgaaaatctgttcgcttcattcattgcccccacaatcctaggcctacccgccgcagtactgatcattctatttccccctctattgatccccacctccaaatatctcatcaacaaccgactaatcaccacccaacaatgactaatcaaactaacctcaaaacaaatgataaccatacacaacactaaaggacgaacctgatctcttatactagtatccttaatcatttttattgccacaactaacctcctcggactcctgccttactcatttacaccaaccacccaactatctataaacctagccatggccatccccttatgagcgggcgcagtgattataggctttcgctctaagattaaaaatgccctagcccacttcttaccacaaggcacacctacaccccttatccccatactagttattatcgaaaccatcagcctactcattcaaccaatagccctggccgtacgcctaaccgctaacattactgcaggccacctactcatgcacctaattggaagcgccaccctagcaatatcaaccattaaccttccctctacacttatcatcttcacaattctaattctactgactatcctagaaatcgctgtcgccttaatccaagcctacgttttcacacttctagtaagcctctacctgcacgacaacacataatgacccaccaatcacatgcctatcatatagtaaaacccagcccatgacccctaacaggggccctctcagccctcctaatgacctccggcctagccatgtgatttcacttccactccataacgctcctcatactaggcctactaaccaacacactaaccatataccaatgatggcgcgatgtaacacgagaaagcacataccaaggccaccacacaccacctgtccaaaaaggccttcgatacgggataatcctatttattacctcagaagtttttttcttcgcaggatttttctgagccttttaccactccagcctagcccctaccccccaattaggagggcactggcccccaacaggcatcaccccgctaaatcccctagaagtcccactcctaaacacatccgtattactcgcatcaggagtatcaatcacctgagctcaccatagtctaatagaaaacaaccgaaaccaaataattcaagcactgcttattacaattttactgggtctctattttaccctcctacaagcctcagagtacttcgagtctcccttcaccatttccgacggcatctacggctcaacattttttgtagccacaggcttccacggacttcacgtcattattggctcaactttcctcactatctgcttcatccgccaactaatatttcactttacatccaaacatcactttggcttcgaagccgccgcctgatactggcattttgtagatgtggtttgactatttctgtatgtctccatctattgatgagggtcttactcttttagtataaatagtaccgttaacttccaattaactagttttgacaacattcaaaaaagagtaataaacttcgccttaattttaataatcaacaccctcctagccttactactaataattattacattttgactaccacaactcaacggctacatagaaaaatccaccccttacgagtgcggcttcgaccctatatcccccgcccgcgtccctttctccataaaattcttcttagtagctattaccttcttattatttgatctagaaattgccctccttttacccctaccatgagccctacaaacaactaacctgccactaatagttatgtcatccctcttattaatcatcatcctagccctaagtctggcctatgagtgactacaaaaaggattagactgaaccgaattggtatatagtttaaacaaaacgaatgatttcgactcattaaattatgataatcatatttaccaaatgcccctcatttacataaatattatactagcatttaccatctcacttctaggaatactagtatatcgctcacacctcatatcctccctactatgcctagaaggaataatactatcgctgttcatcatagctactctcataaccctcaacacccactccctcttagccaatattgtgcctattgccatactagtctttgccgcctgcgaagcagcggtgggcctagccctactagtctcaatctccaacacatatggcctagactacgtacataacctaaacctactccaatgctaaaactaatcgtcccaacaattatattactaccactgacatgactttccaaaaaacacataatttgaatcaacacaaccacccacagcctaattattagcatcatccctctactattttttaaccaaatcaacaacaacctatttagctgttccccaaccttttcctccgaccccctaacaacccccctcctaatactaactacctgactcctacccctcacaatcatggcaagccaacgccacttatccagtgaaccactatcacgaaaaaaactctacctctctatactaatctccctacaaatctccttaattataacattcacagccacagaactaatcatattttatatcttcttcgaaaccacacttatccccaccttggctatcatcacccgatgaggcaaccagccagaacgcctgaacgcaggcacatacttcctattctacaccctagtaggctcccttcccctactcatcgcactaatttacactcacaacaccctaggctcactaaacattctactactcactctcactgcccaagagctatcaaactcctgagccaacaacttaatatgactagcttacacaatagcttttatagtaaagatacctctttacggactccacttatgactccctaaagcccatgtcgaagcccccatcgctgggtcaatagtacttgccgcagtactcttaaaactaggcggctatggtataatacgcctcacactcattctcaaccccctgacaaaacacatagcctaccccttccttgtgctatccctatgaggcataattataacaagctccatctgcctacgacaaacagacctaaaatcgctcattgcatactcttcaatcagccacatagccctcgtagtaacagccattctcatccaaaccccctgaagcttcaccggcgcagtcattctcataatcgcccacggacttacatcctcattactattctgcctagcaaactcaaactacgaacgcactcacagtcgcatcataatcctctctcaaggacttcaaactctactcccactaatagctttttgatgacttctagcaagcctcgctaacctcgccttaccccccactattaacctactgggagaactctctgtgctagtaaccacgttctcctgatcaaatatcactctcctacttacaggactcaacatactagtcacagccctatactccctctacatatttaccacaacacaatgaggctcactcacccaccacattaacaacataaaaccctcattcacacgagaaaacaccctcatgttcatacacctatcccccattctcctcctatccctcaaccccgacatcattaccgggttttcctcttgtaaatatagtttaaccaaaacatcagattgtgaatctgacaacagaggcttacgaccccttatttaccgagaaagctcacaagaactgctaactcatgcccccatgtctaacaacatggctttctcaacttttaaaggataacagctatccattggtcttaggccccaaaaattttggtgcaactccaaataaaagtaataaccatgcacactactataaccaccctaaccctgacttccctaattccccccatccttaccaccctcgttaaccctaacaaaaaaaactcatacccccattatgtaaaatccattgtcgcatccacctttattatcagtctcttccccacaacaatattcatgtgcctagaccaagaagttattatctcgaactgacactgagccacaacccaaacaacccagctctccctaagcttcaaactagactacttctccataatattcatccctgtagcattgttcgttacatggtccatcatagaattctcactgtgatatataaactcagacccaaacattaatcagttcttcaaatatctactcattttcctaattaccatactaatcttagttaccgctaacaacctattccaactgttcatcggctgagagggcgtaggaattatatccttcttgctcatcagttgatgatacgcccgagcagatgccaacacagcagccattcaagcaatcctatacaaccgtatcggcgatatcggtttcatcctcgccttagcatgatttatcctacactccaactcatgagacccacaacaaatagcccttctaaacgctaatccaagcctcaccccactactaggcctcctcctagcagcagcaggcaaatcagcccaattaggtctccacccctgactcccctcagccatagaaggccccaccccagtctcagccctactccactcaagcactatagttgtagcaggaatcttcttactcatccgcttccaccccctagcagaaaatagcccactaatccaaactctaacactatgcttaggcgctatcaccactctgttcgcagcagtctgcgcccttacacaaaatgacatcaaaaaaatcgtagccttctccacttcaagtcaactaggactcataatagttacaatcggcatcaaccaaccacacctagcattcctgcacatctgtacccacgccttcttcaaagccatactatttatgtgctccgggtccatcatccacaaccttaacaatgaacaagatattcgaaaaataggaggactactcaaaaccatacctctcacttcaacctccctcaccattggcagcctagcattagcaggaatacctttcctcacaggtttctactccaaagaccacatcatcgaaaccgcaaacatatcatacacaaacgcctgagccctatctattactctcatcgctacctccctgacaagcgcctatagcactcgaataattcttctcaccctaacaggtcaacctcgcttccccacccttactaacattaacgaaaataaccccaccctactaaaccccattaaacgcctggcagccggaagcctattcgcaggatttctcattactaacaacatttcccccgcatcccccttccaaacaacaatccccctctacctaaaactcacagccctcgctgtcactttcctaggacttctaacagccctagacctcaactacctaaccaacaaacttaaaataaaatccccactatgcacattttatttctccaacatactcggattctaccctagcatcacacaccgcacaatcccctatctaggccttcttacgagccaaaacctgcccctactcctcctagacctaacctgactagaaaagctattacctaaaacaatttcacagcaccaaatctccacctccatcatcacctcaacccaaaaaggcataattaaactttacttcctctctttcttcttcccactcatcctaaccctactcctaatcacataacctattcccccgagcaatctcaattacaatatatacaccaacaaacaatgttcaaccagtaactactactaatcaacgcccataatcatacaaagcccccgcaccaataggatcctcccgaatcaaccctgacccctctccttcataaattattcagcttcctacactattaaagtttaccacaaccaccaccccatcatactctttcacccacagcaccaatcctacctccatcgctaaccccactaaaacactcaccaagacctcaacccctgacccccatgcctcaggatactcctcaatagccatcgctgtagtatatccaaagacaaccatcattccccctaaataaattaaaaaaactattaaacccatataacctcccccaaaattcagaataataacacacccgaccacaccgctaacaatcaatactaaacccccataaataggagaaggcttagaagaaaaccccacaaaccccattactaaacccacactcaacagaaacaaagcatacatcattattctcgcacggactacaaccacgaccaatgatatgaaaaaccatcgttgtatttcaactacaagaacaccaatgaccccaatacgcaaaattaaccccctaataaaattaattaaccactcattcatcgacctccccaccccatccaacatctccgcatgatgaaacttcggctcactccttggcgcctgcctgatcctccaaatcaccacaggactattcctagccatgcactactcaccagacgcctcaaccgccttttcatcaatcgcccacatcactcgagacgtaaattatggctgaatcatccgctaccttcacgccaatggcgcctcaatattctttatctgcctcttcctacacatcgggcgaggcctatattacggatcatttctctactcagaaacctgaaacatcggcattatcctcctgcttgcaactatagcaacagccttcataggctatgtcctcccgtgaggccaaatatcattctgaggggccacagtaattacaaacttactatccgccatcccatacattgggacagacctagttcaatgaatctgaggaggctactcagtagacagtcccaccctcacacgattctttacctttcacttcatcttgcccttcattattgcagccctagcagcactccacctcctattcttgcacgaaacgggatcaaacaaccccctaggaatcacctcccattccgataaaatcaccttccacccttactacacaatcaaagacgccctcggcttacttctcttccttctctccttaatgacattaacactattctcaccagacctcctaggcgacccagacaattataccctagccaaccccttaaacacccctccccacatcaagcccgaatgatatttcctattcgcctacacaattctccgatccgtccctaacaaactaggaggcgtccttgccctattactatccatcctcatcctagcaataatccccatcctccatatatccaaacaacaaagcataatatttcgcccactaagccaatcactttattgactcctagccgcagacctcctcattctaacctgaatcggaggacaaccagtaagctacccttttaccatcattggacaagtagcatccgtactatacttcacaacaatcctaatcctaataccaactatctccctaattgaaaacaaaatactcaaatgggcctgtccttgtagtataaactaatacaccagtcttgtaaaccggagatgaaaacctttttccaaggacaaatcagagaaaaagtctttaactccaccattagcacccaaagctaagattctaatttaaactattctctgttctttcatggggaagcagatttgggtaccacccaagtattgactcacccatcaacaaccgctatgtatttcgtacattactgccagtcaccatgaatattgtacagtaccataaatacttgaccacctgtagtacataaaaacccaatccacatcaaaaccccctccccatgcttacaagcaagtacagcaatcaaccttcaactatcacacatcaactgcaactccaaagccacccctcacccactaggataccaacaaacctatccacccttaacagtacatagtacataaaaccatttaccgtacatagcacattacagtcaaatcccttctcgcccccatggatgacccccctcagataggggtcccttgaccaccatcctccgtgaaatcaatatcccgcacaagagtgctactctcctcgctccgggcccataacacttgggggtagctaaagtgaactgtatccgacatctggttcctacttcagggtcataaagcctaaatagcccacacgttccccttaaataagacatcacgatg

SEQ ID NO: 461 - DNA, 16571 bp, Homo sapiens mitochondrial
  3109: "n" refers to a nucleotide at position 3107 of the Cambridge Reference Sequence (CRS, Anderson et al. 1981 Nature 290:457-465), later determined to be absent from the human mtDNA sequence according to the revised CRS (rCRS, Andrews et al. 1999 Nature Genetics 23:147); "n" therefore represents a single nucleotide deletion at a position corresponding to nucleotide 3107 of SEQ ID NO:1 as provided herein.
gatcacaggtctatcaccctattaaccactcacgggagctctccatgcatttggtattttcgtctggggggtgtgcacgcgatagcattgcgagacgctggagccggagcaccctatgtcgcagtatctgtctttgattcctgcctcatcccattatttatcgcacctacgttcaatattacaggcgaacatacttactaaagtgtgttaattaatcaatgcttgtaggacataataataacaattgaatgtctgcacagccgctttccacacagacatcataacaaaaaatttccaccaaaccccccctcccccgccttctggccacagcacttaaacatatctctgccaaaccccaaaaacaaagaaccctaacaccagcctaaccagatttcaaattttatcttttggcggtatgcacttttaacagtcaccccccaactaacacattattttcccctcccactcccatactactaatctcatcaatacaacccccgcccatcctgcccagcacacacacaccacgctgctaaccccataccccgaaccaaccaaaccccaaagacaccccccacagtttatgtagcttacctcctcaaagcaatacactgaaaatgtttagacgggctcacatcaccccataaacaaataggtttggtcctagcctttctattagctcttagtaagattacacatgcaagcatccccgttccagtgagttcaccctctaaatcaccacgatcaaaagggacaagcatcaagcacgcagcaatgcagctcaaaacgcttagcctagccacacccccacgggaaacagcagtgattaacctttagcaataaacgaaagtttaactaagctatactaaccccagggttggtcaatttcgtgccagccaccgcggtcacacgattaacccaagtcaatagaagccggcgtaaagagtgttttagatcaccccctccccaataaagctaaaactcacctgaattgtaaaaactccagttgacacaaaatagactacgaaagtggctttaacatatctgaacacacaatagctaagacccaaactgggattagataccccactatgcttagccctaaacctcaacagttaaatcaacaaaactgctcgccagaacactacgagccacagcttaaaactcaaaggacctggcggtgcttcatatccctctagaggagcctgttctgtaatcgataaaccccgatcaacctcaccacctcttgctcagcctatataccgccatcttcagcaaaccctgatgaaggctacaaagtaagcgcaagtacccacgtaaagacgttaggtcaaggtgtagcccatgaggtggcaagaaatgggctacattttctaccccagaaaactacgatagcccttatgaaacttaagggtcgaaggtggatttagcagtaaactgagagtagagtgcttagttgaacagggccctgaagcgcgtacacaccgcccgtcaccctcctcaagtatacttcaaaggacatttaactaaaacccctacgcatttatatagaggagacaagtcgtaacatggtaagtgtactggaaagtgcacttggacgaaccagagtgtagcttaacacaaagcacccaacttacacttaggagatttcaacttaacttgaccgctctgagctaaacctagccccaaacccactccaccttactaccagacaaccttagccaaaccatttacccaaataaagtataggcgatagaaattgaaacctggcgcaatagatatagtaccgcaagggaaagatgaaaaattatagccaagcataatatagcaaggactaacccctataccttctgcataatgaattaactagaaataactttgcaaggagagccaaagctaagacccccgaaaccagacgagctacctaagaacagctaaaagagcacacccgtctatgtagcaaaatagtgggaagatttataggtagaggcgacaaacctaccgagcctggtgatagctggttgtccaagatagaatcttagttcaactttaaatttgcccacagaaccctctaaatccccttgtaaatttaactgttagtccaaagaggaacagctctttggacactaggaaaaaaccttgtagagagagtaaaaaatttaacacccatagtaggcctaaaagcagccaccaattaagaaagcgttcaagctcaacacccactacctaaaaaatcccaaacatataactgaactcctcacacccaattggaccaatctatcaccctatagaagaactaatgttagtataagtaacatgaaaacattctcctccgcataagcctgcgtcagattaaaacactgaactgacaattaacagcccaatatctacaatcaaccaacaagtcattattaccctcactgtcaacccaacacaggcatgctcataaggaaaggttaaaaaaagtaaaaggaactcggcaaatcttaccccgcctgtttaccaaaaacatcacctctagcatcaccagtattagaggcaccgcctgcccagtgacacatgtttaacggccgcggtaccctaaccgtgcaaaggtagcataatcacttgttccttaaatagggacctgtatgaatggctccacgagggttcagctgtctcttacttttaaccagtgaaattgacctgcccgtgaagaggcgggcatgacacagcaagacgagaagaccctatggagctttaatttattaatgcaaacagtacctaacaaacccacaggtcctaaactaccaaacctgcattaaaaatttcggttggggcgacctcggagcagaacccaacctccgagcagtacatgctaagacttcaccagtcaaagcgaactactatactcaattgatccaataacttgaccaacggaacaagttaccctagggataacagcgcaatcctattctagagtccatatcaacaatagggtttacgacctcgatgttggatcaggacatcccgatggtgcagccgctattaaaggttcgtttgttcaacgattaaagtcctacgtgatctgagttcagaccggagtaatccaggtcggtttctatctacnttcaaattcctccctgtacgaaaggacaagagaaataaggcctacttcacaaagcgccttcccccgtaaatgatatcatctcaacttagtattatacccacacccacccaagaacagggtttgttaagatggcagagcccggtaatcgcataaaacttaaaactttacagtcagaggttcaattcctcttcttaacaacatacccatggccaacctcctactcctcattgtacccattctaatcgcaatggcattcctaatgcttaccgaacgaaaaattctaggctatatacaactacgcaaaggccccaacgttgtaggcccctacgggctactacaacccttcgctgacgccataaaactcttcaccaaagagcccctaaaacccgccacatctaccatcaccctctacatcaccgccccgaccttagctctcaccatcgctcttctactatgaacccccctccccatacccaaccccctggtcaacctcaacctaggcctcctatttattctagccacctctagcctagccgtttactcaatcctctgatcagggtgagcatcaaactcaaactacgccctgatcggcgcactgcgagcagtagcccagacaatctcatatgaagtcaccctagccatcattctactatcaacattactaataagtggctcctttaacctctccacccttatcacaacacaagaacacctctgattactcctgccatcatgacccttggccataatatgatttatctccacactagcagagaccaaccgaacccccttcgaccttgccgaaggggagtccgaactagtctcaggcttcaacatcgaatacgccgcaggccccttcgccctattcttcatagccgaatacacaaacattattataataaacaccctcaccactacaatcttcctaggaacaacatatgacgcactctcccctgaactctacacaacatattttgtcaccaagaccctacttctaacctccctgttcttatgaattcgaacagcatacccccgattccgctacgaccaactcatacacctcctatgaaaaaacttcctaccactcaccctagcattacttatatgatatgtctccatacccattacaatctccagcattccccctcaaacctaagaaatatgtctgataaaagagttactttgatagagtaaataataggagcttaaacccccttatttctaggactatgagaatcgaacccatccctgagaatccaaaattctccgtgccacctatcacaccccatcctaaagtaaggtcagctaaataagctatcgggcccataccccgaaaatgttggttatacccttcccgtactaattaatcccctggcccaacccgtcatctactctaccatctttgcaggcacactcatcacagcgctaagctcgcactgattttttacctgagtaggcctagaaataaacatgctagcttttattccagttctaaccaaaaaaataaaccctcgttccacagaagctgccatcaagtatttcctcacgcaagcaaccgcatccataatccttctaatagctatcctcttcaacaatatactctccggacaatgaaccataaccaatactaccaatcaatactcatcattaataatcataatggctatagcaataaaactaggaatagccccctttcacttctgagtcccagaggttacccaaggcacccctctgacatccggcctgcttcttctcacatgacaaaaactagcccccatctcaatcatataccaaatctctccctcactaaacgtaagccttctcctcactctctcaatcttatccatcatagcaggcagttgaggtggattaaaccaaacccagctacgcaaaatcttagcatactcctcaattacccacataggatgaataatagcagttctaccgtacaaccctaacataaccattcttaatttaactatttatattatcctaactactaccgcattcctactactcaacttaaactccagcaccacgaccctactactatctcgcacctgaaacaagctaacatgactaacacccttaattccatccaccctcctctccctaggaggcctgcccccgctaaccggctttttgcccaaatgggccattatcgaagaattcacaaaaaacaatagcctcatcatccccaccatcatagccaccatcaccctccttaacctctacttctacctacgcctaatctactccacctcaatcacactactccccatgtctaacaacgtaaaaataaaatgacagtttgaacacacaaaacccaccccattcctccccacactcatcgcccttaccacgctactcctacctatctccccttttatactaataatcttatagaaatttaggttaaatacagaccaagagccttcaaagccctcagtaagttgcaatacttaatttctgtaacagctaaggactgcaaaaccccactctgcatcaactgaacgcaaatcagccactttaattaagctaagcccttactagaccaatgggacttaaacccacaaacacttagttaacagctaagcaccctaatcaactggcttcaatctacttctcccgccgccgggaaaaaaggcgggagaagccccggcaggtttgaagctgcttcttcgaatttgcaattcaatatgaaaatcacctcggagctggtaaaaagaggcctaacccctgtctttagatttacagtccaatgcttcactcagccattttacctcacccccactgatgttcgccgaccgttgactattctctacaaaccacaaagacattggaacactatacctattattcggcgcatgagctggagtcctaggcacagctctaagcctccttattcgagccgagctgggccagccaggcaaccttttaggtaacgaccacatctacaacgttatcgtcacagcccatgcatttgtaataatcttcttcatagtaatacccatcataatcggaggctttggcaactgactagtccccctaataatcggtgcccccgatatggcgtttccccgcataaacaacataagcttctgactcttacctccctctctcctactcctgctcgcatctgctatagtggaggccggagcaggaacaggttgaacagtctaccctcccttagcagggaactactcccaccctggagcctccgtagacctaaccatcttctccttacacctagcaggtgtctcctctatcttaggggccatcaatttcatcacaacaattatcaatataaaaccccctgccataacccaataccaaacgcccctcttcgtctgatccgtcctaatcacagcagtcctacttctcctatctctcccagtcctagctgctggcatcactatactactaacagaccgcaacctcaacaccaccttcttcgaccccgccggaggaggagaccccattctataccaacacctattctgatttttcggtcaccctgaagtttatattcttatcctaccaggcttcggaataatctcccatattgtaacttactactccggaaaaaaagaaccatttggatacataggtatggtctgagctatgatatcaattggcttcctagggtttatcgtgtgagcacaccatatatttacagtaggaatagacgtagacacacgagcatatttcacctccgctaccataatcatcgctatccccaccggcgtcaaagtatttagctgactcgccacactccacggaagcaatatgaaatgatctgctgcagtgctctgagccctaggattcatctttcttttcaccgtaggtggcctgactggcattgtattagcaaactcatcactagacatcgtactacacgacacgtactacgttgtagctcacttccactatgtcctatcaataggagctgtatttgccatcataggaggcttcattcactgatttcccctattctcaggttacaccctagaccaaacctacgccaaaatccatttcactatcatattcatcggcgtaaatctaactttcttcccacaacactttctcggcctatccggaatgccccgacgttactcggactaccccgatgcatacaccacatgaaacatcctatcatctgtaggctcattcatttctctaacagcagtaatattaataattttcatgatttgagaagccttcgcttcgaagcgaaaagtcctaatagtagaagaaccctccataaacctggagtgactatatggatgccccccaccctaccacacattcgaagaacccgtatacataaaatctagacaaaaaaggaaggaatcgaaccccccaaagctggtttcaagccaaccccatggcctccatgactttttcaaaaaggtattagaaaaaccatttcataactttgtcaaagttaaattataggctaaatcctatatatcttaatggcacatgcagcgcaagtaggtctacaagacgctacttcccctatcatagaagagcttatcacctttcatgatcacgccctcataatcattttccttatctgcttcctagtcctgtatgcccttttcctaacactcacaacaaaactaactaatactaacatctcagacgctcaggaaatagaaaccgtctgaactatcctgcccgccatcatcctagtcctcatcgccctcccatccctacgcatcctttacataacagacgaggtcaacgatccctcccttaccatcaaatcaattggccaccaatggtactgaacctacgagtacaccgactacggcggactaatcttcaactcctacatacttcccccattattcctagaaccaggcgacctgcgactccttgacgttgacaatcgagtagtactcccgattgaagcccccattcgtataataattacatcacaagacgtcttgcactcatgagctgtccccacattaggcttaaaaacagatgcaattcccggacgtctaaaccaaaccactttcaccgctacacgaccgggggtatactacggtcaatgctctgaaatctgtggagcaaaccacagtttcatgcccatcgtcctagaattaattcccctaaaaatctttgaaatagggcccgtatttaccctatagcaccccctctaccccctctagagcccactgtaaagctaacttagcattaaccttttaagttaaagattaagagaaccaacacctctttacagtgaaatgccccaactaaatactaccgtatggcccaccataattacccccatactccttacactattcctcatcacccaactaaaaatattaaacacaaactaccacctacctccctcaccaaagcccataaaaataaaaaattataacaaaccctgagaaccaaaatgaacgaaaatctgttcgcttcattcattgcccccacaatcctaggcctacccgccgcagtactgatcattctatttccccctctattgatccccacctccaaatatctcatcaacaaccgactaatcaccacccaacaatgactaatcaaactaacctcaaaacaaatgataaccatacacaacactaaaggacgaacctgatctcttatactagtatccttaatcatttttattgccacaactaacctcctcggactcctgcctcactcatttacaccaaccacccaactatctataaacctagccatggccatccccttatgagcgggcgcagtgattataggctttcgctctaagattaaaaatgccctagcccacttcttaccacaaggcacacctacaccccttatccccatactagttattatcgaaaccatcagcctactcattcaaccaatagccctggccgtacgcctaaccgctaacattactgcaggccacctactcatgcacctaattggaagcgccaccctagcaatatcaaccattaaccttccctctacacttatcatcttcacaattctaattctactgactatcctagaaatcgctgtcgccttaatccaagcctacgttttcacacttctagtaagcctctacctgcacgacaacacataatgacccaccaatcacatgcctatcatatagtaaaacccagcccatgacccctaacaggggccctctcagccctcctaatgacctccggcctagccatgtgatttcacttccactccataacgctcctcatactaggcctactaaccaacacactaaccatataccaatgatggcgcgatgtaacacgagaaagcacataccaaggccaccacacaccacctgtccaaaaaggccttcgatacgggataatcctatttattacctcagaagtttttttcttcgcaggatttttctgagccttttaccactccagcctagcccctaccccccaattaggagggcactggcccccaacaggcatcaccccgctaaatcccctagaagtcccactcctaaacacatccgtattactcgcatcaggagtatcaatcacctgagctcaccatagtctaatagaaaacaaccgaaaccaaataattcaagcactgcttattacaattttactgggtctctattttaccctcctacaagcctcagagtacttcgagtctcccttcaccatttccgacggcatctacggctcaacattttttgtagccacaggcttccacggacttcacgtcattattggctcaactttcctcactatctgcttcatccgccaactaatatttcactttacatccaaacatcactttggcttcgaagccgccgcctgatactggcattttgtagatgtggtttgactatttctgtatgtctccatctattgatgagggtcttactcttttagtataaatagtaccgttaacttccaattaactagttttgacaacattcaaaaaagagtaataaacttcgccttaattttaataatcaacaccctcctagccttactactaataattattacattttgactaccacaactcaacggctacatagaaaaatccaccccttacgagtgcggcttcgaccccatatcccccgcccgcgtccctttctccataaaattcttcttagtagctattaccttcttattatttgatctagaaattgccctccttttacccctaccatgagccctacaaacaactaacctgccactaatagttatgtcatccctcttattaatcatcatcctagccctaagtctggcctatgagtgactacaaaaaggattagactgaaccgaattggtatatagtttaaacaaaacgaatgatttcgactcattaaattatgataatcatatttaccaaatgcccctcatttacataaatattatactagcatttaccatctcacttctaggaatactagtatatcgctcacacctcatatcctccctactatgcctagaaggaataatactatcgctgttcattatagctactctcataaccctcaacacccactccctcttagccaatattgtgcctattgccatactagtctttgccgcctgcgaagcagcggtgggcctagccctactagtctcaatctccaacacatatggcctagactacgtacataacctaaacctactccaatgctaaaactaatcgtcccaacaattatattactaccactgacatgactttccaaaaaacacataatttgaatcaacacaaccacccacagcctaattattagcatcatccctctgctattttttaaccaaatcaacaacaacctatttagctgttccccaaccttttcctccgaccccctaacaacccccctcctaatactaactacctgactcctacccctcacaatcatggcaagccaacgccacttatccagtgaaccactatcacgaaaaaaactctacctctctatactaatctccctacaaatctccttaattataacattcacagccacagaactaatcatattttatatcttcttcgaaaccacacttatccccaccttggctatcatcacccgatgaggcaaccagccagaacgcctgaacgcaggcacatacttcctattctacaccctagtaggctcccttcccctactcatcgcactaatttacactcacaacaccctaggctcactaaacattctactactcactctcactgcccaagaactatcaaactcctgagccaacaacttaatatgactagcttacacaatagcttttatagtaaagatacctctttacggactccacttatgactccctaaagcccatgtcgaagcccccatcgctgggtcaatagtacttgccgcagtactcttgaaactaggcggctatggtataatacgcctcacactcattctcaaccccctgacaaaacacatagcctaccccttccttgtactatccctatgaggcataattataacaagctccatctgcctacgacaaacagacctaaaatcgctcattgcatactcttcaatcagccacatagccctcgtagtaacagccattctcatccaaaccccctgaagcttcaccggcgcagtcattctcataatcgcccacggacttacatcctcattactattctgcctagcaaactcaaactacgaacgcactcacagtcgcatcataatcctctctcaaggacttcaaactctactcccactaatagctttttgatgacttctagcaagcctcgctaacctcgccttaccccccactattaacctactgggagaactctctgtgctagtaaccacgttctcctgatcaaatatcactctcctacttacaggactcaacatactagtcacagccctatactccctctacatatttaccacaacacaatggggctcactcacccaccacattaacaacataaaaccctcattcacacgagaaaacaccctcatgttcatacacctatcccccattctcctcctatccctcaaccccgacatcattaccgggttttcctcttgtaaatatagtttaaccaaaacatcagattgtgaatctgacaacagaggcttacgaccccttatttaccgagaaagctcacaagaactgctaactcatgcccccatgtctaacaacatggctttctcaacttttaaaggataacagctatccattggtcttaggccccaagaattttggtgcaactccaaataaaagtaataaccatgcacactactataaccaccctaaccctaacttccctaattccccccatccttaccaccctcgttaaccctaacaaaaaaaactcatacccccattatgtaaaatccattgtcgcatccacctttattatcagtctcttccccacaacaatattcatgtgcctagaccaagaagttattatctcgaactgacactgagccacaacccaaacaacccagctctccctaagcttcaaactagactacttctccataatattcatccctgtagcattgttcgttacatggtccatcatagaattctcactgtgatatataaactcagacccaaacattaatcagttcttcaaatatctactcatcttcctaattaccatactaatcttagttaccgctaacaacctattccaactgttcatcggctgagagggcgtaggaattatatccttcttgctcatcagttgatgatacgcccgagcagatgccaacacagcagccattcaagcaatcctatacaaccgtatcggcgatatcggtttcatcctcgccttagcatgatttatcctacactccaactcatgagacccacaacaaatagcccttctaaacgctaatccaagcctcaccccactactaggcctcctcctagcagcagcaggcaaatcagcccaattaggcctccacccctgactcccctcagccatagaaggccccaccccagtctcagccctactccactcaagcactatagttgtagcaggaatcttcttactcatccgcttccaccccctagcagaaaatagcccactaatccaaactctaacactatgcttaggcgctatcaccactctgttcgcagcagtctgcgcccttacacaaaatgacatcaaaaaaatcgtagccttctccacttcaagtcaactaggactcataatagttacaatcggcatcaaccaaccacacctagcattcctgcacatctgtacccacgccttcttcaaagccatactatttatgtgctccgggtccatcatccacaaccttaacaatgaacaagatattcgaaaaataggaggactactcaaaaccatacctctcacttcaacctccctcaccattggcagcctagcattagcaggaatacctttcctcacaggtttctactccaaagaccacatcatcgaaaccgcaaacatatcatacacaaacgcctgagccctatctattactctcatcgctacctccctgacaagcgcctatagcactcgaataattcttctcaccctaacaggtcaacctcgcttccccacccttactaacattaacgaaaataaccccaccctactaaaccccattaaacgcctggcagccggaagcctattcgcaggattcctcattactaacaacatttcccccgcatcccccttccaaacaacaatccccctctacctaaaactcacagccctcgctgtcactttcctaggacttctaacagccctagacctcaactacctaaccaacaaacttaaaataaaatccccactatgcacattttatttctccaacatactcggattctaccctagcatcacacaccgcacaatcccctatctaggccttcttacgagccaaaacctgcccctactcctcctagacctaacctgactagaaaagctattacctaaaacaatttcacagcaccaaatctccacctccatcatcacctcaacccaaaaaggcataattaaactttacttcctctctttcttcttcccactcatcctaaccctactcctaatcacataacctattcccccgagcaatctcaattacaatatatacaccaacaaacaatgttcaaccagtaactactactaatcaacgcccataatcatacaaagcccccgcaccaataggatcctcccgaatcaaccctgacccctctccttcataaattattcagcttcctacactattaaagtttaccacaaccaccaccccatcatactctttcacccacagcaccaatcctacctccatcgctaaccccactaaaacactcaccaagacctcaacccctgacccccatgcctcaggatactcctcaatagccatcgctgtagtatatccaaagacaaccatcattccccctaaataaattaaaaaaactattaaacccatataacctcccccaaaattcagaataataacacacccgaccacaccgctaacaatcaatactaaacccccataaataggagaaggcttagaagaaaaccccacaaaccccattactaaacccacactcaacagaaacaaagcatacatcattattctcgcacggactacaaccacgaccaatgatatgaaaaaccatcgttgtatttcaactacaagaacaccaatgaccccaatacgcaaaattaaccccctaataaaattaattaaccactcattcatcgacctccccaccccatccaacatctccgcatgatgaaacttcggctcactccttggcgcctgcctgatcctccaaatcaccacaggactattcctagccatgcactactcaccagacgcctcaaccgccttttcatcaatcgcccacatcactcgagacgtaaattatggctgaatcatccgctaccttcacgccaatggcgcctcaatattctttatctgcctcttcctacacatcgggcgaggcctatattacggatcatttctctactcagaaacctgaaacatcggcattatcctcctgcttgcaactatagcaacagccttcataggctatgtcctcccgtgaggccaaatatcattctgaggggccacagtaattacaaacttactatccgccatcccatacattgggacagacctagttcaatgaatctgaggaggctactcagtagacagtcccaccctcacacgattctttacctttcacttcatcttgcccttcattattgcagccctagcagcactccacctcctattcttgcacgaaacgggatcaaacaaccccctaggaatcacctcccattccgataaaatcaccttccacccttactacacaatcaaagacgccctcggcttacttctcttccttctctccttaatgacattaacactattctcaccagacctcctaggcgacccagacaattataccctagccaaccccttaaacacccctccccacatcaagcccgaatgatatttcctattcgcctacacaattctccgatccgtccctaacaaactaggaggcgtccttgccctattactatccatcctcatcctagcaataatccccatcctccatatatccaaacaacaaagcataatatttcgcccactaagccaatcactttattgactcctagccgcagacctcctcattctaacctgaatcggaggacaaccagtaagctacccctttaccatcattggacaagtagcatccgtactatacttcacaacaatcctaatcctaataccaactatctccctaattgaaaacaaaatactcaaatgggcctgtccttgtagtataaactagtacaccagtcttgtaaaccggagatgaaaacctttttccaaggacaaatcagagaaaaagtctttaactccaccattagcacccaaagctaagattctaatttaaactattctctgttctttcatggggaagcagatttgggtgccacccaagtattgactcacccatcaacaaccgctatgtatttcgtacattactgccagccaccatgaatattgtaccgtaccataaatacttgaccacctgtagtacataaaaacccaatccacatcaaaaccccccccccatgcttacaagcaagtacagcaatcaaccctcaactatcacacatcaactgcaactccaaagtcacccctcacccactaggataccaacaaacctacccacccttaacagtacatagtacataaagccatttaccgtacatagcacattacagtcaaatcccttctcgtccccatggatgacccccctcagataggggtcccttgaccaccatcctccgtgaaatcaatatcccgcacaagagtgctactctcctcgctccgggcccataacacttgggggtagctaaagtgaactgtatccgacatctggttcctacttcagggccataaagcctaaatagcccacacgttccccttaaataagacatcacgatg

SEQ ID NO: 462 - DNA, 16572 bp, Homo sapiens mitochondrial
  3110: "n" refers to a nucleotide at position 3107 of the Cambridge Reference Sequence (CRS, Anderson et al. 1981 Nature 290:457-465), later determined to be absent from the human mtDNA sequence according to the revised CRS (rCRS, Andrews et al. 1999 Nature Genetics 23:147); "n" therefore represents a single nucleotide deletion at a position corresponding to nucleotide 3107 of SEQ ID NO:1 as provided herein.
gatcacaggtctatcaccctattaaccactcacgggagctctccatgcatttggtattttcgtctggggggtgtgcacgcgatagcattgcgagacgctggagccggagcaccctatgtcgcagtatctgtctttgattcctgcctcatcccattatttatcgcacctacgttcaatattacaggcgaacatacttactaaagtgtgttaattaatcaatgcttgtaggacataataataacaattgaatgtctgcacagccgctttccacacagacatcataacaaaaaatttccaccaaaccccccctcccccgccttctggccacagcacttaaacatatctctgccaaaccccaaaaacaaagaaccctaacaccagcctaaccagatttcaaattttatcttttggcggtatgcacttttaacagtcaccccccaactaacacattattttcccctcccactcccatactactaatctcatcaatacaacccccgcccatcctgcccagcacacacacaccacgctgctaaccccataccccgaaccaaccaaaccccaaagacaccccccacagtttatgtagcttacctcctcaaagcaatacactgaaaatgtttagacgggctcacatcaccccataaacaaataggtttggtcctagcctttctattagctcttagtaagattacacatgcaagcatccccgttccagtgagttcaccctctaaatcaccacgatcaaaagggacaagcatcaagcacgcagcaatgcagctcaaaacgcttagcctagccacacccccacgggaaacagcagtgattaacctttagcaataaacgaaagtttaactaagctatactaaccccagggttggtcaatttcgtgccagccaccgcggtcacacgattaacccaagtcaatagaagccggcgtaaagagtgttttagatcaccccctccccaataaagctaaaactcacctgaattgtaaaaaactccagttgacacaaaatagactacgaaagtggctttaacatatctgaacacacaatagctaagacccaaactgggattagataccccactatgcttagccctaaacctcaacagttaaatcaacaaaactgctcgccagaacactacgagccacagcttaaaactcaaaggacctggcggtgcttcatatccctctagaggagcctgttctgtaatcgataaaccccgatcaacctcaccacctcttgctcagcctatataccgccatcttcagcaaaccctgatgaaggctacaaagtaagcgcaagtacccacgtaaagacgttaggtcaaggtgtagcccatgaggtggcaagaaatgggctacattttctaccccagaaaactacgatagcccttatgaaacttaagggtcgaaggtggatttagcagtaaactgagagtagagtgcttagttgaacagggccctgaagcgcgtacacaccgcccgtcaccctcctcaagtatacttcaaaggacatttaactaaaacccctacgcatttatatagaggagacaagtcgtaacatggtaagtgtactggaaagtgcacttggacgaaccagagtgtagcttaacacaaagcacccaacttacacttaggagatttcaacttaacttgaccgctctgagctaaacctagccccaaacccactccaccttactaccagacaaccttagccaaaccatttacccaaataaagtataggcgatagaaattgaaacctggcgcaatagatatagtaccgcaagggaaagatgaaaaattatagccaagcataatatagcaaggactaacccctataccttctgcataatgaattaactagaaataactttgcaaggagagccaaagctaagacccccgaaaccagacgagctacctaagaacagctaaaagagcacacccgtctatgtagcaaaatagtgggaagatttataggtagaggcgacaaacctaccgagcctggtgatagctggttgtccaagatagaatcttagttcaactttaaatttgcccacagaaccctctaaatccccttgtaaatttaactgttagtccaaagaggaacagctctttggacactaggaaaaaaccttgtagagagagtaaaaaatttaacacccatagtaggcctaaaagcagccaccaattaagaaagcgttcaagctcaacacccactacctaaaaaatcccaaacatataactgaactcctcacacccaattggaccaatctatcaccctatagaagaactaatgttagtataagtaacatgaaaacattctcctccgcataagcctgcgtcagattaaaacactgaactgacaattaacagcccaatatctacaatcaaccaacaagtcattattaccctcactgtcaacccaacacaggcatgctcataaggaaaggttaaaaaaagtaaaaggaactcggcaaatcttaccccgcctgtttaccaaaaacatcacctctagcatcaccagtattagaggcaccgcctgcccagtgacacatgtttaacggccgcggtaccctaaccgtgcaaaggtagcataatcacttgttccttaaatagggacctgtatgaatggctccacgagggttcagctgtctcttacttttaaccagtgaaattgacctgcccgtgaagaggcgggcatgacacagcaagacgagaagaccctatggagctttaatttattaatgcaaacagtacctaacaaacccacaggtcctaaactaccaaacctgcattaaaaatttcggttggggcgacctcggagcagaacccaacctccgagcagtacatgctaagacttcaccagtcaaagcgaactactatactcaattgatccaataacttgaccaacggaacaagttaccctagggataacagcgcaatcctattctagagtccatatcaacaatagggtttacgacctcgatgttggatcaggacatcccgatggtgcagccgctattaaaggttcgtttgttcaacgattaaagtcctacgtgatctgagttcagaccggagtaatccaggtcggtttctatctacnttcaaattcctccctgtacgaaaggacaagagaaataaggcctacttcacaaagcgccttcccccgtaaatgatatcatctcaacttagtattatacccacacccacccaagaacagggtttgttaagatggcagagcccggtaatcgcataaaacttaaaactttacagtcagaggttcaattcctcttcttaacaacatacccatggccaacctcctactcctcattgtacccattctaatcgcaatggcattcctaatgcttaccgaacgaaaaattctaggctatatacaactacgcaaaggccccaacgttgtaggcccctacgggctactacaacccttcgctgacgccataaaactcttcaccaaagagcccctaaaacccgccacatctaccatcaccctctacatcaccgccccgaccttagctctcaccatcgctcttctactatgaacccccctccccatacccaaccccctggtcaacctcaacctaggcctcctatttattctagccacctctagcctagccgtttactcaatcctctgatcagggtgagcatcaaactcaaactacgccctgatcggcgcactgcgagcagtagcccagacaatctcatatgaagtcaccctagccatcattctactatcaacattactaataagtggctcctttaacctctccacccttatcacaacacaagaacacctctgattactcctgccatcatgacccttggccataatatgatttatctccacactagcagagaccaaccgaacccccttcgaccttgccgaaggggagtccgaactagtctcaggcttcaacatcgaatacgccgcaggccccttcgccctattcttcatagccgaatacacaaacattattataataaacaccctcaccactacaatcttcctaggaacaacatatgacgcactctcccctgaactctacacaacatattttgtcaccaagaccctacttctaacctccctgttcttatgaattcgaacagcatacccccgattccgctacgaccaactcatacacctcctatgaaaaaacttcctaccactcaccctagcattacttatatgatatgtctccatacccattacaatctccagcattccccctcaaacctaagaaatatgtctgataaaagagttactttgatagagtaaataataggagcttaaacccccttatttctaggactatgagaatcgaacccatccctgagaatccaaaattctccgtgccacctatcacaccccatcctaaagtaaggtcagctaaataagctatcgggcccataccccgaaaatgttggttatacccttcccgtactaattaatcccctggcccaacccgtcatctactctaccatctttgcaggcacactcatcacagcgctaagctcgcactgattttttacctgagtaggcctagaaataaacatgctagcttttattccagttctaaccaaaaaaataaaccctcgttccacagaagctgccatcaagtatttcctcacgcaagcaaccgcatccataatccttctaatagctatcctcttcaacaatatactctccggacaatgaaccataaccaatactaccaatcaatactcatcattaataatcataatggctatagcaataaaactaggaatagccccctttcacttctgagtcccagaggttacccaaggcacccctctgacatccggcctgcttcttctcacatgacaaaaactagcccccatctcaatcatataccaaatctctccctcactaaacgtaagccttctcctcactctctcaatcttatccatcatagcaggcagttgaggtggattaaaccaaacccagctacgcaaaatcttagcatactcctcaattacccacataggatgaataatagcagttctaccgtacaaccctaacataaccattcttaatttaactatttatattatcctaactactaccgcattcctactactcaacttaaactccagcaccacgaccctactactatctcgcacctgaaacaagctaacatgactaacacccttaattccatccaccctcctctccctaggaggcctgcccccgctaaccggctttttgcccaaatgggccattatcgaagaattcacaaaaaacaatagcctcatcatccccaccatcatagccaccatcaccctccttaacctctacttctacctacgcctaatctactccacctcaatcacactactccccatgtctaacaacgtaaaaataaaatgacagtttgaacacacaaaacccaccccattcctccccacactcatcgcccttaccacgctactcctacctatctccccttttatactaataatcttatagaaatttaggttaaatacagaccaagagccttcaaagccctcagtaagttgcaatacttaatttctgtaacagctaaggactgcaaaaccccactctgcatcaactgaacgcaaatcagccactttaattaagctaagcccttactagaccaatgggacttaaacccacaaacacttagttaacagctaagcaccctaatcaactggcttcaatctacttctcccgccgccgggaaaaaaggcgggagaagccccggcaggtttgaagctgcttcttcgaatttgcaattcaatatgaaaatcacctcggagctggtaaaaagaggcctaacccctgtctttagatttacagtccaatgcttcactcagccattttacctcacccccactgatgttcgccgaccgttgactattctctacaaaccacaaagacattggaacactatacctattattcggcgcatgagctggagtcctaggcacagctctaagcctccttattcgagccgagctgggccagccaggcaaccttttaggtaacgaccacatctacaacgttatcgtcacagcccatgcatttgtaataatcttcttcatagtaatacccatcataatcggaggctttggcaactgactagtccccctaataatcggtgcccccgatatggcgtttccccgcataaacaacataagcttctgactcttacctccctctctcctactcctgctcgcatctgctatagtggaggccggagcaggaacaggttgaacagtctaccctcccttagcagggaactactcccaccctggagcctccgtagacctaaccatcttctccttacacctagcaggtgtctcctctatcttaggggccatcaatttcatcacaacaattatcaatataaaaccccctgccataacccaataccaaacgcccctcttcgtctgatccgtcctaatcacagcagtcctacttctcctatctctcccagtcctagctgctggcatcactatactactaacagaccgcaacctcaacaccaccttcttcgaccccgccggaggaggagaccccattctataccaacacctattctgatttttcggtcaccctgaagtttatattcttatcctaccaggcttcggaataatctcccatattgtaacttactactccggaaaaaaagaaccatttggatacataggtatggtctgagctatgatatcaattggcttcctagggtttatcgtgtgagcacaccatatatttacagtaggaatagacgtagacacacgagcatatttcacctccgctaccataatcatcgctatccccaccggcgtcaaagtatttagctgactcgccacactccacggaagcaatatgaaatgatctgctgcagtgctctgagccctaggattcatctttcttttcaccgtaggtggcctgactggcattgtattagcaaactcatcactagacatcgtactacacgacacgtactacgttgtagctcacttccactatgtcctatcaataggagctgtatttgccatcataggaggcttcattcactgatttcccctattctcaggttacaccctagaccaaacctacgccaaaatccatttcactatcatattcatcggcgtaaatctaactttcttcccacaacactttctcggcctatccggaatgccccgacgttactcggactaccccgatgcatacaccacatgaaacatcctatcatctgtaggctcattcatttctctaacagcagtaatattaataattttcatgatttgagaagccttcgcttcgaagcgaaaagtcctaatagtagaagaaccctccataaacctggagtgactatatggatgccccccaccctaccacacattcgaagaacccgtatacataaaatctagacaaaaaaggaaggaatcgaaccccccaaagctggtttcaagccaaccccatggcctccatgactttttcaaaaaggtattagaaaaaccatttcataactttgtcaaagttaaattataggctaaatcctatatatcttaatggcacatgcagcgcaagtaggtctacaagacgctacttcccctatcatagaagagcttatcacctttcatgatcacgccctcataatcattttccttatctgcttcctagtcctgtatgcccttttcctaacactcacaacaaaactaactaatactaacatctcagacgctcaggaaatagaaaccgtctgaactatcctgcccgccatcatcctagtcctcatcgccctcccatccctacgcatcctttacataacagacgaggtcaacgatccctcccttaccatcaaatcaattggccaccaatggtactgaacctacgagtacaccgactacggcggactaatcttcaactcctacatacttcccccattattcctagaaccaggcgacctgcgactccttgacgttgacaatcgagtagtactcccgattgaagcccccattcgtataataattacatcacaagacgtcttgcactcatgagctgtccccacattaggcttaaaaacagatgcaattcccggacgtctaaaccaaaccactttcaccgctacacgaccgggggtatactacggtcaatgctctgaaatctgtggagcaaaccacagtttcatgcccatcgtcctagaattaattcccctaaaaatctttgaaatagggcccgtatttaccctatagcaccccctctaccccctctagagcccactgtaaagctaacttagcattaaccttttaagttaaagattaagagaaccaacacctctttacagtgaaatgccccaactaaatactaccgtatggcccaccataattacccccatactccttacactattcctcatcacccaactaaaaatattaaacacaaactaccacctacctccctcaccaaagcccataaaaataaaaaattataacaaaccctgagaaccaaaatgaacgaaaatctgttcgcttcattcattgcccccacaatcctaggcctacccgccgcagtactgatcattctatttccccctctattgatccccacctccaaatatctcatcaacaaccgactaatcaccacccaacaatgactaatcaaactaacctcaaaacaaatgataaccatacacaacactaaaggacgaacctgatctcttatactagtatccttaatcatttttattgccacaactaacctcctcggactcctgcctcactcatttacaccaaccacccaactatctataaacctagccatggccatccccttatgagcgggcgcagtgattataggctttcgctctaagattaaaaatgccctagcccacttcttaccacaaggcacacctacaccccttatccccatactagttattatcgaaaccatcagcctactcattcaaccaatagccctggccgtacgcctaaccgctaacattactgcaggccacctactcatgcacctaattggaagcgccaccctagcaatatcaaccattaaccttccctctacacttatcatcttcacaattctaattctactgactatcctagaaatcgctgtcgccttaatccaagcctacgttttcacacttctagtaagcctctacctgcacgacaacacataatgacccaccaatcacatgcctatcatatagtaaaacccagcccatgacccctaacaggggccctctcagccctcctaatgacctccggcctagccatgtgatttcacttccactccataacgctcctcatactaggcctactaaccaacacactaaccatataccaatgatggcgcgatgtaacacgagaaagcacataccaaggccaccacacaccacctgtccaaaaaggccttcgatacgggataatcctatttattacctcagaagtttttttcttcgcaggatttttctgagccttttaccactccagcctagcccctaccccccaattaggagggcactggcccccaacaggcatcaccccgctaaatcccctagaagtcccactcctaaacacatccgtattactcgcatcaggagtatcaatcacctgagctcaccatagtctaatagaaaacaaccgaaaccaaataattcaagcactgcttattacaattttactgggtctctattttaccctcctacaagcctcagagtacttcgagtctcccttcaccatttccgacggcatctacggctcaacattttttgtagccacaggcttccacggacttcacgtcattattggctcaactttcctcactatctgcttcatccgccaactaatatttcactttacatccaaacatcactttggcttcgaagccgccgcctgatactggcattttgtagatgtggtttgactatttctgtatgtctccatctattgatgagggtcttactcttttagtataaatagtaccgttaacttccaattaactagttttgacaacattcaaaaaagagtaataaacttcgccttaattttaataatcaacaccctcctagccttactactaataattattacattttgactaccacaactcaacggctacatagaaaaatccaccccttacgagtgcggcttcgaccctatatcccccgcccgcgtccctttctccataaaattcttcttagtagctattaccttcttattatttgatctagaaattgccctccttttacccctaccatgagccctacaaacaactaacctgccactaatagttatgtcatccctcttattaatcatcatcctagccctaagtctggcctatgagtgactacaaaaaggattagactgaaccgaattggtatatagtttaaacaaaacgaatgatttcgactcattaaattatgataatcatatttaccaaatgcccctcatttacataaatattatactagcatttaccatctcacttctaggaatactagtatatcgctcacacctcatatcctccctactatgcctagaaggaataatactatcgctgttcattatagctactctcataaccctcaacacccactccctcttagccaatattgtgcctattgccatactagtctttgccgcctgcgaagcagcggtgggcctagccctactagtctcaatctccaacacatatggcctagactacgtacataacctaaacctactccaatgctaaaactaatcgtcccaacaattatattactaccactgacatgactttccaaaaaacacataatttgaatcaacacaaccacccacagcctaattattagcatcatccctctgctattttttaaccaaatcaacaacaacctatttagctgttccccaaccttttcctccgaccccctaacaacccccctcctaatactaactacctgactcctacccctcacaatcatggcaagccaacgccacttatccagtgaaccactatcacgaaaaaaactctacctctctatactaatctccctacaaatctccttaattataacattcacagccacagaactaatcatattttatatcttcttcgaaaccacacttatccccaccttggctatcatcacccgatgaggcaaccagccagaacgcctgaacgcaggcacatacttcctattctacaccctagtaggctcccttcccctactcatcgcactaatttacactcacaacaccctaggctcactaaacattctactactcactctcactgcccaagaactatcaaactcctgagccaacaacttaatatgactagcttacacaatagcttttatagtaaagatacctctttacggactccacttatgactccctaaagcccatgtcgaagcccccatcgctgggtcaatagtacttgccgcagtactcttgaaactaggcggctatggtataatacgcctcacactcattctcaaccccctgacaaaacacatagcctaccccttccttgtactatccctatgaggcataattataacaagctccatctgcctacgacaaacagacctaaaatcgctcattgcatactcttcaatcagccacatagccctcgtagtaacagccattctcatccaaaccccctgaagcttcaccggcgcagtcattctcataatcgcccacggacttacatcctcattactattctgcctagcaaactcaaactacgaacgcactcacagtcgcatcataatcctctctcaaggacttcaaactctactcccactaatagctttttgatgacttctagcaagcctcgctaacctcgccttaccccccactattaacctactgggagaactctctgtgctagtaaccacgttctcctgatcaaatatcactctcctacttacaggactcaacatactagtcacagccctatactccctctacatatttaccacaacacaatggggctcactcacccaccacattaacaacataaaaccctcattcacacgagaaaacaccctcatgttcatacacctatcccccattctcctcctatccctcaaccccgacatcattaccgggttttcctcttgtaaatatagtttaaccaaaacatcagattgtgaatctgacaacagaggcttacgaccccttatttaccgagaaagctcacaagaactgctaactcatgcccccatgtctaacaacatggctttctcaacttttaaaggataacagctatccattggtcttaggccccaagaattttggtgcaactccaaataaaagtaataaccatgcacactactataaccaccctaaccctaacttccctaattccccccatccttaccaccctcgttaaccctaacaaaaaaaactcatacccccattatgtaaaatccattgtcgcatccacctttattatcagtctcttccccacaacaatattcatgtgcctagaccaagaagttattatctcgaactgacactgagccacaacccaaacaacccagctctccctaagcttcaaactagactacttctccataatattcatccctgtagcattgttcgttacatggtccatcatagaattctcactgtgatatataaactcagacccaaacattaatcagttcttcaaatatctactcatcttcctaattaccatactaatcttagttaccgctaacaacctattccaactgttcatcggctgagagggcgtaggaattatatccttcttgctcatcagttgatgatacgcccgagcagatgccaacacagcagccattcaagcaatcctatacaaccgtatcggcgatatcggtttcatcctcgccttagcatgatttatcctacactccaactcatgagacccacaacaaatagcccttctaaacgctaatccaagcctcaccccactactaggcctcctcctagcagcagcaggcaaatcagcccaattaggcctccacccctgactcccctcagccatagaaggccccaccccagtctcagccctactccactcaagcactatagttgtagcaggaatcttcttactcatccgcttccaccccctagcagaaaatagcccactaatccaaactctaacactatgcttaggcgctatcaccactctgttcgcagcagtctgcgcccttacacaaaatgacatcaaaaaaatcgtagccttctccacttcaagtcaactaggactcataatagttacaatcggcatcaaccaaccacacctagcattcctgcacatctgtacccacgccttcttcaaagccatactatttatgtgctccgggtccatcatccacaaccttaacaatgaacaagatattcgaaaaataggaggactactcaaaaccatacctctcacttcaacctccctcaccattggcagcctagcattagcaggaatacctttcctcacaggtttctactccaaagaccacatcatcgaaaccgcaaacatatcatacacaaacgcctgagccctatctattactctcatcgctacctccctgacaagcgcctatagcactcgaataattcttctcaccctaacaggtcaacctcgcttccccacccttactaacattaacgaaaataaccccaccctactaaaccccattaaacgcctggcagccggaagcctattcgcaggattcctcattactaacaacatttcccccgcatcccccttccaaacaacaatccccctctacctaaaactcacagccctcgctgtcactttcctaggacttctaacagccctagacctcaactacctaaccaacaaacttaaaataaaatccccactatgcacattttatttctccaacatactcggattctaccctagcatcacacaccgcacaatcccctatctaggccttcttacgagccaaaacctgcccctactcctcctagacctaacctgactagaaaagctattacctaaaacaatttcacagcaccaaatctccacctccatcatcacctcaacccaaaaaggcataattaaactttacttcctctctttcttcttcccactcatcctaaccctactcctaatcacataacctattcccccgagcaatctcaattacaatatatacaccaacaaacaatgttcaaccagtaactactactaatcaacgcccataatcatacaaagcccccgcaccaataggatcctcccgaatcaaccctgacccctctccttcataaattattcagcttcctacactattaaagtttaccacaaccaccaccccatcatactctttcacccacagcaccaatcctacctccatcgctaaccccactaaaacactcaccaagacctcaacccctgacccccatgcctcaggatactcctcaatagccatcgctgtagtatatccaaagacaaccatcattccccctaaataaattaaaaaaactattaaacccatataacctcccccaaaattcagaataataacacacccgaccacaccgctaacaatcaatactaaacccccataaataggagaaggcttagaagaaaaccccacaaaccccattactaaacccacactcaacagaaacaaagcatacatcattattctcgcacggactacaaccacgaccaatgatatgaaaaaccatcgttgtatttcaactacaagaacaccaatgaccccaatacgcaaaactaaccccctaataaaattaattaaccactcattcatcgacctccccaccccatccaacatctccgcatgatgaaacttcggctcactccttggcgcctgcctgatcctccaaatcaccacaggactattcctagccatgcactactcaccagacgcctcaaccgccttttcatcaatcgcccacatcactcgagacgtaaattatggctgaatcatccgctaccttcacgccaatggcgcctcaatattctttatctgcctcttcctacacatcgggcgaggcctatattacggatcatttctctactcagaaacctgaaacatcggcattatcctcctgcttgcaactatagcaacagccttcataggctatgtcctcccgtgaggccaaatatcattctgaggggccacagtaattacaaacttactatccgccatcccatacattgggacagacctagttcaatgaatctgaggaggctactcagtagacagtcccaccctcacacgattctttacctttcacttcatcttgcccttcattattgcagccctagcagcactccacctcctattcttgcacgaaacgggatcaaacaaccccctaggaatcacctcccattccgataaaatcaccttccacccttactacacaatcaaagacgccctcggcttacttctcttccttctctccttaatgacattaacactattctcaccagacctcctaggcgacccagacaattataccctagccaaccccttaaacacccctccccacatcaagcccgaatgatatttcctattcgcctacacaattctccgatccgtccctaacaaactaggaggcgtccttgccctattactatccatcctcatcctagcaataatccccatcctccatatatccaaacaacaaagcataatatttcgcccactaagccaatcactttattgactcctagccgcagacctcctcattctaacctgaatcggaggacaaccagtaagctacccctttaccatcattggacaagtagcatccgtactatacttcacaacaatcctaatcctaataccaactatctccctaattgaaaacaaaatactcaaatgggcctgtccttgtagtataaactagtacaccagtcttgtaaaccggagatgaaaacctttttccaaggacaaatcagagaaaaagtctttaactccaccattagcacccaaagctaagattctaatttaaactattctctgttctttcatggggaagcagatttgggtgccacccaagtattgactcacccatcaacaaccgctatgtatttcgtacattactgccagccaccatgaatattgtaccgtaccataaatacttgaccacctgtagtacataaaaacccaatccacatcaaaaccccccccccatgcttacaagcaagtacagcaatcaaccctcaactatcacacatcaactgcaactccaaagtcacccctcacccactaggataccaacaaacctacccacccttaacagtacatagtacataaagccatttaccgtacatagcacattacagtcaaatcccttctcgtccccatggatgacccccctcagataggggtcccttgaccaccatcctccgtgaaatcaatatcccgcacaagagtgctactctcctcgctccgggcccataacacttgggggtagctaaagtgaactgtatccgacatctggttcctacttcagggccataaagcctaaatagcccacacgttccccttaaataagacatcacgatg

SEQ ID NO: 463 - DNA, 16573 bp, Homo sapiens mitochondrial
  3111: "n" refers to a nucleotide at position 3107 of the Cambridge Reference Sequence (CRS, Anderson et al. 1981 Nature 290:457-465), later determined to be absent from the human mtDNA sequence according to the revised CRS (rCRS, Andrews et al. 1999 Nature Genetics 23:147); "n" therefore represents a single nucleotide deletion at a position corresponding to nucleotide 3107 of SEQ ID NO:1 as provided herein.
gatcacaggtctatcaccctattaaccactcacgggagctctccatgcatttggtattttcgtctggggggtatgcacgcgatagcattgcgagacgctggagccggagcaccctatgtcgcagtatctgtctttgattcctgcctcatcccattatttatcgcacctacgttcaatattacaggcgaacatacttactaaagtgtgttaattaattaatgcttgtaggacataataataacaattgaatgtctgcacagccgctttccacacagacatcataacaaaaaatttccaccaaaccccccctcccccccgcttctggccacagcacttaaacacatctctgccaaaccccaaaaacaaagaaccctaacaccagcctaaccagatttcaaattttatcttttggcggtatgcacttttaacagtcaccccccaactaacacattattttcccctcccactcccatactactaatctcatcaatacaacccccgcccatcctacccagcacacacacaccacgctgctaaccccataccccgaaccaaccaaaccccaaagacaccccccacagtttatgtagcttacctcctcaaagcaatacactgaaaatgtttagacgggctcacatcaccccataaacaaataggtttggtcctagcctttctattagctcttagtaagattacacatgcaagcatccccgttccagtgagttcaccctctaaatcaccacgatcaaaagggacaagcatcaagcacgcagcaatgcagctcaaaacgcttagcctagccacacccccacgggaaacagcagtgattaacctttagcaataaacgaaagtttaactaagctatactaaccccagggttggtcaatttcgtgccagccaccgcggtcacacgattaacccaagtcaatagaagccggcgtaaagagtgttttagatcaccccctccccaataaagctaaaactcacctgagttgtaaaaaactccagttgacacaaaatagactacgaaagtggctttaacatatctgaacacacaatagctaagacccaaactgggattagataccccactatgcttagccctaaacctcaacagttaaatcaacaaaactgctcgccagaacactacgagccacagcttaaaactcaaaggacctggcggtgcttcatatccctctagaggagcctgttctgtaatcgataaaccccgatcaacctcaccacctcttgctcagcctatataccgccatcttcagcaaaccctgatgaaggctacaaagtaagcgcaagtacccacgtaaagacgttaggtcaaggtgtagcccatgaggtggcaagaaatgggctacattttctaccccagaaaactacgatagcccttatgaaacttaagggtcgaaggtggatttagcagtaaactgagagtagagtgcttagttgaacagggccctgaagcgcgtacacaccgcccgtcaccctcctcaagtatacttcaaaggacatttaactaaaacccctacgcatttatatagaggagacaagtcgtaacatggtaagtgtactggaaagtgcacttggacgaaccagagtgtagcttaacacaaagcacccaacttacacttaggagatttcaacttaacttgaccgctctgagctaaacctagccccaaacccactccaccttactaccagacaaccttagccaaaccatttacccaaataaagtataggcgatagaaattgaaacctggcgcaatagatatagtaccgcaagggaaagatgaaaaattataaccaagcataatatagcaaggactaacccctataccttctgcataatgaattaactagaaataactttgcaaggagagccaaagctaagacccccgaaaccagacgagctacctaagaacagctaaaagagcacacccgtctatgtagcaaaatagtgggaagatttataggtagaggcgacaaacctaccgagcctggtgatagctggttgtccaagatagaatcttagttcaactttaaatttgcccacagaaccctctaaatccccttgtaaatttaactgttagtccaaagaggaacagctctttggacactaggaaaaaaccttgtagagagagtaaaaaatttaacacccatagtaggcctaaaagcagccaccaattaagaaagcgttcaagctcaacacccactacctaaaaaatcccaaacatataactgaactcctcacacccaattggaccaatctatcaccctatagaagaactaatgttagtataagtaacatgaaaacattctcctccgcataagcctgcgtcagattaaaacactgaactgacaattaacagcccaatatctacaatcaaccaacaagtcattattaccctcactgtcaacccaacacaggcatgctcataaggaaaggttaaaaaaagtaaaaggaactcggcaaatcttaccccgcctgtttaccaaaaacatcacctctagcatcaccagtattagaggcaccgcctgcccagtgacacatgtttaacggccgcggtaccctaaccgtgcaaaggtagcataatcacttgttccttaaatagggacctgtatgaatggctccacgagggttcagctgtctcttacttttaaccagtgaaattgacctgcccgtgaagaggcgggcataacacagcaagacgagaagaccctatggagctttaatttattaatgcaaacagtacctaacaaacccacaggtcctaaactaccaaacctgcattaaaaatttcggttggggcgacctcggagcagaacccaacctccgagcagtacatgctaagacttcaccagtcaaagcgaactactatactcaattgatccaataacttgaccaacggaacaagttaccctagggataacagcgcaatcctattctagagtccatatcaacaatagggtttacgacctcgatgttggatcaggacatcccgatggtgcagccgctattaaaggttcgtttgttcaacgattaaagtcctacgtgatctgagttcagaccggagtaatccaggtcggtttctatctacnttcaaattcctccctgtacgaaaggacaagagaaataaggcctacttcacaaagcgccttcccccgtaaatgatatcatctcaacttagtattatacccacacccacccaagaacagggtttgttaagatggcagagcccggtaatcgcataaaacttaaaactttacagtcagaggttcaattcctcttcttaacaacatacccatggccaacctcctactcctcattgtacccattctaatcgcaatggcattcctaatgcttaccgaacgaaaaattctaggctatatacaactacgcaaaggccccaacgttgtaggcccctacgggctactacaacccttcgctgacgccataaaactcttcaccaaagagcccctaaaacccgccacatctaccatcaccctctacatcaccgccccgaccttagctctcaccatcgctcttctactatgaacccccctccccatacccaaccccctggtcaacctcaacctaggcctcctatttattctagccacctctagcctagccgtttactcaatcctctgatcagggtgagcatcaaactcaaactacgccctgatcggcgcactgcgagcagtagcccaaacaatctcatatgaagtcaccctagccatcattctactatcaacattactaataagtggctcctttaacctctccacccttatcacaacacaagaacacctctgattactcctgccatcatgacccttggccataatatgatttatctccacactagcagagaccaaccgaacccccttcgaccttgccgaaggggagtccgaactagtctcaggcttcaacatcgaatacgccgcaggccccttcgccctattcttcatagccgaatacacaaacattattataataaacaccctcaccactacaatcttcctaggaacaacatatgacgcactctcccctgaactctacacaacatattttgtcaccaagaccctacttctaacctccctgttcttatgaattcgaacagcatacccccgattccgctacgaccaactcatacacctcctatgaaaaaacttcctaccactcaccctagcattacttatatgatatgtctccatacccattacaatctccagcattccccctcaaacctaagaaatatgtctgataaaagagttactttgatagagtaaataataggagcttaaacccccttatttctaggactatgagaatcgaacccatccctgagaatccaaaattctccgtgccacctatcacaccccatcctaaagtaaggtcagctaaataagctatcgggcccataccccgaaaatgttggttatacccttcccgtactaattaatcccctggcccaacccgtcatctactctaccatctttgcaggcacactcatcacagcgctaagctcgcactgattttttacctgagtaggcctagaaataaacatgctagcttttattccagttctaaccaaaaaaataaaccctcgttccacagaagctgccatcaagtatttcctcacgcaagcaaccgcatccataatccttctaatagctatcctcttcaacaatatactctccggacaatgaaccataaccaatactaccaatcaatactcatcattaataatcataatggctatagcaataaaactaggaatagccccctttcacttctgagtcccagaggttacccaaggcacccctctgacatccggcctgcttcttctcacatgacaaaaactagcccccatctcaatcatataccaaatctctccctcactaaacgtaagccttctcctcactctctcaatcttatccatcatagcaggcagttgaggtggattaaaccaaacccagctacgcaaaatcttagcatactcctcaattacccacataggatgaataatagcagttctaccgtacaaccctaacataaccattcttaatttaactatttatattatcctaactactaccgcattcctactactcaacttaaactccagcaccacgaccctactactatctcgcacctgaaacaagctaacatgactaacacccttaattccatccaccctcctctccctaggaggcctgcccccgctaaccggctttttgcccaaatgggccattatcgaagaattcacaaaaaacaatagcctcatcatccccaccatcatagccaccatcaccctccttaacctctacttctacctacgcctaatctactccacctcaatcacactactccccatatctaacaacgtaaaaataaaatgacagtttgaacatacaaaacccaccccattcctccccacactcatcgcccttaccacgctactcctacctatctccccttttatactaataatcttatagaaatttaggttaaatacagaccaagagccttcaaagccctcagtaagttgcaatacttaatttctgtaacagctaaggactgcaaaaccccactctgcatcaactgaacgcaaatcagccactttaattaagctaagcccttactagaccaatgggacttaaacccacaaacacttagttaacagctaagcaccctaatcaactggcttcaatctacttctcccgccgccgggaaaaaaggcgggagaagccccggcaggtttgaagctgcttcttcgaatttgcaattcaatatgaaaatcacctcggagctggtaaaaagaggcctaacccctgtctttagatttacagtccaatgcttcactcagccattttacctcacccccactgatgttcgccgaccgttgactattctctacaaaccacaaagacattggaacactatacctattattcggcgcatgagctggagtcctaggcacagctctaagcctccttattcgagccgagctgggccagccaggcaaccttctaggtaacgaccacatctacaacgttatcgtcacagcccatgcatttgtaataatcttcttcatagtaatacccatcataatcggaggctttggcaactgactagttcccctaataatcggtgcccccgatatggcgtttccccgcataaacaacataagcttctgactcttacctccctctctcctactcctgctcgcatctgctatagtggaggccggagcaggaacaggttgaacagtctaccctcccttagcagggaactactcccaccctggagcctccgtagacctaaccatcttctccttacacctagcaggtgtctcctctatcttaggggccatcaatttcatcacaacaattatcaatataaaaccccctgccataacccaataccaaacgcccctcttcgtctgatccgtcctaatcacagcagtcctacttctcctatctctcccagtcctagctgctggcatcactatactactaacagaccgcaacctcaacaccaccttcttcgaccccgccggaggaggagaccccattctataccaacacctattctgatttttcggtcaccctgaagtttatattcttatcctaccaggcttcggaataatctcccatattgtaacttactactccggaaaaaaagaaccatttggatacataggtatggtctgagctatgatatcaattggcttcctagggtttatcgtgtgagcacaccacatatttacagtaggaatagacgtagacacacgagcatatttcacctccgctaccataatcatcgctatccccaccggcgtcaaagtatttagctgactcgccacactccacggaagcaatatgaaatgatctgctgcagtgctctgagccctaggattcatctttcttttcaccgtaggtggcctgactggcattgtattagcaaactcatcactagacatcgtactacacgacacgtactacgttgtagcccacttccactatgtcctatcaataggagctgtatttgccatcataggaggcttcattcactgatttcccctattctcaggctacaccctagaccaaacctacgccaaaatccatttcactatcatattcatcggcgtaaatctaactttcttcccacaacactttctcggcctatccggaatgccccgacgttactcggactaccccgatgcatacaccacatgaaacatcctatcatctgtaggctcattcatttctctaacagcagtaatattaataattttcatgatttgagaagccttcgcttcgaagcgaaaagtcctaatagtagaagaaccctccataaacctggagtgactatatggatgccccccaccctaccacacattcgaagaacccgtatacataaaatctagacaaaaaaggaaggaatcgaaccccccaaagctggtttcaagccaaccccatggcctccatgactttttcaaaaaggtattagaaaaaccatttcataactttgtcaaagttaaattataggctaaatcctatatatcttaatggcacatgcagcgcaagtaggtctacaagacgctacttcccctatcatagaagagcttatcacctttcatgatcacgccctcataatcattttccttatctgcttcctagtcctgtatgcccttttcctaacactcacaacaaaactaactaatactaacatctcagacgctcaggaaatagaaaccgtctgaactatcctgcccgccatcatcctagtcctcatcgccctcccatccctacgcatcctttacataacagacgaggtcaacgatccctcccttaccatcaaatcaattggccaccaatggtactgaacctacgagtacaccgactacggcggactaatcttcaactcctacatacttcccccattattcctagaaccaggcgacctgcgactccttgacgttgacaatcgagtagtactcccgattgaagcccccattcgtataataattacatcacaagacgtcttgcactcatgagctgtccccacattaggcttaaaaacagatgcaattcccggacgtctaaaccaaaccactttcaccgctacacgaccgggggtatactacggtcaatgctctgaaatctgtggagcaaaccacagtttcatgcccatcgtcctagaattaattcccctaaaaatctttgaaatagggcccgtatttaccctatagcaccccctctaccccctctagagcccactgtaaagctaacttagcattaaccttttaagttaaagattaagagaaccaacacctctttacagtgaaatgccccaactaaatactaccgtatggcccaccataattacccccatactccttacactattcctcatcacccaactaaaaatattaaacacaaactaccacctacctccctcaccaaagcccataaaaataaaaaattataacaaaccctgagaaccaaaatgaacgaaaatctgttcgcttcattcattgcccccacaatcctaggcctacccgccgcagtactgatcattctatttccccctctattgatccccacctccaaatatctcatcaacaaccgactaatcaccacccaacaatgactaatcaaactaacctcaaaacaaatgataaccatacacaacactaaaggacgaacctgatctcttatactagtatccttaatcatttttattgccacaactaacctcctcggactcctgcctcactcatttacaccaaccacccaactatctataaacctagccatggccatccccttatgagcgggcgcagtgattataggctttcgctctaagattaaaaatgccctagcccacttcttaccacaaggcacacctacaccccttatccccatactagttattatcgaaaccatcagcctactcattcaaccaatagccctggccgtacgcctaaccgctaacattactgcaggccacctactcatgcacctaattggaagcgccaccctagcaatatcaaccattaaccttccctctacacttatcatcttcacaattctaattctactgactatcctagaaatcgctgtcgccttaatccaagcctacgttttcacacttctagtaagcctctacctgcacgacaacacataatgacccaccaatcacatgcctatcatatagtaaaacccagcccatgacccctaacaggggccctctcagccctcctaatgacctccggcctagccatgtgatttcacttccactccataacgctcctcatactaggcctactaaccaacacactaaccatataccaatgatggcgcgatgtaacacgagaaagcacataccaaggccaccacacaccacctgtccaaaaaggccttcgatacgggataatcctatttattacctcagaagtttttttcttcgcaggatttttctgagccttttaccactccagcctagcccctaccccccaattaggagggcactggcccccaacaggcatcaccccgctaaatcccctagaagtcccactcctaaacacatccgtattactcgcatcaggagtatcaatcacctgagctcaccatagtctaatagaaaacaaccgaaaccaaataattcaagcactgcttattacaattttactgggtctctattttaccctcctacaagcctcagagtacttcgagtctcccttcaccatttccgacggcatctacggctcaacattttttgtagccacaggcttccacggacttcacgtcattattggctcaactttcctcactatctgcttcatccgccaactaatatttcactttacatccaaacatcactttggcttcgaagccgccgcctgatactggcattttgtagatgtggtttgactatttctgtatgtctccatctattgatgagggtcttactcttttagtataaatagtaccgttaacttccaattaactagttttgacaacattcaaaaaagagtaataaacttcgccttaattttaataatcaacaccctcctagccttactactaataattattacattttgactaccacaactcaacggctacatagaaaaatccaccccttacgagtgcggcttcgaccctatatcccccgcccgcgtccctttctccataaaattcttcttagtagctattaccttcttattatttgatctagaaattgccctccttttacccctaccatgagccctacaaacaactaacctgccactaatagttatgtcatccctcttattaatcatcatcctagccctaagtctggcctatgagtgactacaaaaaggattagactgaaccgaattggtatatagtttaaacaaaacgaatgatttcgactcattaaattatgataatcatatttaccaaatgcccctcatttacataaatattatactagcatttaccatctcacttctaggaatactagtatatcgctcacacctcatatcctccctactatgcctagaaggaataatactatcgctgttcattatagctactctcataaccctcaacacccactccctcttagccaatattgtgcctattgccatactagtctttgccgcctgcgaagcagcggtgggcctagccctactagtctcaatctccaacacatatggcctagactacgtacataacctaaacctactccaatgctaaaactaatcgtcccaacaattatattactaccactgacatgactttccaaaaaacacataatttgaatcaacacaaccacccacagcctaattattagcatcatccctctactattttttaaccaaatcaacaacaacctatttagctgttccccaaccttttcctccgaccccctaacaacccccctcctaatactaactacctgactcctacccctcacaatcatggcaagccaacgccacttatccagtgaaccactatcacgaaaaaaactctacctctctatactaatctccctacaaatctccttaattataacattcacagccacagaactaatcatattttatatcttcttcgaaaccacacttatccccaccttggctatcatcacccgatgaggcaaccagccagaacgcctgaacgcaggcacatacttcctattctacaccctagtaggctcccttcccctactcatcgcactaatttacactcacaacaccctaggctcactaaacattctactactcactctcactgcccaagaactatcaaactcctgagccaacaacttaatatgactagcttacacaatagcttttatagtaaagatacctctttacggactccacttatgactccctaaagcccatgtcgaagcccccatcgctgggtcaatagtacttgccgcagtactcttaaaactaggcggctatggtataatacgcctcacactcattctcaaccccctgacaaaacacatagcctaccccttccttgtactatccctatgaggcataattataacaagctccatctgcctacgacaaacagacctaaaatcgctcattgcatactcttcaatcagccacatagccctcgtagtaacagccattctcatccaaaccccctgaagcttcaccggcgcagtcattctcataatcgcccacgggcttacatcctcattactattctgcctagcaaactcaaactacgaacgcactcacagtcgcatcataatcctctctcaaggacttcaaactctactcccactaatagctttttgatgacttctagcaagcctcgctaacctcgccttaccccccactattaacctactgggagaactctctgtgctagtaaccacgttctcctgatcaaatatcactctcctacttacaggactcaacatactagtcacagccctatactccctctacatatttaccacaacacaatggggctcactcacccaccacattaacaacataaaaccctcattcacacgagaaaacaccctcatgttcatacacctatcccccattctcctcctatccctcaaccccgacatcattaccgggttttcctcttgtaaatatagtttaaccaaaacatcagattgtgaatctgacaacagaggcttacgaccccttatttaccgagaaagctcacaagaactgctaactcatgcccccatgtctaacaacatggctttctcaacttttaaaggataacagctatccattggtcttaggccccaaaaattttggtgcaactccaaataaaagtaataaccatgcacactactataaccaccctaaccctgacttccctaattccccccatccttaccaccctcgttaaccctaacaaaaaaaactcatacccccattatgtaaaatccattgtcgcatccacctttattatcagtctcttccccacaacaatattcatgtgcctagaccaagaagttattatctcgaactgacactgagccacaacccaaacaacccagctctccctaagcttcaaactagactacttctccataatattcatccctgtagcattgttcgttacatggtccatcatagaattctcactgtgatatataaactcagacccaaacattaatcagttcttcaaatatctactcatcttcctaattaccatactaatcttagttaccgctaacaacctattccaactgttcatcggctgagagggcgtaggaattatatccttcttgctcatcagttgatgatacgcccgagcagatgccaacacagcagccattcaagcaatcctatacaaccgtatcggcgatatcggtttcatcctcgccttagcatgatttatcctacactccaactcatgagacccacaacaaatagcccttctaaacgctaatccaagcctcaccccactactaggcctcctcctagcagcagcaggcaaatcagcccaattaggtctccacccctgactcccctcagccatagaaggccccaccccagtctcagccctactccactcaagcactatagttgtagcaggaatcttcttactcatccgcttccaccccctagcagaaaatagcccactaatccaaactctaacactatgcttaggcgctatcaccactctgttcgcagcagtctgcgcccttacacaaaatgacatcaaaaaaatcgtagccttctccacttcaagtcaactaggactcataatagttacaatcggcatcaaccaaccacacctagcattcctgcacatctgtacccacgccttcttcaaagccatactatttatgtgctccgggtccatcatccacaaccttaacaatgaacaagatattcgaaaaataggaggactactcaaaaccatacctctcacttcaacctccctcaccattggcagcctagcattagcaggaatacctttcctcacaggtttctactccaaagaccacatcatcgaaaccgcaaacatatcatacacaaacgcctgagccctatctattactctcatcgctacctccctgacaagcgcctatagcactcgaataattcttctcaccctaacaggtcaacctcgcttccccacccttactaacattaacgaaaataaccccaccctactaaaccccattaaacgcctggcagccggaagcctattcgcaggatttctcattactaacaacatttcccccgcatcccccttccaaacaacaatccccctctacctaaaactcacagccctcgctgtcactttcctaggacttctaacagccctagacctcaactacctaaccaacaaacttaaaataaaatccccactatgcacattttatttctccaacatactcggattctaccctagcatcacacaccgcacaatcccctatctaggccttcttacgagccaaaacctgcccctactcctcctagacctaacctgactagaaaagctattacctaaaacaatttcacagcaccaaatctccacctccatcatcacctcaacccaaaaaggcataattaaactttacttcctctctttcttcttcccactcatcctaaccctactcctaatcacataacctattcccccgagcaatctcaattacaatatatacaccaacaaacaatgttcaaccagtaactactactaatcaacgcccataatcatacaaagcccccgcaccaataggatcctcccgaatcaaccctgacccctctccttcataaattattcagcttcctacactattaaagtttaccacaaccaccaccccatcatactctttcacccacagcaccaatcctacctccatcgctaaccccactaaaacactcaccaagacctcaacccctgacccccatgcctcaggatactcctcaatagccatcgctgtagtatatccaaagacaaccatcattccccctaaataaattaaaaaaactattaaacccatataacctcccccaaaattcagaataataacacacccgaccacaccgctaacaatcaatactaaacccccataaataggagaaggcttagaagaaaaccccacaaaccccattactaaacccacactcaacagaaacaaagcatacatcattattctcgcacggactacaaccacgaccaatgatatgaaaaaccatcgttgtatttcaactacaagaacaccaatgaccccaatacgcaaaactaaccccctaataaaattaattaaccactcattcatcgacctccccaccccatccaacatctccgcatgatgaaacttcggctcactccttggcgcctgcctgatcctccaaatcaccacaggactattcctagccatgcactactcaccagacgcctcaaccgccttttcatcaatcgcccacatcactcgagacgtaaattatggctgaatcatccgctaccttcacgccaatggcgcctcaatattctttatctgcctcttcctacacatcgggcgaggcctatattacggatcatttctctactcagaaacctgaaacatcggcattatcctcctgcttgcaactatagcaacagccttcataggctatgtcctcccgtgaggccaaatatcattctgaggggccacagtaattacaaacttactatccgccatcccatacattgggacagacctagttcaatgaatctgaggaggctactcagtagacagtcccaccctcacacgattctttacctttcacttcatcttgcccttcattattgcagccctagcagcactccacctcctattcttgcacgaaacgggatcaaacaaccccctaggaatcacctcccattccgataaaatcaccttccacccttactacacaatcaaagacgccctcggcttacttctcttccttctctccttaatgacattaacactattctcaccagacctcctaggcgacccagacaattataccctagccaaccccttaaacacccctccccacatcaagcccgaatgatatttcctattcgcctacacaattctccgatccgtccctaacaaactaggaggcgtccttgccctattactatccatcctcatcctagcaataatccccatcctccatatatccaaacaacaaagcataatatttcgcccactaagccaatcactttattgactcctagccgcagacctcctcattctaacctgaatcggaggacaaccagtaagctacccttttaccatcattggacaagtagcatccgtactatacttcacaacaatcctaatcctaataccaactatctccctaattgaaaacaaaatactcaaatgggcctgtccttgtagtataaactaatacaccagtcttgtaaaccggagatgaaaacctttttccaaggacaaatcagagaaaaagtctttaactccaccattagcacccaaagctaagattctaatttaaactattctctgttctttcatggggaagcagatttgggtaccacccaagtattgactcacccatcaacaaccgctatgtatttcgtacattactgccagccaccatgaatattgtacggtaccataaatacttgaccacctgtagtacataaaaacccaatccacatcaaaaccccctccccatgcttacaagcaagtacagcaatcaaccctcaactatcacacatcaactgcaactccaaagccacccctcacccactaggataccaacaaacctacccacccttaacagtacatagtacataaagccatttaccgtacatagcacattacagtcaaatcccttctcgtccccatggatgacccccctcagataggggtcccttgaccaccatcctccgtgaaatcaatatcccgcacaagagtgctactctcctcgctccgggcccataacacttgggggtagctaaagtgaactgtatccgacatctggttcctacttcagggccataaagcctaaatagcccacacgttccccttaaataagacatcacgatg

SEQ ID NO: 464 - DNA, 16569 bp, Homo sapiens mitochondrial
  3107: "n" refers to a nucleotide at position 3107 of the Cambridge Reference Sequence (CRS, Anderson et al. 1981 Nature 290:457-465), later determined to be absent from the human mtDNA sequence according to the revised CRS (rCRS, Andrews et al. 1999 Nature Genetics 23:147); "n" therefore represents a single nucleotide deletion at a position corresponding to nucleotide 3107 of SEQ ID NO:1 as provided herein.
gatcacaggtctatcaccctattaaccactcacgggagctctccatgcatttggtattttcgtctggggggtatgcacgcgatagcattgcgagacgctggagccggagcaccctatgtcgcagtatctgtctttgattcctgcctcatcctattatttatcgcacctacgttcaatattacaggcgaacatacttactaaagtgtgttaattaattaatgcttgtaggacataataataacaattgaatgtctgcacagccgctttccacacagacatcataacaaaaaatttccaccaaaccccccctcccccgcttctggccacagcacttaaacacatctctgccaaaccccaaaaacaaagaaccctaacaccagcctaaccagatttcaaattttatcttttggcggtatgcacttttaacagtcaccccccaactaacacattatttttccctcccactcccatactactaatctcatcaatacaacccccgcccatcctacccagcacacacacaccgctgctaaccccataccccgaaccaaccaaaccccaaagacaccccccacagtttatgtagcttacctcctcaaagcaatacactgaaaatgtttagacgggctcacatcaccccataaacaaataggtttggtcctagcctttctattagctcttagtaagattacacatgcaagcatccccgttccagtgagttcaccctctaaatcaccacgatcaaaagggacaagcatcaagcacgcagcaatgcagctcaaaacgcttagcctagccacacccccacgggaaacagcagtgattaacctttagcaataaacgaaagtttaactaagctatactaaccccagggttggtcaatttcgtgccagccaccgcggtcacacgattaacccaagtcaatagaagccggcgtaaagagtgttttagatcaccccctccccaataaagctaaaactcacctgagttgtaaaaaactccagttgacacaaaatagactacgaaagtggctttaacatatctgaacacacaatagctaagacccaaactgggattagataccccactatgcttagccctaaacctcaacagttaaatcaacaaaactgctcgccagaacactacgagccacagcttaaaactcaaaggacctggcggtgcttcatatccctctagaggagcctgttctgtaatcgataaaccccgatcaacctcaccacctcttgctcagcctatataccgccatcttcagcaaaccctgatgaaggctacaaagtaagcgcaagtacccacgtaaagacgttaggtcaaggtgtagcccatgaggtggcaagaaatgggctacattttctaccccagaaaactacgatagcccttatgaaacttaagggtcgaaggtggatttagcagtaaactgagagtagagtgcttagttgaacagggccctgaagcgcgtacacaccgcccgtcaccctcctcaagtatacttcaaaggacatttaactaaaacccctacgcatttatatagaggagacaagtcgtaacatggtaagtgtactggaaagtgcacttggacgaaccagagtgtagcttaacacaaagcacccaacttacacttaggagatttcaacttaacttgaccgctctgagctaaacctagccccaaacccactccaccttactaccagacaacctcagccaaaccatttacccaaataaagtataggcgatagaaattgaaacctggcgcaatagatatagtaccgcaagggaaagatgaaaaattataaccaagcataatatagcaaggactaacccctataccttctgcataatgaattaactagaaataactttgcaaggagagccaaagctaagacccccgaaaccagacgagctacctaagaacagctaaaagagcacacccgtctatgtagcaaaatagtgggaagatttataggtagaggcgacaaacctaccgagcctggtgatagctggttgtccaagatagaatcttagttcaactttaaatttgcccacagaaccctctaaatccccttgtaaatttaactgttagtccaaagaggaacagctctttggacactaggaaaaaaccttgtagagagagtaaaaaatttaacacccatagtaggcctaaaagcagccaccaattaagaaagcgttcaagctcaacacccactacctaaaaaatcccaaacatataactgaactcctcacacccaattggaccaatctatcaccctatagaagaactaatgttagtataagtaacatgaaaacattctcctccgcataagcctgcgtcagattaaaacactgaactgacaattaacagcccaatatctacaatcaaccaacaagtcattattaccctcactgtcaacccaacacaggcatgctcataaggaaaggttaaaaaaagtaaaaggaactcggcaaatcttaccccgcctgtttaccaaaaacatcacctctagcatcaccagtattagaggcaccgcctgcccagtgacacatgtttaacggccgcggtaccctaaccgtgcaaaggtagcataatcacttgttccttaaatagggacctgtatgaatggctccacgagggttcagctgtctcttacttttaaccagtgaaattgacctgcccgtgaagaggcgggcataacacagcaagacgagaagaccctatggagctttaatttattaatgcaaacagtacctaacaaacccacaggtcctaaactaccaaacctgcattaaaaatttcggttggggcgacctcggagcagaacccaacctccgagcagtacatgctaagacttcaccagtcaaagcgaactactatactcaattgatccaataacttgaccaacggaacaagttaccctagggataacagcgcaatcctattctagagtccatatcaacaatagggtttacgacctcgatgttggatcaggacatcccgatggtgcagccgctattaaaggttcgtttgttcaacgattaaagtcctacgtgatctgagttcagaccggagtaatccaggtcggtttctatctacnttcaaattcctccctgtacgaaaggacaagagaaataaggcctacttcacaaagcgccttcccccgtaaatgatatcatctcaacttagtattatacccacacccacccaagaacagggtttgttaagatggcagagcccggtaatcgcataaaacttaaaactttacagtcagaggttcaattcctcttcttaacaacatacccatggccaacctcctactcctcattgtacccattctaatcgcaatggcattcctaatgcttaccgaacgaaaaattctaggctatatacaactacgcaaaggccccaacgttgtaggcccctacgggctactacaacccttcgctgacgccataaaactcttcaccaaagagcccctaaaacccgccacatctaccatcaccctctacatcaccgccccgaccttagctctcaccatcgctcttctactatgaacccccctccccatacccaaccccctggtcaacctcaacctaggcctcctatttattctagccacctctagcctagccgtttactcaatcctctgatcagggtgagcatcaaactcaaactacgccctgatcggcgcactgcgagcagtagcccaaacaatctcatatgaagtcaccctagccatcattctactatcaacattactaataagtggctcctttaacctctccacccttatcacaacacaagaacacctctgattactcctgccatcatgacccttggccataatatgatttatctccacactagcagagaccaaccgaacccccttcgaccttgccgaaggggagtccgaactagtctcaggcttcaacatcgaatacgccgcaggccccttcgccctattcttcatagccgaatacacaaacattattataataaacaccctcaccactacaatcttcctaggaacaacatatgacgcactctcccctgaactctacacaacatattttgtcaccaagaccctacttctaacctccctgttcttatgaattcgaacagcatacccccgattccgctacgaccaactcatacacctcctatgaaaaaacttcctaccactcaccctagcattacttatatgatatgtctccatacccattacaatctccagcattccccctcaaacctaagaaatatgtctgataaaagagttactttgatagagtaaataataggagcttaaacccccttatttctaggactatgagaatcgaacccatccctgagaatccaaaattctccgtgccacctatcacaccccatcctaaagtaaggtcagctaaataagctatcgggcccataccccgaaaatgttggttatacccttcccgtactaattaatcccctggcccaacccgtcatctactctaccatctttgcaggcacactcatcacagcgctaagctcgcactgattttttacctgagtaggcctagaaataaacatgctagcttttattccagttctaaccaaaaaaataaaccctcgttccacagaagctgccatcaagtatttcctcacgcaagcaaccgcatccataatccttctaatagctatcctcttcaacaatatactctccggacaatgaaccataaccaatactaccaatcaatactcatcattaataatcataatggctatagcaataaaactaggaatagccccctttcacttctgagtcccagaggttacccaaggcacccctctgacatccggcctgcttcttctcacatgacaaaaactagcccccatctcaatcatataccaaatctctccctcactaaacgtaagccttctcctcactctctcaatcttatccatcatagcaggcagttgaggtggattaaaccaaacccagctacgcaaaatcttagcatactcctcaattacccacataggatgaataatagcagttctaccgtacaaccctaacataaccattcttaatttaactatttatattatcctaactactaccgcattcctactactcaacttaaactccagcaccacgaccctactactatctcgcacctgaaacaagctaacatgactaacacccttaattccatccaccctcctctccctaggaggcctgcccccgctaaccggctttttgcccaaatgggccattatcgaagaattcacaaaaaacaatagcctcatcatccccaccatcatagccaccatcaccctccttaacctctacttctacctacgcctaatctactccacctcaatcacactactccccatatctaacaacgtaaaaataaaatgacagtttgaacatacaaaacccaccccattcctccccacactcatcgcccttaccacgctactcctacctatctccccttttatactaataatcttatagaaatttaggttaaatacagaccaagagccttcaaagccctcagtaagttgcaatacttaatttctgtaacagctaaggactgcaaaaccccactctgcatcaactgaacgcaaatcagccactttaattaagctaagcccttactagaccaatgggacttaaacccacaaacacttagttaacagctaagcaccctaatcaactggcttcaatctacttctcccgccgccgggaaaaaaggcgggagaagccccggcaggtttgaagctgcttcttcgaatttgcaattcaatatgaaaatcacctcggagctggtaaaaagaggcctaacccctgtctttagatttacagtccaatgcttcactcagccattttacctcacccccactgatgttcgccgaccgttgactattctctacaaaccacaaagacattggaacactatacctattattcggcgcatgagctggagtcctaggcacagctctaagcctccttattcgagccgagctgggccagccaggcaaccttctaggtaacgaccacatctacaacgttatcgtcacagcccatgcatttgtaataatcttcttcatagtaatacccatcataatcggaggctttggcaactgactagttcccctaataatcggtgcccccgatatggcgtttccccgcataaacaacataagcttctgactcttacctccctctctcctactcctgctcgcatctgctatagtggaggccggagcaggaacaggttgaacagtctaccctcccttagcagggaactactcccaccctggagcctccgtagacctaaccatcttctccttacacctagcaggtgtctcctctatcttaggggccatcaatttcatcacaacaattatcaatataaaaccccctgccataacccaataccaaacgcccctcttcgtctgatccgtcctaatcacagcagtcctacttctcctatctctcccagtcctagctgctggcatcactatactactaacagaccgcaacctcaacaccaccttcttcgaccccgccggaggaggagaccccattctataccaacacctattctgatttttcggtcaccctgaagtttatattcttatcctaccaggcttcggaataatctcccatattgtaacttactactccggaaaaaaagaaccatttggatacataggtatggtctgagctatgatatcaattggcttcctagggtttatcgtgtgagcacaccatatatttacagtaggaatagacgtagacacacgagcatatttcacctccgctaccataatcatcgctatccccaccggcgtcaaagtatttagctgactcgccacactccacggaagcaatatgaaatgatctgctgcagtgctctgagccctaggattcatctttcttttcaccgtaggtggcctgactggcattgtattagcaaactcatcactagacatcgtactacacgacacgtactacgttgtagcccacttccactatgtcctatcaataggagctgtatttgccatcataggaggcttcattcactgatttcccctattctcaggctacaccctagaccaaacctacgccaaaatccatttcactatcatattcatcggcgtaaatctaactttcttcccacaacactttctcggcctatccggaatgccccgacgttactcggactaccccgatgcatacaccacatgaaacatcctatcatctgtaggctcattcatttctctaacagcagtaatattaataattttcatgatttgagaagccttcgcttcgaagcgaaaagtcctaatagtagaagaaccctccataaacctggagtgactatatggatgccccccaccctaccacacattcgaagaacccgtatacataaaatctagacaaaaaaggaaggaatcgaaccccccaaagctggtttcaagccaaccccatggcctccatgactttttcaaaaaggtattagaaaaaccatttcataactttgtcaaagttaaattataggctaaatcctatatatcttaatggcacatgcagcgcaagtaggtctacaagacgctacttcccctatcatagaagagcttatcacctttcatgatcacgccctcataatcattttccttatctgcttcctagtcctgtatgcccttttcctaacactcacaacaaaactaactaatactaacatctcagacgctcaggaaatagaaaccgtctgaactatcctgcccgccatcatcctagtcctcatcgccctcccatccctacgcatcctttacataacagacgaggtcaacgatccctcccttaccatcaaatcaattggccaccaatggtactgaacctacgagtacaccgactacggcggactaatcttcaactcctacatacttcccccattattcctagaaccaggcgacctgcgactccttgacgttgacaatcgagtagtactcccgattgaagcccccattcgtataataattacatcacaagacgtcttgcactcatgagctgtccccacattaggcttaaaaacagatgcaattcccggacgtctaaaccaaaccactttcaccgctacacgaccgggggtatactacggtcaatgctctgaaatctgtggagcaaaccacagtttcatgcccatcgtcctagaattaattcccctaaaaatctttgaaatagggcccgtatttaccctatagcaccccctctaccccctctagagcccactgtaaagctaacttagcattaaccttttaagttaaagattaagagaaccaacacctctttacagtgaaatgccccaactaaatactaccgtatggcccaccataattacccccatactccttacactattcctcatcacccaactaaaaatattaaacacaaactaccacctacctccctcaccaaagcccataaaaataaaaaattataacaaaccctgagaaccaaaatgaacgaaaatctgttcgcttcattcattgcccccacaatcctaggcctacccgccgcagtactgatcattctatttccccctctattgatccccacctccaaatatctcatcaacaaccgactaatcaccacccaacaatgactaatcaaactaacctcaaaacaaatgataaccatacacaacactaaaggacgaacctgatctcttatactagtatccttaatcatttttattgccacaactaacctcctcggactcctgcctcactcatttacaccaaccacccaactatctataaacctagccatggccatccccttatgagcgggcgcagtgattataggctttcgctctaagattaaaaatgccctagcccacttcttaccacaaggcacacctacaccccttatccccatactagttattatcgaaaccatcagcctactcattcaaccaatagccctggccgtacgcctaaccgctaacattactgcaggccacctactcatgcacctaattggaagcgccaccctagcaatatcaaccattaaccttccctctacacttatcatcttcacaattctaattctactgactatcctagaaatcgctgtcgccttaatccaagcctacgttttcacacttctagtaagcctctacctgcacgacaacacataatgacccaccaatcacatgcctatcatatagtaaaacccagcccatgacccctaacaggggccctctcagccctcctaatgacctccggcctagccatgtgatttcacttccactccataacgctcctcatactaggcctactaaccaacacactaaccatataccaatgatggcgcgatgtaacacgagaaagcacataccaaggccaccacacaccacctgtccaaaaaggccttcgatacgggataatcctatttattacctcagaagtttttttcttcgcaggatttttctgagccttttaccactccagcctagcccctaccccccaattaggagggcactggcccccaacaggcatcaccccgctaaatcccctagaagtcccactcctaaacacatccgtattactcgcatcaggagtatcaatcacctgagctcaccatagtctaatagaaaacaaccgaaaccaaataattcaagcactgcttattacaattttactgggtctctattttaccctcctacaagcctcagagtacttcgagtctcccttcaccatttccgacggcatctacggctcaacattttttgtagccacaggcttccacggacttcacgtcattattggctcaactttcctcactatctgcttcatccgccaactaatatttcactttacatccaaacatcactttggcttcgaagccgccgcctgatactggcattttgtagatgtggtttgactatttctgtatgtctccatctattgatgagggtcttactcttttagtataaatagtaccgttaacttccaattaactagttttgacaacattcaaaaaagagtaataaacttcgccttaattttaataatcaacaccctcctagccttactactaataattattacattttgactaccacaactcaacggctacatagaaaaatccaccccttacgagtgcggcttcgaccctatatcccccgcccgcgtccctttctccataaaattcttcttagtagctattaccttcttattatttgatctagaaattgccctccttttacccctaccatgagccctacaaacaactaacctgccactaatagttatgtcatccctcttattaatcatcatcctagccctaagtctggcctatgagtgactacaaaaaggattagactgaaccgaattggtacatagtttaaacaaaacgaatgatttcgactcattaaattatgataatcatatttaccaaatgcccctcatttacataaatattatactagcatttaccatctcacttctaggaatactagtatatcgctcacacctcatatcctccctactatgcctagaaggaataatactatcgctgttcattatagctactctcataaccctcaacacccactccctcttagccaatattgtgcctattgccatactagtctttgccgcctgcgaagcagcggtgggcctagccctactagtctcaatctccaacacatatggcctagactacgtacataacctaaacctactccaatgctaaaactaatcgtcccaacaattatattactaccactgacatgactttccaaaaaacacataatttgaatcaacacaaccacccacagcctaattattagcatcatccctctactattttttaaccaaatcaacaacaacctatttagctgttccccaaccttttcctccgaccccctaacaacccccctcctaatactaactacctgactcctacccctcacaatcatggcaagccaacgccacttatccagtgaaccactatcacgaaaaaaactctacctctctatactaatctccctacaaatctccttaattataacattcacagccacagaactaatcatattttatatcttcttcgaaaccacacttatccccaccttggctatcatcacccgatgaggcaaccagccagaacgcctgaacgcaggcacatacttcctattctacaccctagtaggctcccttcccctactcatcgcactaatttacactcacaacaccctaggctcactaaacattctactactcactctcactgcccaagaactatcaaactcctgagccaacaacttaatatgactagcttacacaatagcttttatagtaaagatacctctttacggactccacttatgactccctaaagcccatgtcgaagcccccatcgctgggtcaatagtacttgccgcagtactcttaaaactaggcggctatggtataatacgcctcacactcattctcaaccccctgacaaaacacatagcctaccccttccttgtactatccctatgaggcataattataacaagctccatctgcctacgacaaacagacctaaaatcgctcattgcatactcttcaatcagccacatagccctcgtagtaacagccattctcatccaaaccccctgaagcttcaccggcgcagtcattctcataatcgcccacgggcttacatcctcattactattctgcctagcaaactcaaactacgaacgcactcacagtcgcatcataatcctctctcaaggacttcaaactctactcccactaatagctttttgatgacttctagcaagcctcgctaacctcgccttaccccccactattaacctactgggagaactctctgtgctagtaaccacgttctcctgatcaaatatcactctcctacttacaggactcaacatactagtcacagccctatactccctctacatatttaccacaacacaatggggctcactcacccaccacattaacaacataaaaccctcattcacacgagaaaacaccctcatgttcatacacctatcccccattctcctcctatccctcaaccccgacatcattaccgggttttcctcttgtaaatatagtttaaccaaaacatcagattgtgaatctgacaacagaggcttacgaccccttatttaccgagaaagctcacaagaactgctaactcatgcccccatgtctaacaacatggctttctcaacttttaaaggataacagctatccattggtcttaggccccaaaaattttggtgcaactccaaataaaagtaataaccatgcacactactataaccaccctaaccctgacttccctaattccccccatccttaccaccctcgttaaccctaacaaaaaaaactcatacccccattatgtaaaatccattgtcgcatccacctttattatcagtctcttccccacaacaatattcatgtgcctagaccaagaagttattatctcgaactgacactgagccacaacccaaacaacccagctctccctaagcttcaaactagactacttctccataatattcatccctgtagcattgttcgttacatggtccatcatagaattctcactgtgatatataaactcagacccaaacattaatcagttcttcaaatatctactcatcttcctaattaccatactaatcttagttaccgctaacaacctattccaactgttcatcggctgagagggcgtaggaattatatccttcttgctcatcagttgatgatacgcccgagcagatgccaacacagcagccattcaagcaatcctatacaaccgtatcggcgatatcggtttcatcctcgccttagcatgatttatcctacactccaactcatgagacccacaacaaatagcccttctaaacgctaatccaagcctcaccccactactaggcctcctcctagcagcagcaggcaaatcagcccaattaggtctccacccctgactcccctcagccatagaaggccccaccccagtctcagccctactccactcaagcactatagttgtagcaggaatcttcttactcatccgcttccaccccctagcagaaaatagcccactaatccaaactctaacactatgcttaggcgctatcaccactctgttcgcagcagtctgcgcccttacacaaaatgacatcaaaaaaatcgtagccttctccacttcaagtcaactaggactcataatagttacaatcggcatcaaccaaccacacctagcattcctgcacatctgtacccacgccttcttcaaagccatactatttatgtgctccgggtccatcatccacaaccttaacaatgaacaagatattcgaaaaataggaggactactcaaaaccatacctctcacttcaacctccctcaccattggcagcctagcattagcaggaatacctttcctcacaggtttctactccaaagaccacatcatcgaaaccgcaaacatatcatacacaaacgcctgagccctatctattactctcatcgctacctccctgacaagcgcctatagcactcgaataattcttctcaccctaacaggtcaacctcgcttccccacccttactaacattaacgaaaataaccccaccctactaaaccccattaaacgcctggcagccggaagcctatttgcaggatttctcattactaacaacatttcccccgcatcccccttccaaacaacaatccccctctacctaaaactcacagccctcgctgtcactttcctaggacttctaacagccctagacctcaactacctaaccaacaaacttaaaataaaatccccactatgcacattttatttctccaacatactcggattctaccctagcatcacacaccgcacaatcccctatctaggccttcttacgagccaaaacctgcccctactcctcctagacctaacctgactagaaaagctattacctaaaacaatttcacagcaccaaatctccacctccatcatcacctcaacccaaaaaggcataattaaactttacttcctctctttcttcttcccactcatcctaaccctactcctaatcacataacctattcccccgagcaatctcaattacaatatatacaccaacaaacaatgttcaaccagtaactactactaatcaacgcccataatcatacaaagcccccgcaccaataggatcctcccgaatcaaccctgacccctctccttcataaattattcagcttcctacactattaaagtttaccacaaccaccaccccatcatactctttcacccacagcaccaatcctacctccatcgctaaccccactaaaacactcaccaagacctcaacccctgacccccatgcctcaggatactcctcaatagccatcgctgtagtatatccaaagacaaccatcattccccctaaataaattaaaaaaactattaaacccatataacctcccccaaaattcagaataataacacacccgaccacaccgctaacaatcaatactaaacccccataaataggagaaggcttagaagaaaaccccacaaaccccattactaaacccacactcaacagaaacaaagcatacatcattattctcgcacggactacaaccacgaccaatgatatgaaaaaccatcgttgtatttcaactacaagaacaccaatgaccccaatacgcaaaactaaccccctaataaaattaattaaccactcattcatcgacctccccaccccatccaacatctccgcatgatgaaacttcggctcactccttggcgcctgcctgatcctccaaatcaccacaggactattcctagccatgcactactcaccagacgcctcaaccgccttttcatcaatcgcccacatcactcgagacgtaaattatggctgaatcatccgctaccttcacgccaatggcgcctcaatattctttatctgcctcttcctacacatcgggcgaggcctatattacggatcatttctctactcagaaacctgaaacatcggcattatcctcctgcttgcaactatagcaacagccttcataggctatgtcctcccgtgaggccaaatatcattctgaggggccacagtaattacaaacttactatccgccatcccatacattgggacagacctagttcaatgaatctgaggaggctactcagtagacagtcccaccctcacacgattctttacctttcacttcatcttgcccttcattattgcagccctagcagcactccacctcctattcttgcacgaaacgggatcaaacaaccccctaggaatcacctcccattccgataaaatcaccttccacccttactacacaatcaaagacgccctcggcttacttctcttccttctctccttaatgacattaacactattctcaccagacctcctaggcgacccagacaattataccctagccaaccccttaaacacccctccccacatcaagcccgaatgatatttcctattcgcctacacaattctccgatccgtccctaacaaactaggaggcgtccttgccctattactatccatcctcatcctagcaataatccccatcctccatatatccaaacaacaaagcataatatttcgcccactaagccaatcactttattgactcctagccgcagacctcctcattctaacctgaatcggaggacaaccagtaagctacccttttaccatcattggacaagtagcatccgtactatacttcacaacaatcctaatcctaataccaactatctccctaattgaaaacaaaatactcaaatgggcctgtccttgtagtataaactaatacaccagtcttgtaaaccggaaatgaaaacctttttccaaggacaaatcagagaaaaagtctttaactccaccattagcacccaaagctaagattctaatttaaactattctctgttctttcatggggaagcagatttgggtaccacccaagtattgactcacccatcaacaaccgctatgtatttcgtacattactgccagccaccatgaatattgtacggtaccataaatacttgaccacctgtagtacataaaaacccaatccacatcaaaaccccctccccatgcttacaagcaagtacagcaatcaaccctcaactatcacacatcaactgcaactccaaagccacccctcacccactaggataccaacaaacctacccacccttaacagcacatagcacataaagccatttaccgtacatagcacattacagtcaaatcccttctcgtccccatggatgacccccctcagataggggtcccttgaccaccatcctccgtgaaatcaatatcccgcacaagagtgctactctcctcgctccgggcccataacacttgggggtagctaaagtgaactgtatccgacatctggttcctacttcagggtcataaagcctaaatagcccacacgttccccttaaataagacatcacgatg

SEQ ID NO: 465 - DNA, 16571 bp, Homo sapiens mitochondrial
  3109: "n" refers to a nucleotide at position 3107 of the Cambridge Reference Sequence (CRS, Anderson et al. 1981 Nature 290:457-465), later determined to be absent from the human mtDNA sequence according to the revised CRS (rCRS, Andrews et al. 1999 Nature Genetics 23:147); "n" therefore represents a single nucleotide deletion at a position corresponding to nucleotide 3107 of SEQ ID NO:1 as provided herein.
gatcacaggtctatcaccctattaaccactcacgggagctctccatgcatttggtattttcgtctggggggtatgcacgcgatagcattgcgagacgctggagccggagcaccctatgtcgcagtatctgtctttgattcctgcctcatcctattatttatcgcacctacgttcaatattacaggcgaacatacttactaaagtgtgttaattaattaatgcttgtaggacataataataacaattgaatgtctgcacagccgctttccacacagacatcataacaaaaaatttccaccaaaccccccctcccccccgcttctggccacagcacttaaacacatctctgccaaaccccaaaaacaaagaaccctaacaccagcctaaccagatttcaaattttatcttttggcggtatgcacttttaacagtcaccccccaactaacacattattttcccctcccactcccatactactaatctcatcaatacaacccccgcccatcctacccagcacacacacaccgctgctaaccccataccccgaaccaaccaaaccccaaagacaccccccacagtttatgtagcttacctcctcaaagcaatacactgaaaatgtttagacgggctcacatcaccccataaacaaataggtttggtcctagcctttctattagctcttagtaagattacacatgcaagcatccccgttccagtgagttcaccctctaaatcaccacgatcaaaagggacaagcatcaagcacgcagcaatgcagctcaaaacgcttagcctagccacacccccacgggaaacagcagtgattaacctttagcaataaacgaaagtttaactaagctatactaaccccagggttggtcaatttcgtgccagccaccgcggtcacacgattaacccaagtcaatagaagccggcgtaaagagtgttttagatcaccccctccccaataaagctaaaactcacctgagttgtaaaaaactccagttgacacaaaatagactacgaaagtggctttaacatatctgaacacacaatagctaagacccaaactgggattagataccccactatgcttagccctaaacctcaacagttaaatcaacaaaactgctcgccagaacactacgagccacagcttaaaactcaaaggacctggcggtgcttcatatccctctagaggagcctgttctgtaatcgataaaccccgatcaacctcaccacctcttgctcagcctatataccgccatcttcagcaaaccctgatgaaggctacaaagtaagcgcaagtacccacgtaaagacgttaggtcaaggtgtagcccatgaggtggcaagaaatgggctacattttctaccccagaaaactacgatagcccttatgaaacttaagggtcgaaggtggatttagcagtaaactgagagtagagtgcttagttgaacagggccctgaagcgcgtacacaccgcccgtcaccctcctcaagtatacttcaaaggacatttaactaaaacccctacgcatttatatagaggagacaagtcgtaacatggtaagtgtactggaaagtgcacttggacgaaccagagtgtagcttaacacaaagcacccaacttacacttaggagatttcaacttaacttgaccgctctgagctaaacctagccccaaacccactccaccttactaccagacaaccttagccaaaccatttacccaaataaagtataggcgatagaaattgaaacctggcgcaatagatatagtaccgcaagggaaagatgaaaaattataaccaagcataatatagcaaggactaacccctataccttctgcataatgaattaactagaaataactttgcaaggagagccaaagctaagacccccgaaaccagacgagctacctaagaacagctaaaagagcacacccgtctatgtagcaaaatagtgggaagatttataggtagaggcgacaaacctaccgagcctggtgatagctggttgtccaagatagaatcttagttcaactttaaatttgcccacagaaccctctaaatccccttgtaaatttaactgttagtccaaagaggaacagctctttggacactaggaaaaaaccttgtagagagagtaaaaaatttaacacccatagtaggcctaaaagcagccaccaattaagaaagcgttcaagctcaacacccactacctaaaaaatcccaaacatataactgaactcctcacacccaattggaccaatctatcaccctatagaagaactaatgttagtataagtaacatgaaaacattctcctccgcataagcctgcgtcagattaaaacactgaactgacaattaacagcccaatatctacaatcaaccaacaagtcattattaccctcactgtcaacccaacacaggcatgctcataaggaaaggttaaaaaaagtaaaaggaactcggcaaatcttaccccgcctgtttaccaaaaacatcacctctagcatcaccagtattagaggcaccgcctgcccagtgacacatgtttaacggccgcggtaccctaaccgtgcaaaggtagcataatcacttgttccttaaatagggacctgtatgaatggctccacgagggttcagctgtctcttacttttaaccagtgaaattgacctgcccgtgaagaggcgggcataacacagcaagacgagaagaccctatggagctttaatttattaatgcaaacagtacctaacaaacccacaggtcctaaactaccaaacctgcattaaaaatttcggttggggcgacctcggagcagaacccaacctccgagcagtacatgctaagacttcaccagtcaaagcgaactactatactcaattgatccaataacttgaccaacggaacaagttaccctagggataacagcgcaatcctattctagagtccatatcaacaatagggtttacgacctcgatgttggatcaggacatcccgatggtgcagccgctattaaaggttcgtttgttcaacgattaaagtcctacgtgatctgagttcagaccggagtaatccaggtcggtttctatctacnttcaaattcctccctgtacgaaaggacaagagaaataaggcctacttcacaaagcgccttcccccgtaaatgatatcatctcaacttagtattatacccacacccacccaagaacagggtttgttaagatggcagagcccggtaatcgcataaaacttaaaactttacagtcagaggttcaattcctcttcttaacaacatacccatggccaacctcctactcctcattgtacccattctaatcgcaatggcattcctaatgcttaccgaacgaaaaattctaggctatatacaactacgcaaaggccccaacgttgtaggcccctacgggctactacaacccttcgctgacgccataaaactcttcaccaaagagcccctaaaacccgccacatctaccatcaccctctacatcaccgccccgaccttagctctcaccatcgctcttctactatgaacccccctccccatacccaaccccctggtcaacctcaacctaggcctcctatttattctagccacctctagcctagccgtttactcaatcctctgatcagggtgagcatcaaactcaaactacgccctgatcggcgcactgcgagcagtagcccaaacaatctcatatgaagtcaccctagccatcattctactatcaacattactaataagtggctcctttaacctctccacccttatcacaacacaagaacacctctgattactcctgccatcatgacccttggccataatatgatttatctccacactagcagagaccaaccgaacccccttcgaccttgccgaaggggagtccgaactagtctcaggcttcaacatcgaatacgccgcaggccccttcgccctattcttcatagccgaatacacaaacattattataataaacaccctcaccactacaatcttcctaggaacaacatatgacgcactctcccctgaactctacacaacatattttgtcaccaagaccctacttctaacctccctgttcttatgaattcgaacagcatacccccgattccgctacgaccaactcatacacctcctatgaaaaaacttcctaccactcaccctagcattacttatatgatatgtctccatacccattacaatctccagcattccccctcaaacctaagaaatatgtctgataaaagagttactttgatagagtaaataataggagcttaaacccccttatttctaggactatgagaatcgaacccatccctgagaatccaaaattctccgtgccacctatcacaccccatcctaaagtaaggtcagctaaataagctatcgggcccataccccgaaaatgttggttatacccttcccgtactaattaatcccctggcccaacccgtcatctactctaccatctttgcaggcacactcatcacagcgctaagctcgcactgattttttacctgagtaggcctagaaataaacatgctagcttttattccagttctaaccaaaaaaataaaccctcgttccacagaagctgccatcaagtatttcctcacgcaagcaaccgcatccataatccttctaatagctatcctcttcaacaatatactctccggacaatgaaccataaccaatactaccaatcaatactcatcattaataatcataatggctatagcaataaaactaggaatagccccctttcacttctgagtcccagaggttacccaaggcacccctctgacatccggcctgcttcttctcacatgacaaaaactagcccccatctcaatcatataccaaatctctccctcactaaacgtaagccttctcctcactctctcaatcttatccatcatagcaggcagttgaggtggattaaaccaaacccagctacgcaaaatcttagcatactcctcaattacccacataggatgaataatagcagttctaccgtacaaccctaacataaccattcttaatttaactatttatattatcctaactactaccgcattcctactactcaacttaaactccagcaccacgaccctactactatctcgcacctgaaacaagctaacatgactaacacccttaattccatccaccctcctctccctaggaggcctgcccccgctaaccggctttttgcccaaatgggccattatcgaagaattcacaaaaaacaatagcctcatcatccccaccatcatagccaccatcaccctccttaacctctacttctacctacgcctaatctactccacctcaatcacactactccccatatctaacaacgtaaaaataaaatgacagtttgaacatacaaaacccaccccattcctccccacactcatcgcccttaccacgctactcctacctatctccccttttatactaataatcttatagaaatttaggttaaatacagaccaagagccttcaaagccctcagtaagttgcaatacttaatttctgtaacagctaaggactgcaaaaccccactctgcatcaactgaacgcaaatcagccactttaattaagctaagcccttactagaccaatgggacttaaacccacaaacacttagttaacagctaagcaccctaatcaactggcttcaatctacttctcccgccgccgggaaaaaaggcgggagaagccccggcaggtttgaagctgcttcttcgaatttgcaattcaatatgaaaatcacctcggagctggtaaaaagaggcctaacccctgtctttagatttacagtccaatgcttcactcagccattttacctcacccccactgatgttcgccgaccgttgactattctctacaaaccacaaagacattggaacactatacctattattcggcgcatgagctggagtcctaggcacagctctaagcctccttattcgagccgagctgggccagccaggcaaccttctaggtaacgaccacatctacaacgttatcgtcacagcccatgcatttgtaataatcttcttcatagtaatacccatcataatcggaggctttggcaactgactagttcccctaataatcggtgcccccgatatggcgtttccccgcataaacaacataagcttctgactcttacctccctctctcctactcctgctcgcatctgctatagtggaggccggagcaggaacaggttgaacagtctaccctcccttagcagggaactactcccaccctggagcctccgtagacctaaccatcttctccttacacctagcaggtgtctcctctatcttaggggccatcaatttcatcacaacaattatcaatataaaaccccctgccataacccaataccaaacgcccctcttcgtctgatccgtcctaatcacagcagtcctacttctcctatctctcccagtcctagctgctggcatcactatactactaacagaccgcaacctcaacaccaccttcttcgaccccgccggaggaggagaccccattctataccaacacctattctgatttttcggtcaccctgaagtttatattcttatcctaccaggcttcggaataatctcccacattgtaacttactactccggaaaaaaagaaccatttggatacataggtatggtctgagctatgatatcaattggcttcctagggtttatcgtgtgagcacaccatatatttacagtaggaatagacgtagacacacgagcatatttcacctccgctaccataatcatcgctatccccaccggcgtcaaagtatttagctgactcgccacactccacggaagcaatatgaaatgatctgctgcagtgctctgagccctaggattcatctttcttttcaccgtaggtggcctgactggcattgtattagcaaactcatcactagacatcgtactacacgacacgtactacgttgtagcccacttccactatgtcctatcaataggagctgtatttgccatcataggaggcttcattcactgatttcccctattctcaggctacaccctagaccaaacctacgccaaaatccatttcactatcatattcatcggcgtaaatctaactttcttcccacaacactttctcggcctatccggaatgccccgacgttactcggactaccccgatgcatacaccacatgaaacatcctatcatctgtaggctcattcatttctctaacagcagtaatattaataattttcatgatttgagaagccttcgcttcgaagcgaaaagtcctaatagtagaagaaccctccataaacctggagtgactatatggatgccccccaccctaccacacattcgaagaacccgtatacataaaatctagacaaaaaaggaaggaatcgaaccccccaaagctggtttcaagccaaccccatggcctccatgactttttcaaaaaggtattagaaaaaccatttcataactttgtcaaagttaaattataggctaaatcctatatatcttaatggcacatgcagcgcaagtaggtctacaagacgctacttcccctatcatagaagagcttatcacctttcatgatcacgccctcataatcattttccttatctgcttcctagtcctgtatgcccttttcctaacactcacaacaaaactaactaatactaacatctcagacgctcaggaaatagaaaccgtctgaactatcctgcccgccatcatcctagtcctcatcgccctcccatccctacgcatcctttacataacagacgaggtcaacgatccctcccttaccatcaaatcaattggccaccaatggtactgaacctacgagtacaccgactacggcggactaatcttcaactcctacatacttcccccattattcctagaaccaggcgacctgcgactccttgacgttgacaatcgagtagtactcccgattgaagcccccattcgtataataattacatcacaagacgtcttgcactcatgagctgtccccacattaggcttaaaaacagatgcaattcccggacgtctaaaccaaaccactttcaccgctacacgaccgggggtatactacggtcaatgctctgaaatctgtggagcaaaccacagtttcatgcccatcgtcctagaattaattcccctaaaaatctttgaaatagggcccgtatttaccctatagcaccccctctaccccctctagagcccactgtaaagctaacttagcattaaccttttaagttaaagattaagagaaccaacacctctttacagtgaaatgccccaactaaatactaccgtatggcccaccataattacccccatactccttacactattcctcatcacccaactaaaaatattaaacacaaactaccacctacctccctcaccaaagcccataaaaataaaaaattataacaaaccctgagaaccaaaatgaacgaaaatctgttcgcttcattcattgcccccacaatcctaggcctacccgccgcagtactgatcattctatttccccctctattgatccccacctccaaatatctcatcaacaaccgactaatcaccacccaacaatgactaatcaaactaacctcaaaacaaatgataaccatacacaacactaaaggacgaacctgatctcttatactagtatccttaatcatttttattgccacaactaacctcctcggactcctgcctcactcatttacaccaaccacccaactatctataaacctagccatggccatccccttatgagcgggcgcagtgattataggctttcgctctaagattaaaaatgccctagcccacttcttaccacaaggcacacctacaccccttatccccatactagttattatcgaaaccatcagcctactcattcaaccaatagccctggccgtacgcctaaccgctaacattactgcaggccacctactcatgcacctaattggaagcgccaccctagcaatatcaaccattaaccttccctctacacttatcatcttcacaattctaattctactgactatcctagaaatcgctgtcgccttaatccaagcctacgttttcacacttctagtaagcctctacctgcacgacaacacataatgacccaccaatcacatgcctatcatatagtaaaacccagcccatgacccctaacaggggccctctcagccctcctaatgacctccggcctagccatgtgatttcacttccactccataacgctcctcatactaggcctactaaccaacacactaaccatataccaatgatggcgcgatgtaacacgagaaagcacataccaaggccaccacacaccacctgtccaaaaaggccttcgatacgggataatcctatttattacctcagaagtttttttcttcgcaggatttttctgagccttttaccactccagcctagcccctaccccccaattaggagggcactggcccccaacaggcatcaccccgctaaatcccctagaagtcccactcctaaacacatccgtattactcgcatcaggagtatcaatcacctgagctcaccatagtctaatagaaaacaaccgaaaccaaataattcaagcactgcttattacaattttactgggtctctattttaccctcctacaagcctcagagtacttcgagtctcccttcaccatttccgacggcatctacggctcaacattttttgtagccacaggcttccacggacttcacgtcattattggctcaactttcctcactatctgcttcatccgccaactaatatttcactttacatccaaacatcactttggcttcgaagccgccgcctgatactggcattttgtagatgtggtttgactatttctgtatgtctccatctattgatgagggtcttactcttttagtataaatagtaccgttaacttccaattaactagttttgacaacattcaaaaaagagtaataaacttcgccttaattttaataatcaacaccctcctagccttactactaataattattacattttgactaccacaactcaacggctacatagaaaaatccaccccttacgagtgcggcttcgaccctatatcccccgcccgcgtccctttctccataaaattcttcttagtagctattaccttcttattatttgatctagaaattgccctccttttacccctaccatgagccctacaaacaactaacctgccactaatagttatgtcatccctcttattaatcatcatcctagccctaagtctggcctatgagtgactacaaaaaggattagactgaaccgaattggtatatagtttaaacaaaacgaatgatttcgactcattaaattatgataatcatatttaccaaatgcccctcatttacataaatattatactagcatttaccatctcacttctaggaatactagtatatcgctcacacctcatatcctccctactatgcctagaaggaataatactatcgctgttcattatagctactctcataaccctcaacacccactccctcttagccaatattgtgcctattgccatactagtctttgccgcctgcgaagcagcggtgggcctagccctactagtctcaatctccaacacatatggcctagactacgtacataacctaaacctactccaatgctaaaactaatcgtcccaacaattatattactaccactgacatgactttccaaaaaacacataatttgaatcaacacaaccacccacagcctaattattagcatcatccctctactattttttaaccaaatcaacaacaacctatttagctgttccccaaccttttcctccgaccccctaacaacccccctcctaatactaactacctgactcctacccctcacaatcatggcaagccaacgccacttatccagtgaaccactatcacgaaaaaaactctacctctctatactaatctccctacaaatctccttaattataacattcacagccacagaactaatcatattttatatcttcttcgaaaccacacttatccccaccttggctatcatcacccgatgaggcaaccagccagaacgcctgaacgcaggcacatacttcctattctacaccctagtaggctcccttcccctactcatcgcactaatttacactcacaacaccctaggctcactaaacattctactactcactctcactgcccaagaactatcaaactcctgagccaacaacttaatatgactagcttacacaatagcttttatagtaaagatacctctttacggactccacttatgactccctaaagcccatgtcgaagcccccatcgctgggtcaatagtacttgccgcagtactcttaaaactaggcggctatggtataatacgcctcacactcattctcaaccccctgacaaaacacatagcctaccccttccttgtactatccctatgaggcataattataacaagctccatctgcctacgacaaacagacctaaaatcgctcattgcatactcttcaatcagccacatagccctcgtagtaacagccattctcatccaaaccccctgaagcttcaccggcgcagtcattctcataatcgcccacgggcttacatcctcattactattctgcctagcaaactcaaactacgaacgcactcacagtcgcatcataatcctctctcaaggacttcaaactctactcccactaatagctttttgatgacttctagcaagcctcgctaacctcgccttaccccccactattaacctactgggagaactctctgtgctagtaaccacgttctcctgatcaaatatcactctcctacttacaggactcaacatactagtcacagccctatactccctctacatatttaccacaacacaatggggctcactcacccaccacattaacaacataaaaccctcattcacacgagaaaacaccctcatgttcatacacctatcccccattctcctcctatccctcaaccccgacatcattaccgggttttcctcttgtaaatatagtttaaccaaaacatcagattgtgaatctgacaacagaggcttacgaccccttatttaccgagaaagctcacaagaactgctaactcatgcccccatgtctaacaacatggctttctcaacttttaaaggataacagctatccattggtcttaggccccaaaaattttggtgcaactccaaataaaagtaataaccatgcacactactataaccaccctaaccctgacttccctaattccccccatccttaccaccctcgttaaccctaacaaaaaaaactcatacccccattatgtaaaatccattgtcgcatccacctttattatcagtctcttccccacaacaatattcatgtgcctagaccaagaagttattatctcgaactgacactgagccacaacccaaacaacccagctctccctaagcttcaaactagactacttctccataatattcatccctgtagcattgttcgttacatggtccatcatagaattctcactgtgatatataaactcagacccaaacattaatcagttcttcaaatatctactcatcttcctaattaccatactaatcttagttaccgctaacaacctattccaactgttcatcggctgagagggcgtaggaattatatccttcttgctcatcagttgatgatacgcccgagcagatgccaacacagcagccattcaagcaatcctatacaaccgtatcggcgatatcggtttcatcctcgccttagcatgatttatcctacactccaactcatgagacccacaacaaatagcccttctaaacgctaatccaagcctcaccccactactaggcctcctcctagcagcagcaggcaaatcagcccaattaggtctccacccctgactcccctcagccatagaaggccccaccccagtctcagccctactccactcaagcactatagttgtagcaggaatcttcttactcatccgcttccaccccctagcagaaaatagcccactaatccaaactctaacactatgcttaggcgctatcaccactctgttcgcagcagtctgcgcccttacacaaaatgacatcaaaaaaatcgtagccttctccacttcaagtcaactaggactcataatagttacaatcggcatcaaccaaccacacctagcattcctgcacatctgtacccacgccttcttcaaagccatactatttatgtgctccgggtccatcatccacaaccttaacaatgaacaagatattcgaaaaataggaggactactcaaaaccatacctctcacttcaacctccctcaccattggcagcctagcattagcaggaatacctttcctcacaggtttctactccaaagaccacatcatcgaaaccgcaaacatatcatacacaaacgcctgagccctatctattactctcatcgctacctccctgacaagcgcctatagcactcgaataattcttctcaccctaacaggtcaacctcgcttccccacccttactaacattaacgaaaataaccccaccctactaaaccccattaaacgcctggcagccggaagcctattcgcaggatttctcattactaacaacatttcccccgcatcccccttccaaacaacaatccccctctacctaaaactcacagccctcgctgtcactttcctaggacttctaacagccctagacctcaactacctaaccaacaaacttaaaataaaatccccactatgcacattttatttctccaacatactcggattctaccctagcatcacacaccgcacaatcccctatctaggccttcttacgagccaaaacctgcccctactcctcctagacctaacctgactagaaaagctattacctaaaacaatttcacagcaccaaatctccacctccatcatcacctcaacccaaaaaggcataattaaactttacttcctctctttcttcttcccactcatcctaaccctactcctaatcacataacctattcccccgagcaatctcaattacaatatatacaccaacaaacaatgttcaaccagtaactactactaatcaacgcccataatcatacaaagcccccgcaccaataggatcctcccgaatcaaccctgacccctctccttcataaattattcagcttcctacactattaaagtttaccacaaccaccaccccatcatactctttcacccacagcaccaatcctacctccatcgctaaccccactaaaacactcaccaagacctcaacccctgacccccatgcctcaggatactcctcaatagccatcgctgtagtatatccaaagacaaccatcattccccctaaataaattaaaaaaactattaaacccatataacctcccccaaaattcagaataataacacacccgaccacaccgctaacaatcaatactaaacccccataaataggagaaggcttagaagaaaaccccacaaaccccattactaaacccacactcaacagaaacaaagcatacatcattattctcgcacggactacaaccacgaccaatgatatgaaaaaccatcgttgtatttcaactacaagaacaccaatgaccccaatacgcaaaactaaccccctaataaaattaattaaccactcattcatcgacctccccaccccatccaacatctccgcatgatgaaacttcggctcactccttggcgcctgcctgatcctccaaatcaccacaggactattcctagccatgcactactcaccagacgcctcaaccgccttttcatcaatcgcccacatcactcgagacgtaaattatggctgaatcatccgctaccttcacgccaatggcgcctcaatattctttatctgcctcttcctacacatcgggcgaggcctatattacggatcatttctctactcagaaacctgaaacatcggcattatcctcctgcttgcaactatagcaacagccttcataggctatgtcctcccgtgaggccaaatatcattctgaggggccacagtaattacaaacttactatccgccatcccatacattgggacagacctagttcaatgaatctgaggaggctactcagtagacagtcccaccctcacacgattctttacctttcacttcatcttgcccttcattattgcagccctagcagcactccacctcctattcttgcacgaaacgggatcaaacaaccccctaggaatcacctcccattccgataaaatcaccttccacccttactacacaatcaaagacgccctcggcttacttctcttccttctctccttaatgacattaacactattctcaccagacctcctaggcgacccagacaattataccctagccaaccccttaaacacccctccccacatcaagcccgaatgatatttcctattcgcctacacaattctccgatccgtccctaacaaactaggaggcgtccttgccctattactatccatcctcatcctagcaataatccccatcctccatatatccaaacaacaaagcataatatttcgcccactaagccaatcactttattgactcctagccgcagacctcctcattctaacctgaatcggaggacaaccagtaagctacccttttaccatcattggacaagtagcatccgtactatacttcacaacaatcctaatcctaataccaactatctccctaattgaaaacaaaatactcaaatgggcctgtccttgtagtataaactaatacaccagtcttgtaaaccggagatgaaaacctttttccaaggacaaatcagagaaaaagtctttaactccaccattagcacccaaagctaagattctaatttaaactattctctgttctttcatggggaagcagatttgggtaccacccaagtattgactcacccatcaacaaccgctatgtatttcgtacattactgccagccaccatgaatattgtacggtaccataaatacttgaccacctgtagtacataaaaacccaatccacatcaaaaccccctccccatgcttacaagcaagtacagcaatcaaccctcaactatcacacatcaactgcaactccaaagccacccctcacccactaggataccaacaaacctacccacccttaacagtacatagtacataaagccatttaccgtacatagcacattacagtcaaatcccttctcgtccccatggatgacccccctcagataggggtcccttgaccaccatcctccgtgaaatcaatatcccgcacaagagtgctactctcctcgctccgggcccataacacttgggggtagctaaagtgaactgtatccgacatctggttcctacttcagggccataaagcctaaatagcccacacgttccccttaaataagacatcacgatg

SEQ ID NO: 466 - DNA, 16570 bp, Homo sapiens mitochondrial
  3108: "n" refers to a nucleotide at position 3107 of the Cambridge Reference Sequence (CRS, Anderson et al. 1981 Nature 290:457-465), later determined to be absent from the human mtDNA sequence according to the revised CRS (rCRS, Andrews et al. 1999 Nature Genetics 23:147); "n" therefore represents a single nucleotide deletion at a position corresponding to nucleotide 3107 of SEQ ID NO:1 as provided herein.
gatcacaggtctatcaccctattaaccactcacgggagctctccatgcatttggtattttcgtctggggggtatgcacgcgatagcattgcgagacgctggagccggagcaccctatgtcgcagtatctgtctttgattcctgcctcatcccattatttatcgcacctacgttcaatattacaggcgaacatacttactaaagtgtgttaattaattaatgcttgtaggacataataataacaattgaatgtctgcacagccgctttccacacagacatcataacaaaaaatttccaccaaaccccccctcccccgccttctggccacagcacttaaacacatctctgccaaaccccaaaaacaaagaaccctaacaccagcctaaccagatttcaaattttatcttttggcggtatgcacttttaacagtcaccccccaactaacacattattttcccctcccactcccatactactaatctcatcaatacaacccccgcccatcctacccagcacacacacaccgctgctaaccccataccccgaaccaaccaaaccccaaagacaccccccacagtttatgtagcttacctcctcaaagcaatacactgaaaatgtttagacgggctcacatcaccccataaacaaataggtttggtcctagcctttctattagctcttagtaagattacacatgcaagcatccccgttccagtgagttcaccctctaaatcaccacgatcaaaagggacaagcatcaagcacgcagcaatgcagctcaaaacgcttagcctagccacacccccacgggaaacagcagtgattaacctttagcaataaacgaaagtttaactaagctatactaaccccagggttggtcaatttcgtgccagccaccgcggtcacacgattaacccaagtcaatagaagccggcgtaaagagtgttttagatcaccccctccccaataaagctaaaactcacctgagttgtaaaaaactccagttgacacaaaatagactacgaaagtggctttaacatatctgaacacacaatagctaagacccaaactgggattagataccccactatgcttagccctaaacctcaacagttaaatcaacaaaactgctcgccagaacactacgagccacagcttaaaactcaaaggacctggcggtgcttcatatccctctagaggagcctgttctgtaatcgataaaccccgatcaacctcaccacctcttgctcagcctatataccgccatcttcagcaaaccctgatgaaggctacaaagtaagcgcaagtacccacgtaaagacgttaggtcaaggtgtagcccatgaggtggcaagaaatgggctacattttctaccccagaaaactacgatagcccttatgaaacttaagggtcgaaggtggatttagcagtaaactgagagtagagtgcttagttgaacagggccctgaagcgcgtacacaccgcccgtcaccctcctcaagtatacttcaaaggacatttaactaaaacccctacgcatttatatagaggagacaagtcgtaacatggtaagtgtactggaaagtgcacttggacgaaccagagtgtagcttaacacaaagcacccaacttacacttaggagatttcaacttaacttgaccgctctgagctaaacctagccccaaacccactccaccttactaccagacaaccttagccaaaccatttacccaaataaagtataggcgatagaaattgaaacctggcgcaatagatatagtaccgcaagggaaagatgaaaaattataaccaagcataatatagcaaggactaacccctataccttctgcataatgaattaactagaaataactttgcaaggagagccaaagctaagacccccgaaaccagacgagctacctaagaacagctaaaagagcacacccgtctatgtagcaaaatagtgggaagatttataggtagaggcgacaaacctaccgagcctggtgatagctggttgtccaagatagaatcttagttcaactttaaatttgcccacagaaccctctaaatccccttgtaaatttaactgttagtccaaagaggaacagctctttggacactaggaaaaaaccttgtagagagagtaaaaaatttaacacccatagtaggcctaaaagcagccaccaattaagaaagcgttcaagctcaacacccactacctaaaaaatcccaaacatataactgaactcctcacacccaattggaccaatctatcaccctatagaagaactaatgttagtataagtaacatgaaaacattctcctccgcataagcctgcgtcagattaaaacactgaactgacaattaacagcccaatatctacaatcaaccaacaagtcattattaccctcactgtcaacccaacacaggcatgctcataaggaaaggttaaaaaaagtaaaaggaactcggcaaatcttaccccgcctgtttaccaaaaacatcacctctagcatcaccagtattagaggcaccgcctgcccagtgacacatgtttaacggccgcggtaccctaaccgtgcaaaggtagcataatcacttgttccttaaatagggacctgtatgaatggctccacgagggttcagctgtctcttacttttaaccagtgaaattgacctgcccgtgaagaggcgggcataacacagcaagacgagaagaccctatggagctttaatttattaatgcaaacagtacctaacaaacccacaggtcctaaactaccaaacctgcattaaaaatttcggttggggcgacctcggagcagaacccaacctccgagcagtacatgctaagacttcaccagtcaaagcgaactactatactcaattgatccaataacttgaccaacggaacaagttaccctagggataacagcgcaatcctattctagagtccatatcaacaatagggtttacgacctcgatgttggatcaggacatcccgatggtgcagccgctattaaaggttcgtttgttcaacgattaaagtcctacgtgatctgagttcagaccggagtaatccaggtcggtttctatctacnttcaaattcctccctgtacgaaaggacaagagaaataaggcctacttcacaaagcgccttcccccgtaaatgatatcatctcaacttagtattatacccacacccacccaagaacagggtttgttaagatggcagagcccggtaatcgcataaaacttaaaactttacagtcagaggttcaattcctcttcttaacaacatacccatggccaacctcctactcctcattgtacccattctaatcgcaatggcattcctaatgcttaccgaacgaaaaattctaggctatatacaactacgcaaaggccccaacgttgtaggcccctacgggctactacaacccttcgctgacgccataaaactcttcaccaaagagcccctaaaacccgccacatctaccatcaccctctacatcaccgccccgaccttagctctcaccatcgctcttctactatgaacccccctccccatacccaaccccctggtcaacctcaacctaggcctcctatttattctagccacctctagcctagccgtttactcaatcctctgatcagggtgagcatcaaactcaaactacgccctgatcggcgcactgcgagcagtagcccaaacaatctcatatgaagtcaccctagccatcattctactatcaacattactaataagtggctcctttaacctctccacccttatcacaacacaagaacacctctgattactcctgccatcatgacccttggccataatatgatttatctccacactagcagagaccaaccgaacccccttcgaccttgccgaaggggagtccgaactagtctcaggcttcaacatcgaatacgccgcaggccccttcgccctattcttcatagccgaatacacaaacattattataataaacaccctcaccactacaatcttcctaggaacaacatatgacgcactctcccctgaactctacacaacatattttgtcaccaagaccctacttctaacctccctgttcttatgaattcgaacagcatacccccgattccgctacgaccaactcatacacctcctatgaaaaaactttctaccactcaccctagcattacttatatgatatgtctccatacccattacaatctccagcattccccctcaaacctaagaaatatgtctgataaaagagttactttgatagagtaaataataggagcttaaacccccttatttctaggactatgagaatcgaacccatccctgagaatccaaaattctccgtgccacctatcacaccccatcctaaagtaaggtcagctaaataagctatcgggcccataccccgaaaatgttggttatacccttcccgtactaattaatcccctggcccaacccgtcatctactctaccatctttgcaggcacactcatcacagcgctaagctcgcactgattttttacctgagtaggcctagaaataaacatgctagcttttattccagttctaaccaaaaaaataaaccctcgttccacagaagctgccatcaagtatttcctcacgcaagcaaccgcatccataatccttctaatagctatcctcttcaacaatatactctccggacaatgaaccataaccaatactaccaatcaatactcatcattaataatcataatggctatagcaataaaactaggaatggccccctttcacttctgagtcccagaggttacccaaggcacccctctgacatccggcctgcttcttctcacatgacaaaaactagcccccatctcaatcatataccaaatctctccctcactaaacgtaagccttctcctcactctctcaatcttatccatcatagcaggcagttgaggtggattaaaccaaacccagctacgcaaaatcttagcatactcctcaattacccacataggatgaataatagcagttctaccgtacaaccctaacataaccattcttaatttaactatttatattatcctaactactaccgcattcctactactcaacttaaactccagcaccacgaccctactactatctcgcacctgaaacaagctaacatgactaacacccttaattccatccaccctcctctccctaggaggcctgcccccgctaaccggctttttgcccaaatgggccattatcgaagaattcacaaaaaacaatagcctcatcatccccaccatcatagccaccatcaccctccttaacctctacttctacctacgcctaatctactccacctcaatcacactactccccatatctaacaacgtaaaaataaaatgacagtttgaacatacaaaacccaccccattcctccccacactcatcgcccttaccacgctactcctacctatctccccttttatactaataatcttatagaaatttaggttaaatacagaccaagagccttcaaagccctcagtaagttgcaatacttaatttctgtaacagctaaggactgcaaaaccccactctgcatcaactgaacgcaaatcagccactttaattaagctaagcccttactagaccaatgggacttaaacccacaaacacttagttaacagctaagcaccctaatcaactggcttcaatctacttctcccgccgccgggaaaaaaggcgggagaagccccggcaggtttgaagctgcttcttcgaatttgcaattcaatatgaaaatcacctcggagctggtaaaaagaggcctaacccctgtctttagatttacagtccaatgcttcactcagccattttacctcacccccactgatgttcgccgaccgttgactattctctacaaaccacaaagacattggaacactatacctattattcggcgcatgagctggagtcctaggcacagctctaagcctccttattcgagccgagctgggccagccaggcaaccttctaggtaacgaccacatctacaacgttatcgtcacagcccatgcatttgtaataatcttcttcatagtaatacccatcataatcggaggctttggcaactgactagttcccctaataatcggtgcccccgatatggcgtttccccgcataaacaacataagcttctgactcttacctccctctctcctactcctgctcgcatctgctatagtggaggccggagcaggaacaggttgaacagtctaccctcccttagcagggaactactcccaccctggagcctccgtagacctaaccatcttctccttacacctagcaggtgtctcctctatcttaggggccatcaatttcatcacaacaattatcaatataaaaccccctgccataacccaataccaaacgcccctcttcgtctgatccgtcctaatcacagcagtcctacttctcctatctctcccagtcctagctgctggcatcactatactactaacagaccgcaacctcaacaccaccttcttcgaccccgccggaggaggagaccccattctataccaacacctattctgatttttcggtcaccctgaagtttatattcttatcctaccaggcttcggaataatctcccatattgtaacttactactccggaaaaaaagaaccatttggatacataggtatggtctgagctatgatatcaattggcttcctagggtttatcgtgtgagcacaccatatatttacagtaggaatagacgtagacacacgagcatatttcacctccgctaccataatcatcgctatccccaccggcgtcaaagtatttagctgactcgccacactccacggaagcaatatgaaatgatctgctgcagtgctctgagccctaggattcatctttcttttcaccgtaggtggcctgactggcattgtattagcaaactcatcactagacatcgtactacacgacacgtactacgttgtagcccacttccactatgtcctatcaataggagctgtatttgccatcataggaggcttcattcactgatttcccctattctcaggctacaccctagaccaaacctacgccaaaatccatttcactatcatattcatcggcgtaaatctaactttcttcccacaacactttctcggcctatccggaatgccccgacgttactcggactaccccgatgcatacaccacatgaaacatcctatcatctgtaggctcattcatttctctaacagcagtaatattaataattttcatgatttgagaagccttcgcttcgaagcgaaaagtcctaatagtagaagaaccctccataaacctggagtgactatatggatgccccccaccctaccacacattcgaagaacccgtatacataaaatctagacaaaaaaggaaggaatcgaaccccccaaagctggtttcaagccaaccccatggcctccatgactttttcaaaaaggtattagaaaaaccatttcataactttgtcaaagttaaattataggctaaatcctatatatcttaatggcacatgcagcgcaagtaggtctacaagacgctacttcccctatcatagaagagcttatcacctttcatgatcacgccctcataatcattttccttatctgcttcctagtcctgtatgcccttttcctaacactcacaacaaaactaactaatactaacatctcagacgctcaggaaatagaaaccgtctgaactatcctgcccgccatcatcctagtcctcatcgccctcccatccctacgcatcctttacataacagacgaggtcaacgatccctcccttaccatcaaatcaattggccaccaatggtactgaacctacgagtacaccgactacggcggactaatcttcaactcctacatacttcccccattattcctagaaccaggcgacctgcgactccttgacgttgacaatcgagtagtactcccgattgaagcccccattcgtataataattacatcacaagacgtcttgcactcatgagctgtccccacattaggcttaaaaacagatgcaattcccggacgtctaaaccaaaccactttcaccgctacacgaccgggggtatactacggtcaatgctctgaaatctgtggagcaaaccacagtttcatgcccatcgtcctagaattaattcccctaaaaatctttgaaatagggcccgtatttaccctatagcaccccctctaccccctctagagcccactgtaaagctaacttagcattaaccttttaagttaaagattaagagaaccaacacctctttacagtgaaatgccccaactaaatactaccgtatggcccaccataattacccccatactccttacactattcctcatcacccaactaaaaatattaaacacaaactaccacctacctccctcaccaaagcccataaaaataaaaaattataacaaaccctgagaaccaaaatgaacgaaaatctgttcgcttcattcattgcccccacaatcctaggcctacccgccgcagtactgatcattctatttccccctctattgatccccacctccaaatatctcatcaacaaccgactaatcaccacccaacaatgactaatcaaactaacctcaaaacaaatgataaccatacacaacactaaaggacgaacctgatctcttatactagtatccttaatcatttttattgccacaactaacctcctcggactcctgcctcactcatttacaccaaccacccaactatctataaacctagccatggccatccccttatgagcgggcgcagtgattataggctttcgctctaagattaaaaatgccctagcccacttcttaccacaaggcacacctacaccccttatccccatactagttattatcgaaaccatcagcctactcattcaaccaatagccctggccgtacgcctaaccgctaacattactgcaggccacctactcatgcacctaattggaagcgccaccctagcaatatcaaccattaaccttccctctacacttatcatcttcacaattctaattctactgactatcctagaaatcgctgtcgccttaatccaagcctacgttttcacacttctagtaagcctctacctgcacgacaacacataatgacccaccaatcacatgcctatcatatagtaaaacccagcccatgacccctaacaggggccctctcagccctcctaatgacctccggcctagccatgtgatttcacttccactccgtaacgctcctcatactaggcctactaaccaacacactaaccatataccaatgatggcgcgatgtaacacgagaaagcacataccaaggccaccacacaccacctgtccaaaaaggccttcgatacgggataatcctatttattacctcagaagtttttttcttcgcaggatttttctgagccttttaccactccagcctagcccctaccccccaattaggagggcactggcccccaacaggcatcaccccgctaaatcccctagaagtcccactcctaaacacatccgtattactcgcatcaggagtatcaatcacctgagctcaccatagtctaatagaaaacaaccgaaaccaaataattcaagcactgcttattacaattttactgggtctctattttaccctcctacaagcctcagagtacttcgagtctcccttcaccatttccgacggcatctacggctcaacattttttgtagccacaggcttccacggacttcacgtcattattggctcaactttcctcactatctgcttcatccgccaactaatatttcactttacatccaaacatcactttggcttcgaagccgccgcctgatactggcattttgtagatgtggtttgactatttctgtatgtctccatctattgatgagggtcttactcttttagtataaatagtaccgttaacttccaattaactagttttgacaacattcaaaaaagagtaataaacttcgccttaattttaataatcaacaccctcctagccttactactaataattattacattttgactaccacaactcaacggctacatagaaaaatccaccccttacgagtgcggcttcgaccctatatcccccgcccgcgtccctttctccataaaattcttcttagtagctattaccttcttattatttgatctagaaattgccctccttttacccctaccatgagccctacaaacaactaacctgccactaatagttatgtcatccctcttattaatcatcatcctagccctaagtctggcctatgagtgactacaaaaaggattagactgatccgaattggtatatagtttaaacaaaacgaatgatttcgactcattaaattatgataatcatatttaccaaatgcccctcatttacataaatattatactagcatttaccatctcacttctaggaatactagtatatcgctcacacctcatatcctccctactatgcctagaaggaataatactatcgctgttcattatagctactctcataaccctcaacacccactccctcttagccaatattgtgcctattgccatactagtctttgccgcctgcgaagcagcggtgggcctagccctactagtctcaatctccaacacatatggcctagactacgtacataacctaaacctactccaatgctaaaactaatcgtcccaacaattatattactaccactgacatgactttccaaaaaacacataatttgaatcaacacaaccacccacagcctaattattagcatcatccctctactattttttaaccaaatcaacaacaacctatttagctgttccccaaccttttcctccgaccccctaacaacccccctcctaatactaactacctgactcctacccctcacaatcatggcaagccaacgccacttatccagtgaaccactatcacgaaaaaaactctacctctctatactaatctccctacaaatctccttaattataacattcacagccacagaactaatcatattttatatcttcttcgaaaccacacttatccccaccttggctatcatcacccgatgaggcaaccagccagaacgcctgaacgcaggcacatacttcctattctacaccctagtaggctcccttcccctactcatcgcactaatttacactcacaacaccctaggctcactaaacattctactactcactctcactgcccaagaactatcaaactcctgagccaacaacttaatatgactagcttacacaatagcttttatagtaaagatacctctttacggactccacttatgactccctaaagcccatgtcgaagcccccatcgctgggtcaatagtacttgccgcagtactcttaaaactaggcggctatggtataatacgcctcacactcattctcaaccccctgacaaaacacatagcctaccccttccttgtactatccctatgaggcataattataacaagctccatctgcctacgacaaacagacctaaaatcgctcattgcatactcttcaatcagccacatagccctcgtagtaacagccattctcatccaaaccccctgaagcttcaccggcgcagtcattctcataatcgcccacgggcttacatcctcattactattctgcctagcaaactcaaactacgaacgcactcacagtcgcatcataatcctctctcaaggacttcaaactctactcccactaatagctttttgatgacttctagcaagcctcgctaacctcgccttaccccccactattaacctactgggagaactctctgtgctagtaaccacgttctcctgatcaaatatcactctcctacttacaggactcaacatactagtcacagccctatactccctctacatatttaccacaacacaatggggctcactcacccaccacattaacaacataaaaccctcattcacacgagaaaacaccctcatgttcatacacctatcccccattctcctcctatccctcaaccccgacatcattaccgggttttcctcttgtaaatatagtttaaccaaaacatcagattgtgaatctgacaacagaggcttacgaccccttatttaccgagaaagctcacaagaactgctaactcatgcccccatgtctaacaacatggctttctcaacttttaaaggataacagctatccattggtcttaggccccaaaaattttggtgcaactccaaataaaagtaataaccatgcacactactataaccaccctaaccctgacttccctaattccccccatccttaccaccctcgttaaccctaacaaaaaaaactcatacccccattatgtaaaatccattgtcgcatccacctttattatcagtctcttccccacaacaatattcatgtgcctagaccaagaagttattatctcgaactgacactgagccacaacccaaacaacccagctctccctaagcttcaaactagactacttctccataatattcatccctgtagcattgttcgttacatggtccatcatagaattctcactgtgatatataaactcagacccaaacattaatcagttcttcaaatatctactcatcttcctaattaccatactaatcttagttaccgctaacaacctattccaactgttcatcggctgagagggcgtaggaattatatccttcttgctcatcagttgatgatacgcccgagcagatgccaacacagcagccattcaagcaatcctatacaaccgtatcggcgatatcggtttcatcctcgccttagcatgatttatcctacactccaactcatgagacccacaacaaatagcccttctaaacgctaatccaagcctcaccccactactaggcctcctcctagcagcagcaggcaaatcagcccaattaggtctccacccctgactcccctcagccatagaaggccccaccccagtctcagccctactccactcaagcactatagttgtagcaggaatcttcttactcatccgcttccaccccctagcagaaaatagcccactaatccaaactctaacactatgcttaggcgctatcaccactctgttcgcagcagtctgcgcccttacacaaaatgacatcaaaaaaatcgtagccttctccacttcaagtcaactaggactcataatagttacaatcggcatcaaccaaccacacctagcattcctgcacatctgtacccacgccttcttcaaagccatactatttatgtgctccgggtccatcatccacaaccttaacaatgaacaagatattcgaaaaataggaggactactcaaaaccatacctctcacttcaacctccctcaccattggcagcctagcattagcaggaatacctttcctcacaggtttctactccaaagaccacatcatcgaaaccgcaaacatatcatacacaaacgcctgagccctatctattactctcatcgctacctccctgacaagcgcctatagcactcgaataattcttctcaccctaacaggtcaacctcgcttccccacccttactaacattaacgaaaataaccccaccctactaaaccccattaaacgcctggcagccggaagcctattcgcaggatttctcattactaacaacatttcccccgcatcccccttccaaacaacaatccccctctacctaaaactcacagccctcgctgtcactttcctaggacttctaacagccctagacctcaactacctaaccaacaaacttaaaataaaatccccactatgcacattttatttctccaacatactcggattctaccctagcatcacacaccgcacaatcccctatctaggccttcttacgagccaaaacctgcccctactcctcctagacctaacctgactagaaaagctattacctaaaacaatttcacagcaccaaatctccacctccatcatcacctcaacccaaaaaggcataattaaactttacttcctctctttcttcttcccactcatcctaaccctactcctaatcacataacctattcccccgagcaatctcaattacaatatatacaccaacaaacaatgttcaaccagtaactactactaatcaacgcccataatcatacaaagcccccgcaccaataggatcctcccgaatcaaccctgacccctctccttcataaattattcagcttcctacactattaaagtttaccacaaccaccaccccatcatactctttcacccacagcaccaatcctacctccatcgctaaccccactaaaacactcaccaagacctcaacccctgacccccatgcctcaggatactcctcaatagccatcgctgtagtatatccaaagacaaccatcattccccctaaataaattaaaaaaactattaaacccatataacctcccccaaaattcagaataataacacacccgaccacaccgctaacaatcaatactaaacccccataaataggagaaggcttagaagaaaaccccacaaaccccattactaaacccacactcaacagaaacaaagcatacatcattattctcgcacggactacaaccacgaccaatgatatgaaaaaccatcgttgtatttcaactacaagaacaccaatgaccccaatacgcaaaactaaccccctaataaaattaattaaccactcattcatcgacctccccaccccatccaacatctccgcatgatgaaacttcggctcactccttggcgcctgcctgatcctccaaatcaccacaggactattcctagccatgcactactcaccagacgcctcaaccgccttttcatcaatcgcccacatcactcgagacgtaaattatggctgaatcatccgctaccttcacgccaatggcgcctcaatattctttatctgcctcttcctacacatcgggcgaggcctatattacggatcatttctctactcagaaacctgaaacatcggcattatcctcctgcttgcaactatagcaacagccttcataggctatgtcctcccgtgaggccaaatatcattctgaggggccacagtaattacaaacttactatccgccatcccatacattgggacagacctagttcaatgaatctgaggaggctactcagtagacagtcccaccctcacacgattctttacctttcacttcatcttgcccttcattattgcagccctagcagcactccacctcctattcttgcacgaaacgggatcaaacaaccccctaggaatcacctcccattccgataaaatcaccttccacccttactacacaatcaaagacgccctcggcttacttctcttccttctctccttaatgacattaacactattctcaccagacctcctaggcgacccagacaattataccctagccaaccccttaaacacccctccccacatcaagcccgaatgatatttcctattcgcctacacaattctccgatccgtccctaacaaactaggaggcgtccttgccctattactatccatcctcatcctagcaataatccccatcctccatatatccaaacaacaaagcataatatttcgcccactaagccaatcactttattgactcctagccgcagacctcctcattctaacctgaatcggaggacaaccagtaagctacccttttaccatcattggacaagtagcatccgtactatacttcacaacaatcctaatcctaataccaactatctccctaattgaaaacaaaatactcaaatgggcctgtccttgtagtataaactaatacaccagtcttgtaaaccggagatgaaaacctttttccaaggacaaatcagagaaaaagtctttaactccaccattagcacccaaagctaagattctaatttaaactattctctgttctttcatggggaagcagatttgggtaccacccaagtattgactcacccatcaacaaccgctatgtatttcgtacattactgccagccaccatgaatattgtacggtaccataaatacttgaccacctgtagtacataaaaacccaatccacatcaaaaccccctccccatgcttacaagcaagtacagcaatcaaccctcaactatcacacatcaactgcaactccaaagccacccctcacccaccaggataccaacaaacctacccacccttaacagtacatagtacataaagccatttaccgtacatagcacattacagtcaaatcccttctcgtccccatggatgacccccctcagataggggtcccttgaccaccatcctccgtgaaatcaatatcccgcacaagagtgctactctcctcgctccgggcccataacacttgggggtagctaaagtgaactgtatccgacatctggttcctacttcagggccataaagcctaaatagcccacacgttccccttaaataagacatcacgatg

SEQ ID NO: 467 - DNA, 16571 bp, Homo sapiens mitochondrial
  3109: "n" refers to a nucleotide at position 3107 of the Cambridge Reference Sequence (CRS, Anderson et al. 1981 Nature 290:457-465), later determined to be absent from the human mtDNA sequence according to the revised CRS (rCRS, Andrews et al. 1999 Nature Genetics 23:147); "n" therefore represents a single nucleotide deletion at a position corresponding to nucleotide 3107 of SEQ ID NO:1 as provided herein.
gatcacaggtctatcaccctattaaccactcacgggagctctccatgcatttggtattttcgtctggggggtatgcacgcgatagcattgcgagacgctggagccggagcaccctatgtcgcagtatctgtctttgattcctgcctcatcccattatttatcgcacctacgttcaatattacaggcgaacatacttactaaagtgtgttaattaattaatgcttgtaggacataataataacaattgaatgtctgcacagccgctttccacacagacatcataacaaaaaatttccaccaaaccccccctcccccccgcttctggccacagcacttaaacacatctctgccaaaccccaaaaacaaagaaccctaacaccagcctaaccagatttcaaattttatcttttggcggtatgcacttttaacagtcaccccccaactaacacattattttcccctcccactcccatactactaatctcatcaatacaacccccgcccatcctacccagcacacacacaccgctgctaaccccataccccgaaccaaccaaaccccaaagacaccccccacagtttatgtagcttacctcctcaaagcaatacactgaaaatgtttagacgggctcacatcaccccataaacaaataggtttggtcctagcctttctattagctcttagtaagattacacatgcaagcatccccgttccagtgagttcaccctctaaatcaccacgatcaaaagggacaagcatcaagcacgcagcaatgcagctcaaaacgcttagcctagccacacccccacgggaaacagcagtgattaacctttagcaataaacgaaagtttaactaagctatactaaccccagggttggtcaatttcgtgccagccaccgcggtcacacgattaacccaagtcaatagaagccggcgtaaagagtgttttagatcaccccctccccaataaagctaaaactcacctgagttgtaaaaaactccagttgacacaaaatagactacgaaagtggctttaacatatctgaacacacaatagctaagacccaaactgggattagataccccactatgcttagccctaaacctcaacagttaaatcaacaaaactgctcgccagaacactacgagccacagcttaaaactcaaaggacctggcggtgcttcatatccctctagaggagcctgttctgtaatcgataaaccccgatcaacctcaccacctcttgctcagcctatataccgccatcttcagcaaaccctgatgaaggctacaaagtaagcgcaagtacccacgtaaagacgttaggtcaaggtgtagcccatgaggtggcaagaaatgggctacattttctaccccagaaaactacgatagcccttatgaaacttaagggtcgaaggtggatttagcagtaaactgagagtagagtgcttagttgaacagggccctgaagcgcgtacacaccgcccgtcaccctcctcaagtatacttcaaaggacatttaactaaaacccctacgcatttatatagaggagacaagtcgtaacatggtaagtgtactggaaagtgcacttggacgaaccagagtgtagcttaacacaaagcacccaacttacacttaggagatttcaacttaacttgaccgctctgagctaaacctagccccaaacccactccaccttactaccagacaaccttagccaaaccatttacccaaataaagtataggcgatagaaattgaaacctggcgcaatagatatagtaccgcaagggaaagatgaaaaattataaccaagcataatatagcaaggactaacccctataccttctgcataatgaattaactagaaataactttgcaaggagagccaaagctaagacccccgaaaccagacgagctacctaagaacagctaaaagagcacacccgtctatgtagcaaaatagtgggaagatttataggtagaggcgacaaacctaccgagcctggtgatagctggttgtccaagatagaatcttagttcaactttaaatttgcccacagaaccctctaaatccccttgtaaatttaactgttagtccaaagaggaacagctctttggacactaggaaaaaaccttgtagagagagtaaaaaatttaacacccatagtaggcctaaaagcagccaccaattaagaaagcgttcaagctcaacacccactacctaaaaaatcccaaacatataactgaactcctcacacccaattggaccaatctatcaccctatagaagaactaatgttagtataagtaacatgaaaacattctcctccgcataagcctgcgtcagattaaaacactgaactgacaattaacagcccaatatctacaatcaaccaacaagtcattattaccctcactgtcaacccaacacaggcatgctcataaggaaaggttaaaaaaagtaaaaggaactcggcaaatcttaccccgcctgtttaccaaaaacatcacctctagcatcaccagtattagaggcaccgcctgcccagtgacacatgtttaacggccgcggtaccctaaccgtgcaaaggtagcataatcacttgttccttaaatagggacctgtatgaatggctccacgagggttcagctgtctcttacttttaaccagtgaaattgacctgcccgtgaagaggcgggcataacacagcaagacgagaagaccctatggagctttaatttattaatgcaaacagtacctaacaaacccacaggtcctaaactaccaaacctgcattaaaaatttcggttggggcgacctcggagcagaacccaacctccgagcagtacatgctaagacttcaccagtcaaagcgaactactatactcaattgatccaataacttgaccaacggaacaagttaccctagggataacagcgcaatcctattctagagtccatatcaacaatagggtttacgacctcgatgttggatcaggacatcccgatggtgcagccgctattaaaggttcgtttgttcaacgattaaagtcctacgtgatctgagttcagaccggagtaatccaggtcggtttctatctacnttcaaattcctccctgtacgaaaggacaagagaaataaggcctacttcacaaagcgccttcccccgtaaatgatatcatctcaacttagtattatacccacacccacccaagaacagggtttgttaagatggcagagcccggtaatcgcataaaacttaaaactttacagtcagaggttcaattcctcttcttaacaacatacccatggccaacctcctactcctcattgtacccattctaatcgcaatggcattcctaatgcttaccgaacgaaaaattctaggctatatacaactacgcaaaggccccaacgttgtaggcccctacgggctactacaacccttcgctgacgccataaaactcttcaccaaagagcccctaaaacccgccacatctaccatcaccctctacatcaccgccccgaccttagctctcaccatcgctcttctactatgaacccccctccccatacccaaccccctggtcaacctcaacctaggcctcctatttattctagccacctctagcctagccgtttactcaatcctctgatcagggtgagcatcaaactcaaactacgccctgatcggcgcactgcgagcagtagcccaaacaatctcatatgaagtcaccctagccatcattctactatcaacattactaataagtggctcctttaacctctccacccttatcacaacacaagaacacctctgattactcctgccatcatgacccttggccataatatgatttatctccacactagcagagaccaaccgaacccccttcgaccttgccgaaggggagtccgaactagtctcaggcttcaacatcgaatacgccgcaggccccttcgccctattcttcatagccgaatacacaaacattattataataaacaccctcaccactacaatcttcctaggaacaacatatgacgcactctcccctgaactctacacaacatattttgtcaccaagaccctacttctaacctccctgttcttatgaattcgaacagcatacccccgattccgctacgaccaactcatacacctcctatgaaaaaacttcctaccactcaccctagcattacttatatgatatgtctccatacccattacaatctccagcattccccctcaaacctaagaaatatgtctgataaaagagttactttgatagagtaaataataggagcttaaacccccttatttctaggactatgagaatcgaacccatccctgagaatccaaaattctccgtgccacctatcacaccccatcctaaagtaaggtcagctaaataagctatcgggcccataccccgaaaatgttggttatacccttcccgtactaattaatcccctggcccaacccgtcatctactctaccatctttgcaggcacactcatcacagcgctaagctcgcactgattttttacctgagtaggcctagaaataaacatgctagcttttattccagttctaaccaaaaaaataaaccctcgttccgcagaagctgccatcaagtatttcctcacgcaagcaaccgcatccataatccttctaatagctatcctcttcaacaatatactctccggacaatgaaccataaccaatactaccaatcaatactcatcattaataatcataatggctatagcaataaaactaggaatagccccctttcacttctgagtcccagaggttacccaaggcacccctctgacatccggcctgcttcttctcacatgacaaaaactagcccccatctcaatcatataccaaatctctccctcactaaacgtaagccttctcctcactctctcaatcttatccatcatagcaggcagttgaggtggattaaaccaaacccagctacgcaaaatcttagcatactcctcaattacccacataggatgaataatagcagttctaccgtacaaccctaacataaccattcttaatttaactatttatattatcctaactactaccgcattcctactactcaacttaaactccagcaccacgaccctactactatctcgcacctgaaacaagctaacatgactaacacccttaattccatccaccctcctctccctaggaggcctgcccccgctaaccggctttttgcccaaatgggccattatcgaagaattcacaaaaaacaatagcctcatcatccccaccatcatagccaccatcaccctccttaacctctacttctacctacgcctaatctactccacctcaatcacactactccccatatctaacaacgtaaaaataaaatgacagtttgaacatacaaaacccaccccattcctccccacactcatcgcccttaccacgctactcctacctatctccccttttatactaataatcttatagaaatttaggttaaatacagaccaagagccttcaaagccctcagtaagttgcaatacttaatttctgtaacagctaaggactgcaaaaccccactctgcatcaactgaacgcaaatcagccactttaattaagctaagcccttactagaccaatgggacttaaacccacaaacacttagttaacagctaagcaccctaatcaactggcttcaatctacttctcccgccgccgggaaaaaaggcgggagaagccccggcaggtttgaagctgcttcttcgaatttgcaattcaatatgaaaatcacctcggagctggtaaaaagaggcctaacccctgtctttagatttacagtccaatgcttcactcagccattttacctcacccccactgatgttcgccgaccgttgactattctctacaaaccacaaagacattggaacactatacctattattcggcgcatgagctggagtcctaggcacagctctaagcctccttattcgagccgagctgggccagccaggcaaccttctaggtaacgaccacatctacaacgttatcgtcacagcccatgcatttgtaataatcttcttcatagtaatacccatcataatcggaggctttggcaactgactagttcccctaataatcggtgcccccgatatggcgtttccccgcataaacaacataagcttctgactcttacctccctctctcctactcctgctcgcatctgctatagtggaggccggagcaggaacaggttgaacagtctaccctcccttagcagggaactactcccaccctggagcctccgtagacctaaccatcttctccttacacctagcaggtgtctcctctatcttaggggccatcaatttcatcacaacaattatcaatataaaaccccctgccataacccaataccaaacgcccctcttcgtctgatccgtcctaatcacagcagtcctacttctcctatctctcccagtcctagctgctggcatcactatactactaacagaccgcaacctcaacaccaccttcttcgaccccgccggaggaggagaccccattctataccaacacctattctgatttttcggtcaccctgaagtttatattcttatcctaccaggcttcggaataatctcccatattgtaacttactactccggaaaaaaagaaccatttggatacataggtatggtctgagctatgatatcaattggcttcctagggtttatcgtgtgagcacaccatatatttacagtaggaatagacgtagacacacgagcatatttcacctccgctaccataatcatcgctatccccaccggcgtcaaagtatttagctgactcgccacactccacggaagcaatatgaaatgatctgctgcagtgctctgagccctaggattcatctttcttttcaccgtaggtggcctgactggcattgtattagcaaactcatcactagacatcgtactacacgacacgtactacgttgtagcccacttccactatgtcctatcaataggagctgtatttgccatcataggaggcttcattcactgatttcccctattctcaggctacaccctagaccaaacctacgccaaaatccatttcactatcatattcatcggcgtaaatctaactttcttcccacaacactttctcggcctatccggaatgccccgacgttactcggactaccccgatgcatacaccacatgaaacatcctatcatctgtaggctcattcatttctctaacagcagtaatattaataattttcatgatttgagaagccttcgcttcgaagcgaaaagtcctaatagtagaagaaccctccataaacctggagtgactatatggatgccccccaccctaccacacattcgaagaacccgtatacataaaatctagacaaaaaaggaaggaatcgaaccccccaaagctggtttcaagccaaccccatggcctccatgactttttcaaaaaggtattagaaaaaccatttcataactttgtcaaagttaaattataggctaaatcctatatatcttaatggcacatgcagcgcaagtaggtctacaagacgctacttcccctatcatagaagagcttatcacctttcatgatcacgccctcataatcattttccttatctgcttcctagtcctgtatgcccttttcctaacactcacaacaaaactaactaatactaacatctcagacgctcaggaaatagaaaccgtctgaactatcctgcccgccatcatcctagtcctcatcgccctcccatccctacgcatcctttacataacagacgaggtcaacgatccctcccttaccatcaaatcaattggccaccaatggtactgaacctacgagtacaccgactacggcggactaatcttcaactcctacatacttcccccattattcctagaaccaggcgacctgcgactccttgacgttgacaatcgagtagtactcccgattgaagcccccattcgtataataattacatcacaagacgtcttgcactcatgagctgtccccacattaggcttaaaaacagatgcaattcccggacgtctaaaccaaaccactttcaccgctacacgaccgggggtatactacggtcaatgctctgaaatctgtggagcaaaccacagtttcatgcccatcgtcctagaattaattcccctaaaaatctttgaaatagggcccgtatttaccctatagcaccccctctaccccctctagagcccactgtaaagctaacttagcattaaccttttaagttaaagattaagagaaccaacacctctttacagtgaaatgccccaactaaatactaccgtatggcccaccataattacccccatactccttacactattcctcatcacccaactaaaaatattaaacacaaactaccacctacctccctcaccaaagcccataaaaataaaaaattataacaaaccctgagaaccaaaatgaacgaaaatctgttcgcttcattcattgcccccacaatcctaggcctacccgccgcagtactgatcattctatttccccctctattgatccccacctccaaatatctcatcaacaaccgactaatcaccacccaacaatgactaatcaaactaacctcaaaacaaatgataaccatacacaacactaaaggacgaacctgatctcttatactagtatccttaatcatttttattgccacaactaacctcctcggactcctgcctcactcatttacaccaaccacccaactatctataaacctagccatggccatccccttatgagcgggcgcagtgattataggctttcgctctaagattaaaaatgccctagcccacttcttaccacaaggcacacctacaccccttatccccatactagttattatcgaaaccatcagcctactcattcaaccaatagccctggccgtacgcctaaccgctaacattactgcaggccacctactcatgcacctaattggaagcgccaccctagcaatatcaaccattaaccttccctctacacttatcatcttcacaattctaattctactgactatcctagaaatcgctgtcgccttaatccaagcctacgttttcacacttctagtaagcctctacctgcacgacaacacataatgacccaccaatcacatgcctatcatatagtaaaacccagcccatgacccctaacaggggccctctcagccctcctaatgacctccggcctagccatgtgatttcacttccactccataacgctcctcatactaggcctactaaccaacacactaaccatataccaatgatggcgcgatgtaacacgagaaagcacataccaaggccaccacacaccacctgtccaaaaaggccttcgatacgggataatcctatttattacctcagaagtttttttcttcgcaggatttttctgagccttttaccactccagcctagcccctaccccccaattaggagggcactggcccccaacaggcatcaccccgctaaatcccctagaagtcccactcctaaacacatccgtattactcgcatcaggagtatcaatcacctgagctcaccatagtctaatagaaaacaaccgaaaccaaataattcaagcactgcttattacaattttactgggtctctattttaccctcctacaagcctcagagtacttcgagtctcccttcaccatttccgacggcatctacggctcaacattttttgtagccacaggcttccacggacttcacgtcattattggctcaactttcctcactatctgcttcatccgccaactaatatttcactttacatccaaacatcactttggcttcgaagccgccgcctgatactggcattttgtagatgtggtttgactatttctgtatgtctccatctattgatgagggtcttactcttttagtataaatagtaccgttaacttccaattaactagttttgacaacattcaaaaaagagtaataaacttcgccttaattttaataatcaacaccctcctagccttactactaataattattacattttgactaccacaactcaacggctacatagaaaaatccaccccttacgagtgcggcttcgaccctatatcccccgcccgcgtccctttctccataaaattcttcttagtagctattaccttcttattatttgatctagaaattgccctccttttacccctaccatgagccctacaaacaactaacctgccactaatagttatgtcatccctcttattaatcatcatcctagccctaagtctggcctatgagtgactacaaaaaggattagactgaaccgaattggtatatagtttaaacaaaacgaatgatttcgactcattaaattatgataatcatatttaccaaatgcccctcatttacataaatattatactagcatttaccatctcacttctaggaatactagtatatcgctcacacctcatatcctccctactatgcctagaaggaataatactatcgctgttcattatagctactctcataaccctcaacacccactccctcttagccaatattgtgcctattgccatactagtctttgccgcctgcgaagcagcggtgggcctagccctactagtctcaatctccaacacatatggcctagactacgtacataacctaaacctactccaatgctaaaactaatcgtcccaacaattatattactaccactgacatgactttccaaaaaacacataatttgaatcaacacaaccacccacagcctaattattagcatcatccctctactattttttaaccaaatcaacaacaacctatttagctgttccccaaccttttcctccgaccccctaacaacccccctcctaatactaactacctgactcctacccctcacaatcatggcaagccaacgccacttatccagtgaaccactatcacgaaaaaaactctacctctctatactaatctccctacaaatctccttaattataacattcacagccacagaactaatcatattttatatcttcttcgaaaccacacttatccccaccttggctatcatcacccgatgaggcaaccagccagaacgcctgaacgcaggcacatacttcctattctacaccctagtaggctcccttcccctactcatcgcactaatttacactcacaacaccctaggctcactaaacattctactactcactctcactgcccaagaactatcaaactcctgagccaacaacttaatatgactagcttacacaatagcttttatagtaaagatacctctttacggactccacttatgactccctaaagcccatgtcgaagcccccatcgctgggtcaatagtacttgccgcagtactcttaaaactaggcggctatggtataatacgcctcacactcattctcaaccccctgacaaaacacatagcctaccccttccttgtactatccctatgaggcataattataacaagctccatctgcctacgacaaacagacctaaaatcgctcattgcatactcttcaatcagccacatagccctcgtagtaacagccattctcatccaaaccccctgaagcttcaccggcgcagtcattctcataatcgcccacgggcttacatcctcattactattctgcctagcaaactcaaactacgaacgcactcacagtcacatcataattctctctcaaggacttcaaactctactcccactaatagctttttgatgacttctagcaagcctcgctaacctcgccttaccccccactattaacctactgggagaactctctgtgctagtaaccacgttctcctgatcaaatatcactctcctacttacaggactcaacatactagtcacagccctatactccctctacatatttaccacaacacaatggggctcactcacccaccacattaacaacataaaaccctcattcacacgagaaaacaccctcatgttcatacacctatcccccattctcctcctatccctcaaccccgacatcattaccgggttttcctcttgtaaatatagtttaaccaaaacatcagattgtgaatctgacaacagaggcttacgaccccttatttaccgagaaagctcacaagaactgctaactcatgcccccatgtctaacaacatggctttctcaacttttaaaggataacagctatccattggtcttaggccccaaaaattttggtgcaactccaaataaaagtaataaccatgcacactactataaccaccctaaccctgacttccctaattccccccatccttaccaccctcgttaaccctaacaaaaaaaactcatacccccattatgtaaaatccattgtcgcatccacctttattatcagtctcttccccacaacaatattcatgtgcctagaccaagaagttattatctcgaactgacactgagccacaacccaaacaacccagctctccctaagcttcaaactagactacttctccataatattcatccctgtagcattgttcgttacatggtccatcatagaattctcactgtgatatataaactcagacccaaacattaatcagttcttcaaatatctactcatcttcctaattaccatactaatcttagttaccgctaacaacctattccaactgttcatcggctgagagggcgtaggaattatatccttcttgctcatcagttgatgatacgcccgagcagatgccaacacagcagccattcaagcaatcctatacaaccgtatcggcgatatcggtttcatcctcgccttagcatgatttatcctacactccaactcatgagacccacaacaaatagcccttctaaacgctaatccaagcctcaccccactactaggcctcctcctagcagcagcaggcaaatcagcccaattaggtctccacccctgactcccctcagccatagaaggccccaccccagtctcagccctactccactcaagcactatagttgtagcaggaatcttcttactcatccgcttccaccccctagcagaaaatagcccactaatccaaactctaacactatgcttaggcgctatcaccactctgttcgcagcagtctgcgcccttacacaaaatgacatcaaaaaaatcgtagccttctccacttcaagtcaactaggactcataatagttacaatcggcatcaaccaaccacacctagcattcctgcacatctgtacccacgccttcttcaaagccatactatttatgtgctccgggtccatcatccacaaccttaacaatgaacaagatattcgaaaaataggaggactactcaaaaccatacctctcacttcaacctccctcaccattggcagcctagcattagcaggaatacctttcctcacaggtttctactccaaagaccacatcatcgaaaccgcaaacatatcatacacaaacgcctgagccctatctattactctcatcgctacctccctgacaagcgcctatagcactcgaataattcttctcaccctaacaggtcaacctcgcttccccacccttactaacattaacgaaaataaccccaccctactaaaccccattaaacgcctggcagccggaagcctattcgcaggatttctcattactaacaacatttcccccgcatcccccttccaaacaacaatccccctctacctaaaactcacagccctcgctgtcactttcctaggacttctaacagccctagacctcaactacctaaccaacaaacttaaaataaaatccccactatgcacattttatttctccaacatactcggattctaccctagcatcacacaccgcacaatcccctatctaggccttcttacgagccaaaacctgcccctactcctcctagacctaacctgactagaaaagctattacctaaaacaatttcacagcaccaaatctccacctccatcatcacctcaacccaaaaaggcataattaaactttacttcctctctttcttcttcccactcatcctaaccctactcctaatcacataacctattcccccgagcaatctcaattacaatatatacaccaacaaacaatgttcaaccagtaactactactaatcaacgcccataatcatacaaagcccccgcaccaataggatcctcccgaatcaaccctgacccctctccttcataaattattcagcttcctacactattaaagtttaccacaaccaccaccccatcatactctttcacccacagcaccaatcctacctccatcgctaaccccactaaaacactcaccaagacctcaacccctgacccccatgcctcaggatactcctcaatagccatcgctgtagtatatccaaagacaaccatcattccccctaaataaattaaaaaaactattaaacccatataacctcccccaaaattcagaataataacacacccgaccacaccgctaacaatcaatactaaacccccataaataggagaaggcttagaagaaaaccccacaaaccccattactaaacccacactcaacagaaacaaagcatacatcattattctcgcacggactacaaccacgaccaatgatatgaaaaaccatcgttgtatttcaactacaagaacaccaatgaccccaatacgcaaaactaaccccctaataaaattaattaaccactcattcatcgacctccccaccccatccaacatctccgcatgatgaaacttcggctcactccttggcgcctgcctgatcctccaaatcaccacaggactattcctagccatgcactactcaccagacgcctcaaccgccttttcatcaatcgcccacatcactcgagacgtaaattatggctgaatcatccgctaccttcacgccaatggcgcctcaatattctttatctgcctcttcctacacatcgggcgaggcctatattacggatcatttctctactcagaaacctgaaacatcggcattatcctcctgcttgcaactatagcaacagccttcataggctatgtcctcccgtgaggccaaatatcattctgaggggccacagtaattacaaacttactatccgccatcccatacattgggacagacctagttcaatgaatctgaggaggctactcagtagacagtcccaccctcacacgattctttacctttcacttcatcttgcccttcattattgcaaccctagcagcactccacctcctattcttgcacgaaacgggatcaaacaaccccctaggaatcacctcccattccgataaaatcaccttccacccttactacacaatcaaagacgccctcggcttacttctcttccttctctccttaatgacattaacactattctcaccagacctcctaggcgacccagacaattataccctagccaaccccttaaacacccctccccacatcaagcccgaatgatatttcctattcgcctacacaattctccgatccgtccctaacaaactaggaggcgtccttgccctattactatccatcctcatcctagcaataatccccatcctccatatatccaaacaacaaagcataatatttcgcccactaagccaatcactttattgactcctagccgcagacctcctcattctaacctgaatcggaggacaaccagtaagctacccttttaccatcattggacaagtagcatccgtactatacttcacaacaatcctaatcctaataccaactatctccctaattgaaaacaaaatactcaaatgggcctgtccttgtagtataaactaatacaccagtcttgtaaaccggagatgaaaacctttttccaaggacaaatcagagaaaaagtctttaactccaccattagcacccaaagctaagattctaatttaaactattctctgttctttcatggggaagcagatttgggtaccacccaagtattgactcacccatcaacaaccgctatgtatctcgtacattactgccagccaccatgaatattgtacggtaccataaatacttgaccacctgtagtacataaaaacccaatccacatcaaaaccccctccccatgcttacaagcaagtacagcaatcaaccctcaactatcacacatcaactgcaactccaaagccacccctcacccactaggataccaacaaacctacccacccttaacagtacatagtacataaagccatttaccgtacatagcacattacagtcaaatcccttctcgtccccatggatgacccccctcagataggggtcccttgaccaccatcctccgtgaaatcaatatcccgcacaagagtgctactctcctcgctccgggcccataacacttgggggtagctaaagtgaactgtatccgacatctggttcctacttcagggtcataaagcctaaatagcccacacgttccccttaaataagacatcacgatg

SEQ ID NO: 468 - DNA, 16570 bp, Homo sapiens mitochondrial
  3108: "n" refers to a nucleotide at position 3107 of the Cambridge Reference Sequence (CRS, Anderson et al. 1981 Nature 290:457-465), later determined to be absent from the human mtDNA sequence according to the revised CRS (rCRS, Andrews et al. 1999 Nature Genetics 23:147); "n" therefore represents a single nucleotide deletion at a position corresponding to nucleotide 3107 of SEQ ID NO:1 as provided herein.
gatcacaggtctatcaccctattaaccactcacgggagctctccatgcatttggtattttcgtctggggggtgtgcacgcgatagcattgcgagacgctggagccggagcaccctatgtcgcagtatctgtctttgattcctgcctcatcctattatttatcgcacctacgttcaatattacaggcgaacatacttactaaagtgtgttaattaattaatgcttgtaggacataataataacaattgatgtctgcacagccgctttccacacagacatcataacaaaaaatttccaccaaaccccccctcccccgccttctggccacagcacttaaacacatctctgccaaaccccaaaaacaaagaaccctaacaccagcctaaccagatttcaaattttatcttttggcggtatgcacttttaacagtcaccccccaactaacacattattttcccctcccactcccatactactaatctcatcaacacaacccccgcccatcctacccagcacacacacaccgctgctaaccccataccccgaaccaaccaaaccccaaagacaccccccacagtttatgtagcttacctcctccaaagcaatacactgaaaatgtttagacgggctcacatcaccccataaacaaataggtttggtcctagcctttctattagctcttagtaagattacacatgcaagcatccccgttccagtgagttcaccctctaaatcaccacgatcaaaagggacaagcatcaagcacgcagcaatgcagctcaaaacgcttagcctagccacacccccacgggaaacagcagtgattaacctttagcaataaacgaaagtttaactaagctatactaaccccagggttggtcaatttcgtgccagccaccgcggtcacacgattaacccaagtcaatagaagccggcgtaaagagtgttttagatcaccccctccccaataaagctaaaactcacctgagttgtaaaaaactccagttgacacaaaatagactacgaaagtggctttaacatatctgaacacacaatagctaagacccaaactgggattagataccccactatgcttagccctaaacctcaacagttaaatcaacaaaactgctcgccagaacactacgagccacagcttaaaactcaaaggacctggcggtgcttcatatccctctagaggagcctgttctgtaatcgataaaccccgatcaacctcaccacctcttgctcagcctatataccgccatcttcagcaaaccctgatgaaggctacaaagtaagcgcaagtacccacgtaaagacgttaggtcaaggtgtagcccatgaggtggcaagaaatgggctacattttctaccccagaaaactacgatagcccttatgaaacttaagggtcgaaggtggatttagcagtaaactgagagtagagtgcttagttgaacagggccctgaagcgcgtacacaccgcccgtcaccctcctcaagtatacttcaaaggacatttaactaaaacccctacgcatttatatagaggagacaagtcgtaacatggtaagtgtactggaaagtgcacttggacgaaccagagtgtagcttaacacaaagcacccaacttacacttaggagatttcaacttaacttgaccgctctgtgctaaacctagccccaaacccactccaccttactaccagacaaccttagccaaaccatttacccaaataaagtataggcgatagaaattgaaacctggcgcaatagatatagtaccgcaagggaaagatgaaaaattataaccaagcataatatagcaaggactaacccctataccttctgcataatgaattaactagaaataactttgcaaggagagccaaagctaagacccccgaaaccagacgagctacctaagaacagctaaaagagcacacccgtctatgtagcaaaatagtgggaagatttataggtagaggcgacaaacctaccgagcctggtgatagctggttgtccaagatagaatcttagttcaactttaaatttgcccacagaaccctctaaatccccttgtaaatttaactgttagtccaaagaggaacagctctttggacactaggaaaaaaccttgtagagagagtaaaaaatttaacacccatagtaggcctaaaagcagccaccaattaagaaagcgttcaagctcaacacccactacctaaaaaatcccaaacatataactgaactcctcacacccaattggaccaatctatcaccctatagaagaactaatgttagtataagtaacatgaaaacattctcctccgcataagcctgcgtcagattaaaacactgaactgacaattaacagcccaatatctacaatcaaccaacaagtcattattaccctcactgtcaacccaacacaggcatgctcataaggaaaggttaaaaaaagtaaaaggaactcggcaaatcttaccccgcctgtttaccaaaaacatcacctctagcatcaccagtattagaggcaccgcctgcccagtgacacatgtttaacggccgcggtaccctaaccgtgcaaaggtagcataatcacttgttccttaaatagggacctgtatgaatggctccacgagggttcagctgtctcttacttttaaccagtgaaattgacctgcccgtgaagaggcgggcatgacacagcaagacgagaagaccctatggagctttaatttattaatgcaaacagtacctaacaaacccacaggtcctaaactaccaaacctgcattaaaaatttcggttggggcgacctcggagcagaacccaacctccgagcagtacatgctaagacttcaccagtcaaagcgaactactatactcaattgatccaataacttgaccaacggaacaagttaccctagggataacagcgcaatcctattctagagtccatatcaacaatagggtttacgacctcgatgttggatcaggacatcccgatggtgcagccgctattaaaggttcgtttgttcaacgattaaagtcctacgtgatctgagttcagaccggagtaatccaggtcggtttctatctacnttcaaattcctccctgtacgaaaggacaagagaaataaggcctacttcacaaagcgccttcccccgtaaatgatatcatctcaacttagtattatacccacacccacccaagaacagggtttgttaagatggcagagcccggtaatcgcataaaacttaaaactttacagtcagaggttcaattcctcttcttaacaacatacccatggccaacctcctactcctcattgtacccattctaatcgcaatggcattcctaatgcttaccgaacgaaaaattctaggctatatacaactacgcaaaggccccaacgttgtaggcccctacgggctactacaacccttcgctgacgccataaaactcttcaccaaagagcccctaaaacccgccacatctaccatcaccctctacatcaccgccccgaccttagctctcaccatcgcacttctactatgaacccccctccccatacccaaccccctggtcaacctcaacctaggcctcctatttattctagccacctctagcctagccgtttactcaatcctctgatcagggtgagcatcaaactcaaactacgccctgatcggcgcactgcgagcagtagcccaaacaatctcatatgaagtcaccctagccatcattctactatcaacattactaataagtggctcctttaacctctccacccttatcacaacacaagaacacctctgattactcctgccatcatgacccttggccataatatgatttatctccacactagcagagaccaaccgaacccccttcgaccttgccgaaggggagtccgaactagtctcaggcttcaacatcgaatacgccgcaggccccttcgccctattcttcatagccgaatacacaaacattattataataaacaccctcaccactacaatcttcctaggaacaacatatgacgcactctcccctgaactctacacaacatattttgtcaccaagaccctacttctaacctccctgttcttatgaattcgaacagcatacccccgattccgctacgaccaactcatacacctcctatgaaaaaacttcctaccactcaccctagcattacttatatgatatgtctccatacccattacaatctccagcattccccctcaaacctaagaaatatgtctgataaaagagttactttgatagagtaaataataggagcttaaacccccttatttctaggactatgagaatcgaacccatccctgagaatccaaaattctccgtgccacctatcacaccccatcctaaagtaaggtcagctaaataagctatcgggcccataccccgaaaatgttggttatacccttcccgtactaattaatcccctggcccaacccgtcatctactctaccatctttgcaggcacactcatcacagcgctaagctcgcactgattttttacctgagtaggcctagaaataaacatgctagcttttattccagttctaaccaaaaaaataaaccctcgttccacagaagctgccatcaagtatttcctcacgcaagcaaccgcatccataatccttctaatagctatcctcttcaacaatatactctccgggcaatgaaccataaccaatactaccaatcaatactcatcattaataatcataatggctatagcaataaaactaggaatagccccctttcacttctgagtcccagaggttacccaaggcacccctctgacatccggcctgcttcttctcacatgacaaaaactagcccccatctcaatcatataccaaatctctccctcactaaacgtaagccttctcctcactctctcaatcttatccatcatagcaggcagttgaggtggattaaaccaaacccagctacgcaaaatcttagcatactcctcaattacccacataggatgaataatagcagttctaccgtacaaccctaacataaccattcttaatttaactatttatattatcctaactactaccgcattcctactactcaacttaaactccagcaccacgaccctactactatctcgcacctgaaacaagctaacatgactaacacccttaattccatccaccctcctctccctaggaggcctgcccccgctaaccggctttttgcccaaatgggccattatcgaagaattcacaaaaaacaatagcctcatcatccccaccatcatagccaccatcaccctccttaacctctacttctacctacgcctaatctactccacctcaatcacactactccccatatctaacaacgtaaaaataaaatgacagtttgaacatacaaaacccaccccattcctccccacactcatcgcccttaccacgctactcctacctatctccccttttatactaataatcttatagaaatttaggttaaatacagaccaagagccttcaaagccctcagtaagttgcaatacttaatttctgtaacagctaaggactgcaaaaccccactctgcatcaactgaacgcaaatcagccactttaattaagctaagcccttactagaccaatgggacttaaacccacaaacacttagttaacagctaagcaccctaatcaactggcttcaatctacttctcccgccgccgggaaaaaaggcgggagaagccccggcaggtttgaagctgcttcttcgaatttgcaattcaatatgaaaatcacctcggagctggtaaaaagaggcctaacccctgtctttagatttacagtccaatgcttcactcagccattttacctcacccccactgatgttcgccgaccgttgactattctctacaaaccacaaagacattggaacactatacctattattcggcgcatgagctggagtcctaggcacagctctaagcctccttattcgagccgagctgggccagccaggcaaccttctaggtaacgaccacatctacaacgttatcgtcacagcccatgcatttgtaataatcttcttcatagtaatacccatcataatcggaggctttggcaactgactagttcccctaataatcggtgcccccgatatggcgtttccccgcataaacaacataagcttctgactcttacctccctctctcctactcctgctcgcatctgctatagtggaggccggagcaggaacaggttgaacagtctaccctcccttagcagggaactactcccaccctggagcctccgtagacctaaccatcttctccttacacctagcaggtgtctcctctatcttaggggccatcaatttcatcacaacaattatcaatataaaaccccctgccataacccaataccaaacgcccctcttcgtctgatccgtcctaatcacagcagtcctacttctcctatctctcccagtcctagctgctggcatcactatactactaacagaccgcaacctcaacaccaccttcttcgaccccgccggaggaggagaccccattctataccaacacctattctgatttttcggtcaccctgaagtttatattcttatcctaccaggcttcggaataatctcccatattgtaacttactactccggaaaaaaagaaccatttggatacataggtatggtctgagctatgatatcaattggcttcctagggtttatcgtgtgagcacaccatatatttacagtaggaatagacgtagacacacgagcatatttcacctccgctaccataatcatcgctatccccaccggcgtcaaagtatttagctgactcgccacactccacggaagcaatatgaaatgatctgctgcagtgctctgagccctaggattcatctttcttttcaccgtaggtggcctgactggcattgtattagcaaactcatcactagacatcgtactacacgacacgtactacgttgtagctcacttccactatgtcctatcaataggagctgtatttgccatcataggaggcttcattcactgatttcccctattctcaggctacaccctagaccaaacctacgccaaaatccatttcactatcatattcatcggcgtaaatctaactttcttcccacaacactttctaggcctatccggaatgccccgacgttactcggactaccccgatgcatacaccacatgaaacatcctatcatctgtaggctcattcatttctctaacagcagtaatattaataattttcatgatttgagaagccttcgcttcgaagcgaaaagtcctaatagtagaagaaccctccataaacctggagtgactatatggatgccccccaccctaccacacattcgaagaacccgtatacataaaatctagacaaaaaaggaaggaatcgaaccccccaaagctggtttcaagccaaccccatggcctccatgactttttcaaaaaggtattagaaaaaccatttcataactttgtcaaagttaaattataggctaaatcctatatatcttaatggcacatgcagcgcaagtaggtctacaagacgctacttcccctatcatagaagagcttatcacctttcatgatcacgccctcataatcattttccttatctgcttcttagtcctgtatgcccttttcctaacactcacaacaaaactaactaatactaacatctcagacgctcaggaaatagaaaccgtctgaactatcctgcccgccatcatcctagtcctcatcgccctcccatccctacgcatcctttacataacagacgaggtcaacgatccctcccttaccatcaaatcaattggccaccaatggtactgaacctacgagtacaccgactacggcggactaatcttcaactcctacatacttcccccattattcctagaaccaggcgacctgcgactccttgacgttgacaatcgagtagtactcccgattgaagcccccattcgtataataattacatcacaagacgtcttgcactcatgagctgtccccacattaggcttaaaaacagatgcaattcccggacgtctaaaccaaaccactttcaccgctacacgaccgggggtatactacggtcaatgctctgaaatctgtggagcaaaccacagtttcatgcccatcgtcctagaattaattcccctaaaaatctttgaaatagggcccgtatttaccctatagcaccccctctaccccctctagagcccactgtaaagctaacttagcattaaccttttaagttaaagattaagagaaccaacacctctttacagtgaaatgccccaactaaatactaccgtatggcccaccataattacccccatactccttacactattcctcatcacccaactaaaaatattaaacacaaactaccacctacctccctcaccaaagcccataaaaataaaaaattataacaaaccctgagaaccaaaatgaacgaaaatctgttcgcttcattcattgcccccacaatcctaggcctacccgccacagtactgatcattctatttccccctctattgatccccacctccaaatatctcatcaacaaccgactaatcaccacccaacaatgactaatcaaactaacctcaaaacaaatgatagccatacacaacactaaaggacgaacctgatctcttatactagtatccttaatcatttttattgccacaactaacctcctcggactcctgcctcactcatttacaccaaccacccaactatctataaacctagccatggccatccccttatgagcgggcgcagtgattataggctttcgctctaagattaaaaatgccctagcccacttcttaccacaaggcacacctacaccccttatccccatactagttattatcgaaaccatcagcctactcattcaaccaatagccctggccgtacgcctaaccgctaacattactgcaggccacctactcatgcacctaattggaagcgccaccctagcaatatcaaccattaaccttccctctacacttatcatcttcacaattctaattctactgactatcctagaaatcgctgtcgccttaatccaagcctacgttttcacacttctagtaagcctctacctgcacgacaacacataatgacccaccaatcacatgcctatcatatagtaaaacccagcccatgacccctaacaggggccctctcagccctcctaatgacctccggcctagccatgtgatttcacttccactccataacgctcctcatactaggcctactaaccaacacactaaccatataccaatgatggcgcgatgtaacacgagaaagcacataccaaggccaccacacaccacctgtccaaaaaggccttcgatacgggataatcctatttattacctcagaagtttttttcttcgcaggatttttctgagccttttaccactccagcctagcccctaccccccaactaggggggcactggcccccaacaggcatcaccccgctaaatcccctagaagtcccactcctaaacacatccgtattactcgcatcaggagtatcaatcacctgagctcaccatagtctaatagaaaacaaccgaaaccaaataattcaagcactgcttattacaattttactgggtctctattttaccctcctacaagcctcagagtacttcgagtctcccttcaccatttccgacggcatctacggctcaacattttttgtagccacaggcttccacggacttcacgtcattattggctcaactttcctcactatctgcttcatccgccaactaatatttcactttacatccaaacatcactttggcttcgaagccgccgcctgatactggcattttgtagatgtggtttgactatttctgtatgtctccatctattgatgagggtcttactcttttagtataaatagtaccgttaacttccaattaactagttttgacaacattcaaaaaagagtaataaacttcgccttaattttaataatcaacaccctcctagccttactactaataattattacattttgactaccacaactcaacggctacatagaaaaatccaccccttacgagtgcggcttcgaccctatatcccccgcccgcgtccctttctccataaaattcttcttagtagctattaccttcttattatttgatctagaaattgccctccttttacccctaccatgagccctacaaacaactaacctgccactaatagttatgtcatccctcttattaatcatcatcctagccctaagtctggcctatgagtgactacaaaaaggattagactgagctgaattggtatatagtttaaacaaaacgaatgatttcgactcattaaattatgacaatcatatttaccaaatgcccctcatttacataaatattatactagcatttaccatctcacttctaggaatactagtatatcgctcacacctcatatcctccctactatgcctagaaggaataatactatcgctgttcattatagctactctcataaccctcaacacccactccctcttagccaatattgtgcctattgccatactagtctttgccgcctgcgaagcagcggtgggcctagccctactagtctcaatctccaacacatatggcctagactacgtacataacctaaacctactccaatgctaaaactaatcgtcccaacaattatattactaccactgacatgactttccaaaaaacacataatttgaatcaacacaaccacccacagcctaattattagcatcatccccctactattttttaaccaaatcaacaacaacctatttagctgttccccaaccttttcctccgaccccctaacaacccccctcctaatactaactacctgactcctacccctcacaatcatggcaagccaacgccacttatccagtgaaccactatcacgaaaaaaactctacctctctatactaatctccctacaaatctccttaattataacattcacagccacagaactaatcatattttatatcttcttcgaaaccacacttatccccaccttggctatcatcacccgatgaggcaaccagccagaacgcctgaacgcaggcacatacttcctattctacaccctagtaggctcccttcccctactcatcgcactaatttacactcacaacaccctaggctcactaaacattctactactcactctcactgcccaagaactatcaaactcctgagccaacaacttaatatgactagcttacacaatagcttttatagtaaagatacctctttacggactccacttatgactccctaaagcccatgtcgaagcccccatcgctgggtcaatagtacttgccgcagtactcttaaaactaggcggctatggtataatacgcctcacactcattctcaaccccctgacaaaacacatagcctaccccttccttgtactatccctatgaggcataattataacaagctccatctgcctacgacaaacagacctaaaatcgctcattgcatactcttcaatcagccacatagccctcgtagtaacagccattctcatccaaaccccctgaagcttcaccggcgcagtcattctcataatcgcccacggacttacatcctcattactattctgcctagcaaactcaaactacgaacgcactcacagtcgcatcataatcctctctcaaggacttcaaactctactcccactaatagctttttgatgacttctagcaagcctcgctaacctcgccttaccccccactattaacctactgggagaactctctgtgctagtaaccacattctcctgatcaaatatcactctcctacttacaggactcaacatactagtcacagccctatactccctctacatatttaccacaacacaatggggctcactcacccaccacattaacaacataaaaccctcattcacacgagaaaacaccctcatgttcatacacctatcccccattctcctcctatccctcaaccccgacatcattaccgggttttcctcttgtaaatatagtttaaccaaaacatcagattgtgaatctgacaacagaggcttacgaccccttatttaccgagaaagctcacaagaactgctaactcatgcccccatgtctaacaacatggctttctcaacttttaaaggataacagctatccattggtcttaggccccaaaaattttggtgcaactccaaataaaagtaataaccatgcacactactataaccaccctaaccctgacttccctaattccccccatccttaccaccctcgttaaccctaacaaaaaaaactcatacccccattatgtaaaatccattgtcgcatccacctttattatcagtctcttccccacaacaatattcatgtgcctagaccaagaagttattatctcgaactgacactgagccacaacccaaacaacccagctctccctaagcttcaaactagactacttctccataatattcatccctgtagcattgttcgttacatggtccatcatagaattctcactgtgatatataaactcagacccaaacattaatcagttcttcaaatatctactcattttcctaattaccatactaatcttagttaccgctaacaacctattccaactgttcatcggctgagagggcgtaggaattatatccttcttgctcatcagttgatgatacgcccgagcagatgccaacacagcagccattcaagcaatcctatacaaccgtatcggcgatatcggtttcatcctcgccttagcatgatttatcctacactccaactcatgagacccacaacaaatagcccttctaaacgctaatccaagcctcaccccactactaggcctcctcctagcagcagcaggcaaatcagcccaattaggtctccacccctgactcccctcagccatagaaggccccaccccagtctcagccctactccactcaagcactatagttgtagcaggaatcttcttactcatccgcttccaccccctagcagaaaatagcccactaatccaaactctaacactatgcttaggcgctatcaccactctgttcgcagcagtctgcgcccttacacaaaatgacatcaaaaaaatcgtagccttctccacttcaagtcagctaggactcataatagttacaatcggcatcaaccaaccacacctagcattcctgcacatctgtacccacgccttcttcaaagccatactatttatgtgctccgggtccatcatccacaaccttaacaatgaacaagatattcgaaaaataggaggactactcaaaaccatacctctcacttcaacctccctcaccattggcagcctagcattagcaggaatacctttcctcacaggtttctactccaaagaccacatcatcgaaaccgcaaacatatcatacacaaacgcctgagccctatctattactctcatcgctacctccctgacaagcgcctatagcactcgaataattcttctcaccctaacaggtcaacctcgcttccccacccttactaacattaacgaaaataaccccaccctactaaaccccattaaacgcctggcagccggaagcctattcgcaggatttctcattactaacaacatttcccccgcatcccccttccaaacaacaatccccctctacctaaaactcacagccctcgctgtcactttcctaggacttctaacagccctagacctcaactacctaaccaacaaacttaaaataaaatccccactatgcacattttatttctccaacatactcggattctaccctagcatcacacaccgcacaatcccctatctaggccttcttacgagccaaaacctgcccctactcctcctagacctaacctgactagaaaagctattacctaaaacaatttcacagcaccaaatctccacctccatcatcacctcaacccaaaaaggcataattaaactttacttcctctctttcttcttcccactcatcctaaccctactcctaatcacataacctattcccccgagcaatctcaattacaatatatacaccaacaaacaatgttcaaccagtaactactactaatcaacgcccataatcatacaaagcccccgcaccaataggatcctcccgaatcaaccctgacccctctccttcataaattattcagcttcctacactactaaagtttaccacaaccaccaccccatcatactctttcacccacagcaccaatcctacctccatcgctaaccccactaaaacactcaccaagacctcaacccctgacccccatgcctcaggatactcctcaatagccatcgctgtagtatatccaaagacaaccatcattccccctaaataaattaaaaaaactattaaacccatataacctcccccaaaattcagaataataacacacccgaccacaccgctaacaatcaatactaaacccccataaataggagaaggcttagaagaaaaccccacaaaccccattactaaacccacactcaacagaaacaaagcatacatcattattctcgcacggactacaaccacgaccaatgatatgaaaaaccatcgttgtatttcaactacaagaacaccaatgaccccaatacgcaaaattaaccccctaataaaactaattaaccactcattcatcgacctccccaccccatccaacatctccgcatgatgaaacttcggctcactccttggcgcctgcctgatcctccaaatcaccacaggactattcctagccatgcactactcaccagacgcctcaaccgccttttcatcaatcgcccacatcactcgagacgtaaattatggctgaatcatccgctaccttcacgccaatggcgcctcaatattctttatctgcctcttcctacacatcggacgaggcctatattacggatcatttctctactcagaaacctgaaacatcggcattatcctcctgcttgcaactatagcaacagccttcataggctatgtcctcccgtgaggccaaatatcattctgaggggccacagtaattacaaacttactatccgccatcccatacattgggacagacctagttcaatgaatctgaggaggctactcagtagacagtcccaccctcacacgattctttacctttcacttcatcttacccttcattattgcagccctagcagcactccacctcctattcttgcacgaaacgggatcaaacaaccccctaggaatcacctcccattccgataaaatcaccttccacccttactacacaatcaaagacgccctcggcttacttctcttccttctctccttaatgacattaacactattctcacctgacctcctaggcgacccagacaattataccctagccaaccccttaaacacccctccccacatcaagcccgaatgatatttcctattcgcctacacaattctccgatccgtccctaacaaactaggaggcgtccttgccctattactatccatcctcatcctagcaataatccccatcctccatatatccaaacaacaaagcataatatttcgcccactaagccaatcactttattgactcctagccgcagacctcctcattctaacctgaatcggaggacaaccagtaagctacccttttaccatcattggacaagtagcatccgtactatacttcacaacaatcctaatcctaataccaactatctccctaattgaaaacaaaatactcaaatgggcctgtccttgtagtataaactaatacaccagtcttgtaaaccggagatgaaaacctttttccaaggacaaatcagagaaaaagtctttaactccaccattagcacccaaagctaagattctaatttaaactattctctgttctttcatggggaagcagatttgggtaccacccaagtattgactcacccatcaacaaccgctatgtatctcgtacattactgccagccaccatgaatattgtacggtaccataaatacttgaccacctgtagtacataaaaacccaatccacatcaaaaccccctccccatgcttacaagcaagtacagcaatcaaccctcaactatcatacatcaactgcaactccaaagccacccctcacccactaggataccaacaaacccacccaccctcaacagtacatagtacataaagccatttatcgtacatagcacattacagtcaaatcccttctcgtccccatggatgacccccctcagataggggtcccttgaccaccatcctccgtgaaatcaatatcccgcacaagagtgctactctcctcgctccgggcccataacacttgggggtagctaaagtgaactgtatccgacatctggttcctacttcaggtccataaagtctaaatagcccacacgttccccttaaataagacatcacgatg

SEQ ID NO: 469 - DNA, 16569 bp, Homo sapiens mitochondrial
  3107: "n" refers to a nucleotide at position 3107 of the Cambridge Reference Sequence (CRS, Anderson et al. 1981 Nature 290:457-465), later determined to be absent from the human mtDNA sequence according to the revised CRS (rCRS, Andrews et al. 1999 Nature Genetics 23:147); "n" therefore represents a single nucleotide deletion at a position corresponding to nucleotide 3107 of SEQ ID NO:1 as provided herein.
gatcacaggtctatcaccctattaaccactcacgggagctctccatgcatttggtattttcgtctggggggtatgcacgcgatagcattgcgagacgctggagccggagcaccctatgtcgcagtatctgtctttgattcctgcctcatcctattatttatcgcacctacgttcaatattacaggcgaacatacttactaaagtgtgttaattaattaatgcttgtaggacataataataacaattgaatgtctgcacagccactttccacacagacatcataacaaaaaatttccaccaaaccccccctcccccgcttctggccacagcacttaaacacatctctgccaaaccccaaaaacaaagaaccctaacaccagcctaaccagatttcaaattttatcttttggcggtatgcacttttaacagtcaccccccaactaacacattattttcccctcccactcccatactactaatctcatcaatacaacccccgcccatcctacccagcacacacacaccgctgctaaccccataccccgaaccaaccaaaccccaaagacaccccccacagtttatgtagcttacctcctcaaagcaatacactgaaaatgtttagacgggctcacatcaccccataaacaaataggtttggtcctagcctttctattagctcttagtaagattacacatgcaagcatccccgttccagtgagttcaccctctaaatcaccacgatcaaaagggacaagcatcaagcacgcagcaatgcagctcaaaacgcttagcctagccacacccccacgggaaacagcagtgattaacctttagcaataaacgaaagtttaactaagctatactaaccccagggttggtcaatttcgtgccagccaccgcggtcacacgattaacccaagtcaatagaagccggcgtaaagagtgttttagatcaccccctccccaataaagctaaaactcacctgagttgtaaaaaactccagttgacacaaaatagactacgaaagtggctttaacatatctgaacacacaatagctaagacccaaactgggattagataccccactatgcttagccctaaacctcaacagttaaatcaacaaaactgctcgccagaacactacgagccacagcttaaaactcaaaggacctggcggtgcttcatatccctctagaggagcctgttctgtaatcgataaaccccgatcaacctcaccacctcttgctcagcctatataccgccatcttcagcaaaccctgatgaaggctacaaagtaagcgcaagtacccacgtaaagacgttaggtcaaggtgtagcccatgaggtggcaagaaatgggctacattttctaccccagaaaactacgatagcccttatgaaacttaagggtcgaaggtggatttagcagtaaactgagagtagagtgcttagttgaacagggccctgaagcgcgtacacaccgcccgtcaccctcctcaagtatacttcaaaggacatttaactaaaacccctacgcatttatatagaggagacaagtcgtaacatggtaagtgtactggaaagtgcacttggacgaaccagagtgtagcttaacacaaagcacccaacttacacttaggagatttcaacttaacttgaccgctctgagctaaacctagccccaaacccactccaccttactaccagacaaccttagccaaaccatttacccaaataaagtataggcgatagaaattgaaacctggcgcaatagatatagtaccgcaagggaaagatgaaaaattataaccaagcataatatagcaaggactaacccctataccttctgcataatgaattaactagaaataactttgcaaggagagccaaagctaagacccccgaaaccagacgagctacctaagaacagctaaaagagcacacccgtctatgtagcaaaatagtgggaagatttataggtagaggcgacaaacctaccgagcctggtgatagctggttgtccaagatagaatcttagttcaactttaaatttgcccacagaaccctctaaatccccttgtaaatttaactgttagtccaaagaggaacagctctttggacactaggaaaaaaccttgtagagagagtaaaaaatttaacacccatagtaggcctaaaagcagccaccaattaagaaagcgttcaagctcaacacccactacctaaaaaatcccaaacatataactgaactcctcacacccaattggaccaatctatcaccctatagaagaactaatgttagtataagtaacatgaaaacattctcctccgcataagcctgcgtcagattaaaacactgaactgacaattaacagcccaatatttacaatcaaccaacaagtcattattaccctcactgtcaacccaacacaggcatgctcataaggaaaggttaaaaaaagtaaaaggaactcggcaaatcttaccccgcctgtttaccaaaaacatcacctctagcatcaccagtattagaggcaccgcctgcccagtgacacatgtttaacggccgcggtaccctaaccgtgcaaaggtagcataatcacttgttccttaaatagggacctgtatgaatggctccacgagggttcagctgtctcttacttttaaccagtgaaattgacctgcccgtgaagaggcgggcataacacagcaagacgagaagaccctatggagctttaatttattaatgcaaacagtacctaacaaacccacaggtcctaaactaccaaacctgcattaaaaatttcggttggggcgacctcggagcagaacccaacctccgagcagtacatgctaagacttcaccagtcaaagcgaactactatactcaattgatccaataacttgaccaacggaacaagttaccctagggataacagcgcaatcctattctagagtccatatcaacaatagggtttacgacctcgatgttggatcaggacatcccgatggtgcagccgctattaaaggttcgtttgttcaacgattaaagtcctacgtgatctgagttcagaccggagtaatccaggtcggtttctatctacnttcaaattcctccctgtacgaaaggacaagagaaataaggcctacttcacaaagcgccttcccccgtaaatgatatcatctcaacttagtattatacccacacccacccaagaacagggtttgttaagatggcagagcccggtaatcgcataaaacttaaaactttacagtcagaggttcaattcctcttcttaacaacatacccatggccaacctcctactcctcattgtacccattctaatcgcaatggcattcctaatgcttaccgaacgaaaaattctaggctatatacaactacgcaaaggccccaacgttgtaggcccctacgggctactacaacccttcgctgacgccataaaactcttcaccaaagagcccctaaaacccgccacatctaccatcaccctctacatcaccgccccgaccttagctctcaccatcgctcttctactatgaacccccctccccatacccaaccccctggtcaacctcaacctaggcctcctatttattctagccacctctagcctagccgtttactcaatcctctgatcagggtgagcatcaaactcaaactacgccctgatcggcgcactgcgagcagtagcccaaacaatctcatatgaagtcaccctagccatcattctactatcaacattactaataagtggctcctttaacctctccacccttatcacaacacaagaacacctctgattactcctgccatcatgacccttggccataatatgatttatctccacactagcagagaccaaccgaacccccttcgaccttgccgaaggggagtccgaactagtctcaggcttcaacatcgaatacgccgcaggccccttcgccctattcttcatagccgaatacacaaacattattataataaacaccctcaccactacaatcttcctaggaacaacatatgacgcactctcccctgaactctacacaacatattttgtcaccaagaccctacttctaacctccctgttcttatgaattcgaacagcatacccccgattccgctacgaccaactcatacacctcctatgaaaaaacttcctaccactcaccctagcattacttatatgatatgtctccatacccattacaatctccagcattccccctcaaacctaagaaatatgtctgataaaagagttactttgatagagtaaataataggagcttaaacccccttatttctaggactatgagaatcgaacccatccctgagaatccaaaattctccgtgccacctatcacaccccatcctaaagtaaggtcagctaaataagctatcgggcccataccccgaaaatgttggttatacccttcccgtactaattaatcccctggcccaacccgtcatctactctaccatctttgcaggcacactcatcacagcgctaagctcgcactgattttttacctgagtaggcctagaaataaacatgctagcttttattccagttctaaccaaaaaaataaaccctcgttccacagaagctgccatcaagtatttcctcacgcaagcaaccgcatccataatccttctaatagctatcctcttcaacaatatactctccggacaatgaaccataaccaatactaccaatcaatactcatcattaataatcataatggctatagcaataaaactaggaatagccccctttcacttctgagtcccagaggttacccaaggcacccctctgacatccggcctgcttcttctcacatgacaaaaactagcccccatctcaatcatataccaaatctctccctcactaaacgtaagccttctcctcactctctcaatcttatccatcatagcaggcagttgaggtggattaaaccaaacccagctacgcaaaatcttagcatactcctcaattacccacataggatgaataatagcagttctaccgtacaaccctaacataaccattcttaatttaactatttatattatcctaactactaccgcattcctactactcaacttaaactccagcaccacgaccctactactatctcgcacctgaaacaagctaacatgactaacacccttaattccatccaccctcctctccctaggaggcctgcccccgctaaccggctttttgcccaaatgggccattatcgaagaattcacaaaaaacaatagcctcatcatccccaccatcatagccaccatcaccctccttaacctctacttctacctacgcctaatctactccacctcaatcacactactccccatatctaacaacgtaaaaataaaatgacagtttgaacatacaaaacccaccccattcctccccacactcatcgcccttaccacgctactcctacctatctccccttttatactaataatcttatagaaatttaggttaaatacagaccaagagccttcaaagccctcagtaagttgcaatacttaatttctgtaacagctaaggactgcaaaaccccactctgcatcaactgaacgcaaatcagccactttaattaagctaagcccttactagaccaatgggacttaaacccacaaacacttagttaacagctaagcaccctaatcaactggcttcaatctacttctcccgccgccgggaaaaaaggcgggagaagccccggcaggtttgaagctgcttcttcgaatttgcaattcaatatgaaaatcacctcggagctggtaaaaagaggcctaacccctgtctttagatttacagtccaatgcttcactcagccattttacctcacccccactgatgttcgccgaccgttgactattctctacaaaccacaaagacattggaacactatacctattattcggcgcatgagctggagtcctaggcacagctctaagcctccttattcgagccgagctgggccagccaggcaaccttctaggtaacgaccacatctacaacgttatcgtcacagcccatgcatttgtaataatcttcttcatagtaatacccatcataatcggaggctttggcaactgactagttcccctaataatcggtgcccccgatatggcgtttccccgcataaacaacataagcttctgactcttacctccctctctcctactcctgctcgcatctgctatagtggaggccggagcaggaacaggttgaacagtctaccctcccttagcagggaactactcccaccctggagcctccgtagacctaaccatcttctccttacacctagcaggtgtctcctctatcttaggggccatcaatttcatcacaacaattatcaatataaaaccccctgccataacccaataccaaacgcccctcttcgtctgatccgtcctaatcacagcagtcctacttctcctatctctcccagtcctagctgctggcatcactatactactaacagaccgcaacctcaacaccaccttcttcgaccccgccggaggaggagaccccattctataccaacacctattctgatttttcggtcaccctgaagtttatattcttatcctaccaggcttcggaataatctcccatattgtaacttactactccggaaaaaaagaaccatttggatacataggtatggtctgagctatgatatcaattggcttcctagggtttatcgtgtgagcacaccatatatttacagtaggaatagacgtagacacacgagcatatttcacctccgctaccataatcatcgctatccccaccggcgtcaaagtatttagctgactcgccacactccacggaagcaatatgaaatgatctgctgcagtgctctgagccctaggattcatctttcttttcaccgtaggtggcctgactggcattgtattagcaaactcatcactagacatcgtactacacgacacgtactacgttgtggcccacttccactatgtcctatcaataggagctgtatttgccatcataggaggcttcattcactgatttcccctattctcaggctacaccctagaccaaacctacgccaaaatccatttcactatcatattcatcggcgtaaatctaactttcttcccacaacactttctcggcctatccggaatgccccgacgttactcggactaccccgatgcatacaccacatgaaacatcctatcatctgtaggctcattcatttctctaacagcagtaatattaataattttcatgatttgagaagccttcgcttcgaagcgaaaagtcctaatagtagaagaaccctccataaacctggagtgactatatggatgccccccaccctaccacacattcgaagaacccgtatacataaaatctagacaaaaaaggaaggaatcgaaccccccaaagctggtttcaagccaaccccatggcctccatgactttttcaaaaaggtattagaaaaaccatttcataactttgtcaaagttaaattataggctaaatcctatatatcttaatggcacatgcagcgcaagtaggtctacaagacgctacttcccctatcatagaagagcttatcacctttcatgatcacgccctcataatcattttccttatctgcttcctagtcctgtatgcccttttcctaacactcacaacaaaactaactaatactaacatctcagacgctcaggaaatagaaaccgtctgaactatcctgcccgccatcatcctagtcctcatcgccctcccatccctacgcatcctttacataacagacgaggtcaacgatccctcccttaccatcaaatcaattggccaccaatggtactgaacctacgagtacaccgactacggcggactaatcttcaactcctacatacttcccccattattcctagaaccaggcgacctgcgactccttgacgttgacaatcgagtagtactcccgattgaagcccccattcgtataataattacatcacaagacgtcttgcactcatgagctgtccccacattaggcttaaaaacagatgcaattcccggacgtctaaaccaaaccactttcaccgctacacgaccgggggtatactacggtcaatgctctgaaatctgtggagcaaaccacagtttcatgcccatcgtcctagaattaattcccctaaaaatctttgaaatagggcccgtatttaccctatagcaccccctctaccccctctagagcccactgtaaagctaacttagcattaaccttttaagttaaagattaagagaaccaacacctctttacagtgaaatgccccaactaaatactaccgtatggcccaccataattacccccatactccttacactattcctcatcacccaactaaaaatattaaacacaaactaccacctacctccctcaccaaagcccataaaaataaaaaattataacaaaccctgagaaccaaaatgaacgaaaatctgttcgcttcattcattgcccccacaatcctaggcctacccgccgcagtactgatcattctatttccccctctattgatccccacctccaaatatctcatcaacaaccgactaatcaccacccaacaatgactaatcaaactaacctcaaaacaaatgataaccatacacaacactaaaggacgaacctgatctcttatactagtatccttaatcatttttattgccacaactaacctcctcggactcctgcctcactcatttacaccaaccacccaactatctataaacctagccatggccatccccttatgagcgggcgcagtgattataggctttcgctctaagattaaaaatgccctagcccacttcttaccacaaggcacacctacaccccttatccccatactagttattatcgaaaccatcagcctactcattcaaccaatagccctggccgtacgcctaaccgctaacattactgcaggccacctactcatgcacctaattggaagcgccaccctagcaatatcaaccattaaccttccctctacacttatcatcttcacaattctaattctactgactatcctagaaatcgctgtcgccttaatccaagcctacgttttcacacttctagtaagcctctacctgcacgacaacacataatgacccaccaatcacatgcctatcatatagtaaaacccagcccatgacccctaacaggggccctctcagccctcctaatgacctccggcctagccatgtgatttcacttccactccataacgctcctcatactaggcctactaaccaacacactaaccatataccaatgatggcgcgatgtaacacgagaaagcacataccaaggccaccacacaccacctgtccaaaaaggccttcgatacgggataatcctatttattacctcagaagtttttttcttcgcaggatttttctgagccttttaccactccagcctagcccctaccccccaattaggagggcactggcccccaacaggcatcaccccgctaaatcccctagaagtcccactcctaaacacatccgtattactcgcatcaggagtatcaatcacctgagctcaccatagtctaatagaaaacaaccgaaaccaaataattcaagcactgcttattacaattttactgggtctctattttaccctcctacaagcctcagagtacttcgagtctcccttcaccatttccgacggcatctacggctcaacattttttgtagccacaggcttccacggacttcacgtcattattggctcaactttcctcactatctgcttcatccgccaactaatatttcactttacatccaaacatcactttggcttcgaagccgccgcctgatactggcattttgtagatgtggtttgactatttctgtatgtctccatctattgatgagggtcttactcttttagtataaatagtaccgttaacttccaattaactagttttgacaacattcaaaaaagagtaataaacttcgccttaattttaataatcaacaccctcctagccttactactaataattattacattttgactaccacaactcaacggctacatagaaaaatccaccccttacgagtgcggcttcgaccctatatcccccgcccgcgtccctttctccataaaattcttcttagtagctattaccttcttattatttgatctagaaattgccctccttttacccctaccatgagccctacaaacaactaacctgccactaatagttatgtcatccctcttattaatcatcatcctagccctaagtctggcctatgagtgactacaaaaaggattagactgaaccgaattggtatatagtttaaacaaaacgaatgatttcgactcattaaattatgataatcatatttaccaaatgcccctcatttacataaatattatactagcatttaccatctcacttctaggaatactagtatatcgctcacacctcatatcctccctactatgcctagaaggaataatactatcgctgttcattatagctactctcataaccctcaacacccactccctcttagccaatattgtgcctattgccatactagtctttgccgcctgcgaagcagcggtgggcctagccctactagtctcaatctccaacacatatggcctagactacgtacataacctaaacctactccaatgctaaaactaatcgtcccaacaattatattactaccactgacatgactttccaaaaaacacataatttgaatcaacacaaccacccacagcctaattattagcatcatccctctactattttttaaccaaatcaacaacaacctatttagctgttccccaaccttttcctccgaccccctaacaacccccctcctaatactaactacctgactcctacccctcacaatcatggcaagccaacgccacttatccagtgaaccactatcacgaaaaaaactctacctctctatactaatctccctacaaatctccttaattataacattcacagccacagaactaatcatattttatatcttcttcgaaaccacacttatccccaccttggctatcatcacccgatgaggcaaccagccagaacgcctgaacgcaggcacatacttcctattctacaccctagtaggctcccttcccctactcatcgcactaatttacactcacaacaccctaggctcactaaacattctactactcactctcactgcccaagaactatcaaactcctgagccaacaacttaatatgactagcttacacaatagcttttatagtaaagatacctctttacggactccacttatgactccctaaagcccatgtcgaagcccccatcgctgggtcaatagtacttgccgcagtactcttaaaactaggcggctatggtataatacgcctcacactcattctcaaccccctgacaaaacacatagcctaccccttccttgtactatccctatgaggcataattataacaagctccatctgcctacgacaaacagacctaaaatcgctcattgcatactcttcaatcagccacatagccctcgtagtaacagccattctcatccaaaccccctgaagcttcaccggcgcagtcattctcataatcgcccacgggcttacatcctcattactattctgcctagcaaactcaaactacgaacgcactcacagtcgcatcataatcctctctcaaggacttcaaactctactcccactaatagctttttgatgacttctagcaagcctcgctaacctcgccttaccccccactattaacctactgggagaactctctgtgctagtaaccacgttctcctgatcaaatatcactctcctacttacaggactcaacatactagtcacagccctatactccctctacatatttaccacaacacaatggggctcactcacccaccacattaacaacataaaaccctcattcacacgagaaaacaccctcatgttcatacacctatcccccattctcctcctatccctcaaccccgacatcattaccgggttttcctcttgtaaatatagtttaaccaaaacatcagattgtgaatctgacaacagaggcttacgaccccttatttaccgagaaagctcacaagaactgctaactcatgcccccatgtctaacaacatggctttctcaacttttaaaggataacagctatccattggtcttaggccccaaaaattttggtgcaactccaaataaaagtaataaccatgcacactactataaccaccctaaccctgacttccctaattccccccatccttaccaccctcgttaaccctaacaaaaaaaactcatacccccattatgtaaaatccattgtcgcatccacctttattatcagtctcttccccacaacaatattcatgtgcctagaccaagaagttattatctcgaactgacactgagccacaacccaaacaacccagctctccctaagcttcaaactagactacttctccataatattcatccctgtagcattgttcgttacatggtccatcatagaattctcactgtgatatataaactcagacccaaacattaatcagttcttcaaatatctactcatcttcctaattaccatactaatcttagttaccgctaacaacctattccaactgttcatcggctgagagggcgtaggaattatatccttcttgctcatcagttgatgatacgcccgagcagatgccaacacagcagccattcaagcaatcctatacaaccgtatcggcgatatcggtttcatcctcgccttagcatgatttatcctacactccaactcatgagacccacaacaaatagcccttctaaacgctaatccaagcctcaccccactactaggcctcctcctagcagcagcaggcaaatcagcccaattaggtctccacccctgactcccctcagccatagaaggccccaccccagtctcagccctactccactcaagcactatagttgtagcaggaatcttcttactcatccgcttccaccccctagcagaaaatagcccactaatccaaactctaacactatgcttaggcgctatcaccactctgttcgcagcagtctgcgcccttacacaaaatgacatcaaaaaaatcgtagccttctccacttcaagtcaactaggactcataatagttacaatcggcatcaaccaaccacacctagcattcctgcacatctgtacccacgccttcttcaaagccatactatttatgtgctccgggtccatcatccacaaccttaacaatgaacaagatattcgaaaaataggaggactactcaaaaccatacctctcacttcaacctccctcaccattggcagcctagcattagcaggaatacctttcctcacaggtttctactccaaagaccacatcatcgaaaccgcaaacatatcatacacaaacgcctgagccctatctattactctcatcgctacctccctgacaagcgcctatagcactcgaataattcttctcaccctaacaggtcaacctcgcttccccacccttactaacattaacgaaaataaccccaccctactaaaccccattaaacgcctggcagccggaagcctattcgcaggatttctcattactaacaacatttcccccgcatcccccttccaaacaacaatccccctctacctaaaactcacagccctcgctgtcactttcctaggacttctaacagccctagacctcaactacctaaccaacaaacttaaaataaaatccccactatgcacattttatttctccaacatactcggattctaccctagcatcacacaccgcacaatcccctatctaggccttcttacgagccaaaacctgcccctactcctcctagacctaacctgactagaaaagctattacctaaaacaatttcacagcaccaaatctccacctccatcatcacctcaacccaaaaaggcataattaaactttacttcctctctttcttcttcccactcatcctaaccctactcctaatcacataacctattcccccgagcaatctcaattacaatatatacaccaacaaacaatgttcaaccagtaactactactaatcaacgcccataatcatacaaagcccccgcaccaataggatcctcccgaatcaaccctgacccctctccttcataaattattcagcttcctacactattaaagtttaccacaaccaccaccccatcatactctttcacccacagcaccaatcctacctccatcgctaaccccactaaaacactcaccaagacctcaacccctgacccccatgcctcaggatactcctcaatagccatcgctgtagtatatccaaagacaaccatcattccccctaaataaattaaaaaaactattaaacccatataacctcccccaaaattcagaataataacacacccgaccacaccgctaacaatcaatactaaacccccataaataggagaaggcttagaagaaaaccccacaaaccccattactaaacccacactcaacagaaacaaagcatacatcattattctcgcacggactacaaccacgaccaatgatatgaaaaaccatcgttgtatttcaactacaagaacaccaatgaccccaatacgcaaaactaaccccctaataaaattaattaaccactcattcatcgacctccccaccccatccaacatctccgcatgatgaaacttcggctcactccttggcgcctgcctgatcctccaaatcaccacaggactattcctagccatgcactactcaccagacgcctcaaccgccttttcatcaatcgcccacatcactcgagacgtaaattatggctgaatcatccgctaccttcacgccaatggcgcctcaatattctttatctgcctcttcctacacatcgggcgaggcctatattacggatcatttctctactcagaaacctgaaacatcggcattatcctcctgcttgcaactatagcaacagccttcataggctatgtcctcccgtgaggccaaatatcattctgaggggccacagtaattacaaacttactatccgccatcccatacattgggacagacctagttcaatgaatctgaggaggctactcagtagacagtcccaccctcacacgattctttacctttcacttcatcttgcccttcattattgcagccctagcagcactccacctcctattcttgcacgaaacgggatcaaacaaccccctaggaatcacctcccattccgataaaatcaccttccacccttactacacaatcaaagacgccctcggcttacttctcttccttctctccttaatgacattaacactattctcaccagacctcctaggcgacccagacaattataccctagccaaccccttaaacacccctccccacatcaagcccgaatgatatttcctattcgcctacacaattctccgatccgtccctaacaaactaggaggcgtccttgccctattactatccatcctcatcctagcaataatccccatcctccatatatccaaacaacaaagcataatatttcgcccactaagccaatcactttattgactcctagccgcagacctcctcattctaacctgaatcggaggacaaccagtaagctacccttttaccatcattggacaagtagcatccgtactatacttcacaacaatcctaatcctaataccaactatctccctaattgaaaacaaaatactcaaatgggcctgtccttgtagtataaactaatacaccagtcttgtaaaccggagatgaaaacctttttccaaggacaaatcagagaaaaagtctttaactccaccattagcacccaaagctaagattctaatttaaactattctctgttctttcatggggaagcagatttgggtaccacccaagtattgactcacccatcaacaaccgctatgtatttcgtacattactgccagccaccatgaatattgtacggtaccataaatacttgaccacctgtagtacataaaaacccaatccacatcaaaaccccctccccatgcttacaagcaagtacagcaatcaaccctcaactatcacacatcaactgcaactccaaagccacccctcacccactaggataccaacaaacctacccacccttaacagtacatagtacataaagccatttaccgtacatagcacattacagtcaaatcccttctcgtccccatggatgacccccctcagataggggtcccttgaccaccatcctccgtgaaatcaatatcccgcacaagagtgctactctcctcgctccgggcccataacacttgggggtagctaaagtgaactgtatccgacatctggttcctacttcagggtcataaagcctaaatagcccacacgttccccttaaataagacatcacgatg

SEQ ID NO: 470 - DNA, 16569 bp, Homo sapiens mitochondrial
  3107: "n" refers to a nucleotide at position 3107 of the Cambridge Reference Sequence (CRS, Anderson et al. 1981 Nature 290:457-465), later determined to be absent from the human mtDNA sequence according to the revised CRS (rCRS, Andrews et al. 1999 Nature Genetics 23:147); "n" therefore represents a single nucleotide deletion at a position corresponding to nucleotide 3107 of SEQ ID NO:1 as provided herein.
gatcacaggtctatcaccctattaaccactcacgggagctctccatgcatttggtattttcgtctggggggtatgcacgcgatagcattgcgagacgctggagccggagcaccctatgtcgcagtatctgtctttgattcctgcctcatcctattatttatcgcacctacgttcaatattacaggcgaacatacttactaaagtgtgttaattaattaatgcttgtaggacataataataacaattgaatgtctgcacagccactttccacacagacatcataacaaaaaatttccaccaaaccccccctcccccgcttctggccacagcacttaaacacatctctgccaaaccccaaaaacaaagaaccctaacaccagcctaaccagatttcaaattttatcttttggcggtatgcacttttaacagtcaccccccaactaacacattattttcccctcccactcccatactactaatctcatcaatacaacccccgcccatcctacccagcacacacacaccgctgctaaccccataccccgaaccaaccaaaccccaaagacaccccccacagtttatgtagcttacctcctcaaagcaatacactgaaaatgtttagacgggctcacatcaccccataaacaaataggtttggtcctagcctttctattagctcttagtaagattacacatgcaagcatccccgttccagtgagttcaccctctaaatcaccacgatcaaaagggacaagcatcaagcacgcagcaatgcagctcaaaacgcttagcctagccacacccccacgggaaacagcagtgattaacctttagcaataaacgaaagtttaactaagctatactaaccccagggttggtcaatttcgtgccagccaccgcggtcacacgattaacccaagtcaatagaagccggcgtaaagagtgttttagatcaccccccccccaataaagctaaaactcacctgagttgtaaaaaactccagttgacacaaaatagactacgaaagtggctttaacatatctgaacacacaatagctaagacccaaactgggattagataccccactatgcttagccctaaacctcaacagttaaatcaacaaaactgctcgccagaacactacgagccacagcttaaaactcaaaggacctggcggtgcttcatatccctctagaggagcctgttctgtaatcgataaaccccgatcaacctcaccacctcttgctcagcctatataccgccatcttcagcaaaccctgatgaaggctacaaagtaagcgcaagtacccacgtaaagacgttaggtcaaggtgtagcccatgaggtggcaagaaatgggctacattttctaccccagaaaactacgatagcccttatgaaacttaagggtcgaaggtggatttagcagtaaactgagagtagagtgcttagttgaacagggccctgaagcgcgtacacaccgcccgtcaccctcctcaagtatacttcaaaggacatttaactaaaacccctacgcatttatatagaggagacaagtcgtaacatggtaagtgtactggaaagtgcacttggacgaaccagagtgtagcttaacacaaagcacccaacttacacttaggagatttcaacttaacttgaccgctctgagctaaacctagccccaaacccactccaccttactaccagacaaccttagccaaaccatttacccaaataaagtataggcgatagaaattgaaacctggcgcaatagatatagtaccgcaagggaaagatgaaaaattataaccaagcataatatagcaaggactaacccctataccttctgcataatgaattaactagaaataactttgcaaggagagccaaagctaagacccccgaaaccagacgagctacctaagaacagctaaaagagcacacccgtctatgtagcaaaatagtgggaagatttataggtagaggcgacaaacctaccgagcctggtgatagctggttgtccaagatagaatcttagttcaactttaaatttgcccacagaaccctctaaatccccttgtaaatttaactgttagtccaaagaggaacagctctttggacactaggaaaaaaccttgtagagagagtaaaaaatttaacacccatagtaggcctaaaagcagccaccaattaagaaagcgttcaagctcaacacccactacctaaaaaatcccaaacatataactgaactcctcacacccaattggaccaatctatcaccctatagaagaactaatgttagtataagtaacatgaaaacattctcctccgcataagcctgcgtcagattaaaacactgaactgacaattaacagcccaatatctacaatcaaccaacaagtcattattaccctcactgtcaacccaacacaggcatgctcataaggaaaggttaaaaaaagtaaaaggaactcggcaaatcttaccccgcctgtttaccaaaaacatcacctctagcatcaccagtattagaggcaccgcctgcccagtgacacatgtttaacggccgcggtaccctaaccgtgcaaaggtagcataatcacttgttccttaaatagggacctgtatgaatggctccacgagggttcagctgtctcttacttttaaccagtgaaattgacctgcccgtgaagaggcgggcataacacagcaagacgagaagaccctatggagctttaatttattaatgcaaacagtacctaacaaacccacaggtcctaaactaccaaacctgcattaaaaatttcggttggggcgacctcggagcagaacccaacctccgagcagtacatgctaagacttcaccagtcaaagcgaactactatactcaattgatccaataacttgaccaacggaacaagttaccctagggataacagcgcaatcctattctagagtccatatcaacaatagggtttacgacctcgatgttggatcaggacatcccgatggtgcagccgctattaaaggttcgtttgttcaacgattaaagtcctacgtgatctgagttcagaccggagtaatccaggtcggtttctatctacnttcaaattcctccctgtacgaaaggacaagagaaataaggcctacttcacaaagcgccttcccccgtaaatgatatcatctcaacttagtattatacccacacccacccaagaacagggtttgttaagatggcagagcccggtaatcgcataaaacttaaaactttacagtcagaggttcaattcctcttcttaacaacatacccatggccaacctcctactcctcattgtacccattctaatcgcaatggcattcctaatgcttaccgaacgaaaaattctaggctatatacaactacgcaaaggccccaacgttgtaggcccctacgggctactacaacccttcgctgacgccataaaactcttcaccaaagagcccctaaaacccgccacatctaccatcaccctctacatcaccgccccgaccttagctctcaccatcgctcttctactatgaacccccctccccatacccaaccccctggtcaacctcaacctaggcctcctatttattctagccacctctagcctagccgtttactcaatcctctgatcagggtgagcatcaaactcaaactacgccctgatcggcgcactgcgagcagtagcccaaacaatctcatatgaagtcaccctagccatcattctactatcaacattactaataagtggctcctttaacctctccacccttatcacaacacaagaacacctctgattactcctgccatcatgacccttggccataatatgatttatctccacactagcagagaccaaccgaacccccttcgaccttgccgaaggggagtccgaactagtctcaggcttcaacatcgaatacgccgcaggccccttcgccctattcttcatagccgaatacacaaacattattataataaacaccctcaccactacaatcttcctaggaacaacatatgacgcactctcccctgaactctacacaacatattttgtcaccaagaccctacttctaacctccctgttcttatgaattcgaacagcatacccccgattccgctacgaccaactcatacacctcctatgaaaaaacttcctaccactcaccctagcattacttatatgatatgtctccatacccattacaatctccagcattccccctcaaacctaagaaatatgtctgataaaagagttactttgatagagtaaataataggagcttaaacccccttatttctaggactatgagaatcgaacccatccctgagaatccaaaattctccgtgccacctatcacaccccatcctaaagtaaggtcagctaaataagctatcgggcccataccccgaaaatgttggttatacccttcccgtactaattaatcccctggcccaacccgtcatctactctaccatctttgcaggcacactcatcacagcgctaagctcgcactgattttttacctgagtaggcctagaaataaacatgctagcttttattccagttctaaccaaaaaaataaaccctcgttccacagaagctgccatcaagtatttcctcacgcaagcaaccgcatccataatccttctaatagctatcctcttcaacaatatactctccggacaatgaaccataaccaataccaccaatcaatactcatcattaataatcataatggctatagcaataaaactaggaatagccccctttcacttctgagtcccagaggttacccaaggcacccctctgacatccggcctgcttcttctcacatgacaaaaactagcccccatctcaatcatataccaaatctctccctcactaaacgtaagccttctcctcactctctcaatcttatccatcatagcaggcagttgaggtggattaaaccaaacccagctacgcaaaatcttagcatactcctcaattacccacataggatgaataatagcagttctaccgtacaaccctaacataaccattcttaatttaactatttatattatcctaactactaccgcattcctactactcaacttaaactccagcaccacgaccctactactatctcgcacctgaaacaagctaacatgactaacacccttaattccatccaccctcctctccctaggaggcctgcccccgctaaccggctttttgcccaaatgggccattatcgaagaattcacaaaaaacaatagcctcatcatccccaccatcatagccaccatcaccctccttaacctctacttctacctacgcctaatctactccacctcaatcacactactccccatatctaacaacgtaaaaataaaatgacagtttgaacatacaaaacccaccccattcctccccacactcatcgcccttaccacgctactcctacctatctccccttttatactaataatcttatagaaatttaggttaaatacagaccaagagccttcaaagccctcagtaagttgcaatacttaatttctgtaacagctaaggactgcaaaaccccactctgcatcaactgaacgcaaatcagccactttaattaagctaagcccttactagaccaatgggacttaaacccacaaacacttagttaacagctaagcaccctaatcaactggcttcaatctacttctcccgccgccgggaaaaaaggcgggagaagccccggcaggtttgaagctgcttcttcgaatttgcaattcaatatgaaaatcacctcggagctggtaaaaagaggcctaacccctgtctttagatttacagtccaatgcttcactcagccattttacctcacccccactgatgttcgccgaccgttgactattctctacaaaccacaaagacattggaacactatacctattattcggcgcatgagctggagtcctaggcacagctctaagcctccttattcgagccgagctgggccagccaggcaaccttctaggtaacgaccacatctacaacgttatcgtcacagcccatgcatttgtaataatcttcttcatagtaatacccatcataatcggaggctttggcaactgactagttcccctaataatcggtgcccccgatatggcgtttccccgcataaacaacataagcttctgactcttacctccctctctcctactcctgctcgcatctgctatagtggaggccggagcaggaacaggttgaacagtctaccctcccttagcagggaactactcccaccctggagcctccgtagacctaaccatcttctccttacacctagcaggtgtctcctctatcttaggggccatcaatttcatcacaacaattatcaatataaaaccccctgccataacccaataccaaacgcccctcttcgtctgatccgtcctaatcacagcagtcctacttctcctatctctcccagtcctagctgctggcatcactatactactaacagaccgcaacctcaacaccaccttcttcgaccccgccggaggaggagaccccattctataccaacacctattctgatttttcggtcaccctgaagtttatattcttatcctaccaggcttcggaataatctcccatattgtaacttactactccggaaaaaaagaaccatttggatacataggtatggtctgagctatgatatcaattggcttcctagggtttatcgtgtgagcacaccatatatttacagtaggaatagacgtagacacacgagcatatttcacctccgctaccataatcatcgctatccccaccggcgtcaaagtatttagctgactcgccacactccacggaagcaatatgaaatgatctgctgcagtgctctgagccctaggattcatctttcttttcaccgtaggtggcctgactggcattgtattagcaaactcatcactagacatcgtactacacgacacgtactacgttgtagcccacttccactatgtcctatcaataggagctgtatttgccatcataggaggcttcattcactgatttcccctattctcaggctacaccctagaccaaacctacgccaaaatccatttcactatcatattcatcggcgtaaatctaactttcttcccacaacactttctcggcctatccggaatgccccgacgttactcggactaccccgatgcatacaccacatgaaacatcctatcatctgtaggctcattcatttctctaacagcagtaatattaataattttcatgatttgagaagccttcgcttcgaagcgaaaagtcctaatagtagaagaaccctccataaacctggagtgactatatggatgccccccaccctaccacacattcgaagaacccgtatacataaaatctagacaaaaaaggaaggaatcgaaccccccaaagctggtttcaagccaaccccatggcctccatgactttttcaaaaaggtattagaaaaaccatttcataactttgtcaaagttaaattataggctaaatcctatatatcttaatggcacatgcagcgcaagtaggtctacaagacgctacttcccctatcatagaagagcttatcacctttcatgatcacgccctcataatcattttccttatctgcttcctagtcctgtatgcccttttcctaacactcacaacaaaactaactaatactaacatctcagacgctcaggaaatagaaaccgtctgaactatcctgcccgccatcatcctagtcctcatcgccctcccatccctacgcatcctttacataacagacgaggtcaacgatccctcccttaccatcaaatcaattggccaccaatggtactgaacctacgagtacaccgactacggcggactaatcttcaactcctacatacttcccccattattcctagaaccaggcgacctgcgactccttgacgttgacaatcgagtagtactcccgattgaagcccccattcgtataataattacatcacaagacgtcttgcactcatgagctgtccccacattaggcttaaaaacagatgcaattcccggacgtctaaaccaaaccactttcaccgctacacgaccgggggtatactacggtcaatgctctgaaatctgtggagcaaaccacagtttcatgcccatcgtcctagaattaattcccctaaaaatctttgaaatagggcccgtatttaccctatagcaccccctctaccccctctagagcccactgtaaagctaacttagcattaaccttttaagttaaagattaagagaaccaacacctctttacagtgaaatgccccaactaaatactaccgtatggcccaccataattacccccatactccttacactattcctcatcacccaactaaaaatattaaacacaaactaccacctacctccctcaccaaagcccataaaaataaaaaattataacaaaccctgagaaccaaaatgaacgaaaatctgttcgcttcattcattgcccccacaatcctaggcctacccgccgcagtactgatcattctatttccccctctattgatccccacctccaaatatctcatcaacaaccgactaatcaccacccaacaatgactaatcaaactaacctcaaaacaaatgataaccatacacaacactaaaggacgaacctgatctcttatactagtatccttaatcatttttattgccacaactaacctcctcggactcctgcctcactcatttacaccaaccacccaactatctataaacctagccatggccatccccttatgagcgggcgcagtgattataggctttcgctctaagattaaaaatgccctagcccacttcttaccacaaggcacacctacaccccttatccccatactagttattatcgaaaccatcagcctactcattcaaccaatagccctggccgtacgcctaaccgctaacattactgcaggccacctactcatgcacctaattggaagcgccaccctagcaatatcaaccattaaccttccctctacacttatcatcttcacaattctaattctactgactatcctagaaatcgctgtcgccttaatccaagcctacgttttcacacttctagtaagcctctacctgcacgacaacacataatgacccaccaatcacatgcctatcatatagtaaaacccagcccatgacccctaacaggggccctctcagccctcctaatgacctccggcctagccatgtgatttcacttccactccataacgctcctcatactaggcctactaaccaacacactaaccatataccaatgatggcgcgatgtaacacgagaaagcacataccaaggccaccacacaccacctgtccaaaaaggccttcgatacgggataatcctatttattacctcagaagtttttttcttcgcaggatttttctgagccttttaccactccagcctagcccctaccccccaattaggagggcactggcccccaacaggcatcaccccgctaaatcccctagaagtcccactcctaaacacatccgtattactcgcatcaggagtatcaatcacctgagctcaccatagtctaatagaaaacaaccgaaaccaaataattcaagcactgcttattacaattttactgggtctctattttaccctcctacaagcctcagagtacttcgagtctcccttcaccatttccgacggcatctacggctcaacattttttgtagccacaggcttccacggacttcacgtcattattggctcaactttcctcactatctgcttcatccgccaactaatatttcactttacatccaaacatcactttggcttcgaagccgccgcctgatactggcattttgtagatgtggtttgactatttctgtatgtctccatctattgatgagggtcttactcttttagtataaatagtaccgttaacttccaattaactagttttgacaacattcaaaaaagagtaataaacttcgccttaattttaataatcaacaccctcctagccttactactaataattattacattttgactaccacaactcaacggctacatagaaaaatccaccccttacgagtgcggcttcgaccctatatcccccgcccgcgtccctttctccataaaattcttcttagtagctattaccttcttattatttgatctagaaattgccctccttttacccctaccatgagccctacaaacaactaacctgccactaatagttatgtcatccctcttattaatcatcatcctagccctaagtctggcctatgagtgactacaaaaaggattagactgaaccgaattggtatatagtttaaacaaaacgaatgatttcgactcattaaattatgataatcatatttaccaaatgcccctcatttacataaatattatactagcatttaccatctcacttctaggaatactagtatatcgctcacacctcatatcctccctactatgcctagaaggaataatactatcgctgttcattatagctactctcataaccctcaacacccactccctcttagccaatattgtgcctattgccatactagtctttgccgcctgcgaagcagcggtgggcctagccctactagtctcaatctccaacacatatggcctagactacgtacataacctaaacctactccaatgctaaaactaatcgtcccaacaattatattactaccactgacatgactttccaaaaaacacataatttgaatcaacacaaccacccacagcctaattattagcatcatccctctactattttttaaccaaatcaacaacaacctatttagctgttccccaaccttttcctccgaccccctaacaacccccctcctaatactaactacctgactcctacccctcacaatcatggcaagccaacgccacttatccagtgaaccactatcacgaaaaaaactctacctctctatactaatctccctacaaatctccttaattataacattcacagccacagaactaatcatattttatatcttcttcgaaaccacacttatccccaccttggctatcatcacccgatgaggcaaccagccagaacgcctgaacgcaggcacatacttcctattctacaccctagtaggctcccttcccctactcatcgcactaatttacactcacaacaccctaggctcactaaacattctactactcactctcactgcccaagaactatcaaactcctgagccaacaacttaatatgactagcttacacaatagcttttatagtaaagatacctctttacggactccacttatgactccctaaagcccatgtcgaagcccccatcgctgggtcaatagtacttgccgcagtactcttaaaactaggcggctatggtataatacgcctcacactcattctcaaccccctgacaaaacacatagcctaccccttccttgtactatccctatgaggcataattataacaagctccatctgcctacgacaaacagacctaaaatcgctcattgcatactcttcaatcagccacatagccctcgtagtaacagccattctcatccaaaccccctgaagcttcaccggcgcagtcattctcataatcgcccacgggcttacatcctcattactattctgcctagcaaactcaaactacgaacgcactcacagtcgcatcataatcctctctcaaggacttcaaactctactcccactaatagctttttgatgacttctagcaagcctcgctaacctcgccttaccccccactattaacctactgggagaactctctgtgctagtaaccacgttctcctgatcaaatatcactctcctacttacaggactcaacatactagtcacagccctatactccctctacatatttaccacaacacaatggggctcactcacccaccacattaacaacataaaaccctcattcacacgagaaaacaccctcatgttcatacacctatcccccattctcctcctatccctcaaccccgacatcattaccgggttttcctcttgtaaatatagtttaaccaaaacatcagattgtgaatctgacaacagaggcttacgaccccttatttaccgagaaagctcacaagaactgctaactcatgcccccatgtctaacaacatggctttctcaacttttaaaggataacagctatccattggtcttaggccccaaaaattttggtgcaactccaaataaaagtaataaccatgcacactactataaccaccctaaccctgacttccctaattccccccatccttaccaccctcgttaaccctaacaaaaaaaactcatacccccattatgtaaaatccattgtcgcatccacctttattatcagtctcttccccacaacaatattcatgtgcctagaccaagaagttattatctcgaactgacactgagccacaacccaaacaacccagctctccctaagcttcaaactagactacttctccataatattcatccctgtagcattgttcgttacatggtccatcatagaattctcactgtgatatataaactcagacccaaacattaatcagttcttcaaatatctactcatcttcctaattaccatactaatcttagttaccgctaacaacctattccaactgttcatcggctgagagggcgtaggaattatatccttcttgctcatcagttgatgatacgcccgagcagatgccaacacagcagccattcaagcaatcctatacaaccgtatcggcgatatcggtttcatcctcgccttagcatgatttatcctacactccaactcatgagacccacaacaaatagcccttctaaacgctaatccaagcctcaccccactactaggcctcctcctagcagcagcaggcaaatcagcccaattaggtctccacccctgactcccctcagccatagaaggccccaccccagtctcagccctactccactcaagcactatagttgtagcaggaatcttcttactcatccgcttccaccccctagcagaaaatagcccactaatccaaactctaacactatgcttaggcgctatcaccactctgttcgcagcagtctgcgcccttacacaaaatgacatcaaaaaaatcgtagccttctccacttcaagtcaactaggactcataatagttacaatcggcatcaaccaaccacacctagcattcctgcacatctgtacccacgccttcttcaaagccatactatttatgtgctccgggtccatcatccacaaccttaacaatgaacaagatattcgaaaaataggaggactactcaaaaccatacctctcacttcaacctccctcaccattggcagcctagcattagcaggaatacctttcctcacaggtttctactccaaagaccacatcatcgaaaccgcaaacatatcatacacaaacgcctgagccctatctattactctcatcgctacctccctgacaagcgcctatagcactcgaataattcttctcaccctaacaggtcaacctcgcttccccacccttactaacattaacgaaaataaccccaccctactaaaccccattaaacgcctggcagccggaagcctattcgcaggatttctcattactaacaacatttcccccgcatcccccttccaaacaacaatccccctctacctaaaactcacagccctcgctgtcactttcctaggacttctaacagccctagacctcaactacctaaccaacaaacttaaaataaaatccccactatgcacattttatttctccaacatactcggattctaccctagcatcacacaccgcacaatcccctatctaggccttcttacgagccaaaacctgcccctactcctcctagacctaacctgactagaaaagctattacctaaaacaatttcacagcaccaaatctccacctccatcatcacctcaacccaaaaaggcataattaaactttacttcctctctttcttcttcccactcatcctaaccctactcctaatcacataacctattcccccgagcaatctcaattacaatatatacaccaacaaacaatgttcaaccagtaactactactaatcaacgcccataatcatacaaagcccccgcaccaataggatcctcccgaatcaaccctgacccctctccttcataaattattcagcttcctacactattaaagtttaccacaaccaccaccccatcatactctttcacccacagcaccaatcctacctccatcgctaaccccactaaaacactcaccaagacctcaacccctgacccccatgcctcaggatactcctcaatagccatcgctgtagtatatccaaagacaaccatcattccccctaaataaattaaaaaaactattaaacccatataacctcccccaaaattcagaataataacacacccgaccacaccgctaacaatcaatactaaacccccataaataggagaaggcttagaagaaaaccccacaaaccccattactaaacccacactcaacagaaacaaagcatacatcattattctcgcacggactacaaccacgaccaatgatatgaaaaaccatcgttgtatttcaactacaagaacaccaatgaccccaatacgcaaaactaaccccctaataaaattaattaaccactcattcatcgacctccccaccccatccaacatctccgcatgatgaaacttcggctcactccttggcgcctgcctgatcctccaaatcaccacaggactattcctagccatgcactactcaccagacgcctcaaccgccttttcatcaatcgcccacatcactcgagacgtaaattatggctgaatcatccgctaccttcacgccaatggcgcctcaatattctttatctgcctcttcctacacatcgggcgaggcctatattacggatcatttctctactcagaaacctgaaacatcggcattatcctcctgcttgcaactatagcaacagccttcataggctatgtcctcccgtgaggccaaatatcattctgaggggccacagtaattacaaacttactatccgccatcccatacattgggacagacctagttcaatgaatctgaggaggctactcagtagacagtcccaccctcacacgattctttacctttcacttcatcttgcccttcattattgcagccctagcagcactccacctcctattcttgcacgaaacgggatcaaacaaccccctaggaatcacctcccattccgataaaatcaccttccacccttactacacaatcaaagacgccctcggcttacttctcttccttctctccttaatgacattaacactattctcaccagacctcctaggcgacccagacaattataccctagccaaccccttaaacacccctccccacatcaagcccgaatgatatttcctattcgcctacacaattctccgatccgtccctaacaaactaggaggcgtccttgccctattactatccatcctcatcctagcaataatccccatcctccatatatccaaacaacaaagcataatatttcgcccactaagccaatcactttattgactcctagccgcagacctcctcattctaacctgaatcggaggacaaccagtaagctacccttttaccatcattggacaagtagcatccgtactatacttcacaacaatcttaatcctaataccaactatctccctaattgaaaacaaaatactcaaatgggcctgtccttgtagtataaactaatacaccagtcttgtaaaccggagatgaaaacctttttccaaggacaaatcagagaaaaagtctttaactccaccattagcacccaaagctaagattctaatttaaactattctctgttctttcatggggaagcagatttgggtaccacccaagtattgactcacccatcaacaaccgctatgtatttcgtacattactgccagccaccatgaatattgtacggtaccataaatacttgaccacctgtagtacataaaaacccaatccacatcaaaaccccctccccatgcttacaagcaagtacagcaatcaaccctcaactatcacacatcaactgcaactccaaagccacccctcacccactaggataccaacaaacctacccacccttaacagtacatagtacataaagccatttaccgtacatagcacattacagtcaaatcccttctcgtccccatggatgacccccctcagataggggtcccttgaccaccatcctccgtgaaatcaatatcccgcacaagagtgctactctcctcgctccgggcccataacacttgggggtagctaaagtgaactgtatccgacatctggttcctacttcagggtcataaagcctaaatagcccacacgttccccttaaataagacatcacgatg

SEQ ID NO: 471 - DNA, 16569 bp, Homo sapiens mitochondrial
  3107: "n" refers to a nucleotide at position 3107 of the Cambridge Reference Sequence (CRS, Anderson et al. 1981 Nature 290:457-465), later determined to be absent from the human mtDNA sequence according to the revised CRS (rCRS, Andrews et al. 1999 Nature Genetics 23:147); "n" therefore represents a single nucleotide deletion at a position corresponding to nucleotide 3107 of SEQ ID NO:1 as provided herein.
gatcacaggtctatcaccctattaaccactcacgggagctctccatgcatttggtattttcgtctggggggtatgcacgcgatagcattgcgagacgctggagccggagcaccctatgtcgcagtatctgtctttgattcctgcctcatcctattatttatcgcacctacgttcaatattacaggcgaacatacttactaaagtgtgttaattaattaatgcttgtaggacataataataacaattgaatgtctgcacagccactttccacacagacatcataacaaaaaatttccaccaaaccccccctcccccgcttctggccacagcacttaaacacatctctgccaaaccccaaaaacaaagaaccctaacaccagcctaaccagatttcaaattttatcttttggcggtatgcacttttaacagtcaccccccaactaacacattattttcccctcccactcccatactactaatctcatcaatacaacccccgcccatcctacccagcacacacacaccgctgctaaccccataccccgaaccaaccaaaccccaaagacaccccccacagtttatgtagcttacctcctcaaagcaatacactgaaaatgtttagacgggctcacatcaccccataaacaaataggtttggtcctagcctttctattagctcttagtaagattacacatgcaagcatccccgttccagtgagttcaccctctaaatcaccacgatcaaaagggacaagcatcaagcacgcagcaatgcagctcaaaacgcttagcctagccacacccccacgggaaacagcagtgattaacctttagcaataaacgaaagtttaactaagctatactaaccccagggttggtcaatttcgtgccagccaccgcggtcacacgattaacccaagtcaatagaagccggcgtaaagagtgttttagatcaccccctccccaataaagctaaaactcacctgagttgtaaaaaactccagttgacacaaaatagactacgaaagtggctttaacatatctgaacacacaatagctaagacccaaactgggattagataccccactatgcttagccctaaacctcaacagttaaatcaacaaaactgctcgccagaacactacgagccacagcttaaaactcaaaggacctggcggtgcttcatatccctctagaggagcctgttctgtaatcgataaaccccgatcaacctcaccacctcttgctcagcctatataccgccatcttcagcaaaccctgatgaaggctacaaagtaagcgcaagtacccacgtaaagacgttaggtcaaggtgtagcccatgaggtggcaagaaatgggctacattttctaccccagaaaactacgatagcccttatgaaacttaagggtcgaaggtggatttagcagtaaactgagagtagagtgcttagttgaacagggccctgaagcgcgtacacaccgcccgtcaccctcctcaagtatacttcaaaggacatttaactaaaacccctacgcatttatatagaggagacaagtcgtaacatggtaagtgtactggaaagtgcacttggacgaaccagagtgtagcttaacacaaagcacccaacttacacttaggagatttcaacttaacttgaccgctctgagctaaacctagccccaaacccactccaccttactaccagacaaccttagccaaaccatttacccaaataaagtataggcgatagaaattgaaacctggcgcaatagatatagtaccgcaagggaaagatgaaaaattatagccaagcataatatagcaaggactaacccctataccttctgcataatgaattaactagaaataactttgcaaggagagccaaagctaagacccccgaaaccagacgagctacctaagaacagctaaaagagcacacccgtctatgtagcaaaatagtgggaagatttataggtagaggcgacaaacctaccgagcctggtgatagctggttgtccaagatagaatcttagttcaactttaaatttgcccacagaaccctctaaatccccttgtaaatttaactgttagtccaaagaggaacagctctttggacactaggaaaaaaccttgtagagagagtaaaaaatttaacacccatagtaggcctaaaagcagccaccaattaagaaagcgttcaagctcaacatccactacctaaaaaatcccaaacatataactgaactcctcacacccaattggaccaatctatcaccctatagaagaactaatgttagtataagtaacatgaaaacattctcctccgcataagcctgcgtcagattaaaacactgaactgacaattaacagcccaatatctacaatcaaccaacaagtcattattaccctcactgtcaacccaacacaggcatgctcataaggaaaggttaaaaaaagtaaaaggaactcggcaaatcttaccccgcctgtttaccaaaaacatcacctctagcatcaccagtattagaggcaccgcctgcccagtgacacatgtttaacggccgcggtaccctaaccgtgcaaaggtagcataatcacttgttccttaaatagggacctgtatgaatggctccacgagggttcagctgtctcttacttttaaccagtgaaattgacctgcccgtgaagaggcgggcatgacacagcaagacgagaagaccctatggagctttaatttattaatgcaaacagtacctaacaaacccacaggtcctaaactaccaaacctgcattaaaaatttcggttggggcgacctcggagcagaacccaacctccgagcagtacatgctaagacttcaccagtcaaagcgaactactatactcaattgatccaataacttgaccaacggaacaagttaccctagggataacagcgcaatcctattctagagtccatatcaacaatagggtttacgacctcgatgttggatcaggacatcccgatggtgcagccgctattaaaggttcgtttgttcaacgattaaagtcctacgtgatctgagttcagaccggagtaatccaggtcggtttctatctacnttcaaattcctccctgtacgaaaggacaagagaaataaggcctacttcacaaagcgccttcccccgtaaatgatatcatctcaacttagtattatacccacacccacccaagaacagggtttgttaagatggcagagcccggtaatcgcataaaacttaaaactttacagtcagaggttcaattcctcttcttaacaacatacccatggccaacctcctactcctcattgtacccattctaatcgcaatggcattcctaatgcttaccgaacgaaaaattctaggctatatacaactacgcaaaggccccaacgttgtaggcccctacgggctactacaacccttcgctgacgccataaaactcttcaccaaggagcccctaaaacccgccacatctaccatcaccctctacatcaccgccccgaccttagctctcaccatcgctcttctactatgaacccccctccccatacccaaccccctggtcaacctcaacctaggcctcctatttattctagccacctctagcctagccgtttactcaatcctctgatcagggtgagcatcaaactcaaactacgccctgatcggcgcactgcgagcagtagcccaaacaatctcatatgaagtcaccctagccatcattctactatcaacattactaataagtggctcctttaacctctccacccttatcacaacacaagaacacctctgattactcctgccatcatgacccttggccataatatgatttatctccacactagcagagaccaaccgaacccccttcgaccttgccgaaggggagtccgaactagtctcaggcttcaacatcgaatacgccgcaggccccttcgccctattcttcatagccgaatacacaaacattattataataaacaccctcaccactacaatcttcctaggaacaacatatgacgcactctcccctgaactctacacaacatattttgtcaccaagaccctacttctaacctccctgttcttatgaattcgaacagcatacccccgattccgctacgaccaactcatacacctcctatgaaaaaacttcctaccactcaccctagcattacttatatgatatgtctccatacccattacaatctccagcattccccctcaaacctaagaaatatgtctgataaaagagttactttgatagagtaaataataggagcttaaacccccttatttctaggactatgagaatcgaacccatccctgagaatccaaaattctccgtgccacctatcacaccccatcctaaagtaaggtcagctaaataagctatcgggcccataccccgaaaatgttggttatacccttcccgtactaattaatcccctggcccaacccgtcatctactctaccatctttgcaggcacactcatcacagcgctaagctcgcactgattttttacctgagtaggcctagaaataaacatgctagcttttattccagttctaaccaaaaaaataaaccctcgttccacagaagctgccatcaagtatttcctcacgcaagcaaccgcatccataatccttctaatagctatcctcttcaacaatatactctccggacaatgaaccataaccaatactaccaatcaatactcatcattaataatcataatggctatagcaataaaactaggaatagccccctttcacttctgagtcccagaggttacccaaggcacccctctgacatccggcctgcttcttctcacatgacaaaaactagcccccatctcaatcatataccaaatctctccctcactaaacgtaagccttctcctcactctctcaatcttatccatcatagcaggcagttgaggtggattaaaccaaacccagctacgcaaaatcttagcatactcctcaattacccacataggatgaataatagcagttctaccgtacaaccctaacataaccattcttaatttaactatttatattatcctaactactaccgcattcctactactcaacttaaactccagcaccacgaccctactactatctcgcacctgaaacaagctaacatgactaacacccttaattccatccaccctcctctccctaggaggcctacccccgctaaccggctttttgcccaaatgggccattatcgaagaattcacaaaaaacaatagcctcatcatccccaccatcatagccaccatcaccctccttaacctctacttctacctacgcctaatctactccacctcaatcacactactccccatatctaacaacgtaaaaataaaatgacagtttgaacatacaaaacccaccccattcctccccacactcatcgcccttaccacgctactcctacctatctccccttttatactaataatcttatagaaatttaggttaaatacagaccaagagccttcaaagccctcagtaagttgcaatacttaatttctgtaacagctaaggactgcaaaaccccactctgcatcaactgaacgcaaatcagccactttaattaagctaagcccttactagaccaatgggacttaaacccacaaacacttagttaacagctaagcaccctaatcaactggcttcaatctacttctcccgccgccgggaaaaaaggcgggagaagccccggcaggtttgaagctgcttcttcgaatttgcaattcaatatgaaaatcacctcggagctggtaaaaagaggcctaacccctgtctttagatttacagtccaatgcttcactcagccattttacctcacccccactgatgttcgccgaccgttgactattctctacaaaccacaaagacattggaacactatacctattattcggcgcatgagctggagtcctaggcacagctctaagcctccttattcgagccgagctgggccagccaggcaaccttctaggtaacgaccacatctacaacgttatcgtcacagcccatgcatttgtaataatcttcttcatagtaatacccatcataatcggaggctttggcaactgactagttcccctaataatcggtgcccccgatatggcgtttccccgcataaacaacataagcttctgactcttacctccctctctcctactcctgctcgcatctgctatagtggaggccggagcaggaacaggttgaacagtctaccctcccttagcagggaactactcccaccctggagcctccgtagacctaaccatcttctccttacacctagcaggtgtctcctctatcttaggggccatcaatttcatcacaacaattatcaatataaaaccccctgccataacccaataccaaacgcccctcttcgtctgatccgtcctaatcacagcagtcctacttctcctatctctcccagtcctagctgctggcatcactatactactaacagaccgcaacctcaacaccaccttcttcgaccccgccggaggaggagaccccattctataccaacacctattctgatttttcggtcaccctgaagtttatattcttatcctaccaggcttcggaataatctcccatattgtaacttactactccggaaaaaaagaaccatttggatacataggtatggtctgagctatgatatcaattggcttcctagggtttatcgtgtgagcacaccatatatttacagtaggaatagacgtagacacacgagcatatttcacctccgctaccataatcatcgctatccccaccggcgtcaaagtatttagctgactcgccacactccacggaagcaatatgaaatgatctgctgcagtgctctgagccctaggattcatctttcttttcaccgtaggtggcctgactggcattgtattagcaaactcatcactagacatcgtactacacgacacgtactacgttgtagctcacttccactatgtcctatcaataggagctgtatttgccatcataggaggcttcattcactgatttcccctattctcaggctacaccctagaccaaacctacgccaaaatccatttcactatcatattcatcggcgtaaatctaactttcttcccacaacactttctcggcctatccggaatgccccgacgttactcggactaccccgatgcatacaccacatgaaacatcctatcatctgtaggctcattcatttctctaacagcagtaatattaataattttcatgatttgagaagccttcgcttcgaagcgaaaagtcctaatagtagaagaaccctccataaacctggagtgactatatggatgccccccaccctaccacacattcgaagaacccgtatacataaaatctagacaaaaaaggaaggaatcgaaccccccaaagctggtttcaagccaaccccatggcctccatgactttttcaaaaaggtattagaaaaaccatttcataactttgtcaaagttaaattataggctaaatcctatatatcttaatggcacatgcagcgcaagtaggtctacaagacgctacttcccctatcatagaagagcttatcacctttcatgatcacgccctcataatcattttccttatctgcttcctagtcctgtatgcccttttcctaacactcacaacaaaactaactaatactaacatctcagacgctcaggaaatagaaaccgtctgaactatcctgcccgccatcatcctagtcctcatcgccctcccatccctacgcatcctttacataacagacgaggtcaacgatccctcccttaccatcaaatcaattggccaccaatggtactgaacctacgagtacaccgactacggcggactaatcttcaactcctacatacttcccccattattcctagaaccaggcgacctgcgactccttgacgttgacaatcgagtagtactcccgattgaagcccccattcgtataataattacatcacaagacgtcttgcactcatgagctgtccccacattaggcttaaaaacagatgcaattcccggacgtctaaaccaaaccactttcaccgctacacgaccgggggtatactacggtcaatgctctgaaatctgtggagcaaaccacagtttcatgcccatcgtcctagaattaattcccctaaaaatctttgaaatagggcccgtatttaccctatagcaccccctctaccccctctagagcccactgtaaagctaacttagcattaaccttttaagttaaagattaagagaaccaacacctctttacagtgaaatgccccaactaaatactaccgtatggcccaccataattacccccatactccttacactattcctcatcacccaactaaaaatattaaacacaaactaccacctacctccctcaccaaagcccataaaaataaaaaattataacaaaccctgagaaccaaaatgaacgaaaatctgttcgcttcattcattgcccccacaatcctaggcctacccgccgcagtactgatcattctatttccccctctattgatccccacctccaaatatctcatcaacaaccgactaatcaccacccaacaatgactaatcaaactaacctcaaaacaaatgataaccatacacaacactaaaggacgaacctgatctcttatactagtatccttaatcatttttattgccacaactaacctcctcggactcctgcctcactcatttacaccaaccacccaactatctataaacctagccatggccatccccttatgagcgggcgcagtgattataggctttcgctctaagattaaaaatgccctagcccacttcttaccacaaggcacacctacaccccttatccccatactagttattatcgaaaccatcagcctactcattcaaccaatagccctggccgtacgcctaaccgctaacattactgcaggccacctactcatgcacctaattggaagcaccaccctagcaatatcaaccattaaccttccctctacacttatcatcttcacaattctaattctactgactatcctagaaatcgctgtcgccttaatccaagcctacgttttcacacttctagtaagcctctacctgcacgacaacacataatgacccaccaatcacatgcctatcatatagtaaaacccagcccatgacccctaacaggggccctctcagccctcctaatgacctccggcctagccatgtgatttcacttccactccataacgctcctcatactaggcctactaaccaacacactaaccatataccaatgatggcgcgatgtaacacgagaaagcacataccaaggccaccacacaccacctgtccaaaaaggccttcgatacgggataatcctatttattacctcagaagtttttttcttcgcaggatttttctgagccttttaccactccagcctagcccctaccccccaattaggagggcactggcccccaacaggcatcaccccgctaaatcccctagaagtcccactcctaaacacatccgtattactcgcatcaggagtatcaatcacctgagctcaccatagtctaatagaaaacaaccgaaaccaaataattcaagcactgctcattacaattttactgggcctctattttaccctcctacaagcctcagagtacttcgagtctcccttcaccatttccgacggcatctacggctcaacattttttgtagccacaggcttccacggacttcacgtcattattggctcaactttcctcactatctgcttcatccgccaactaatatttcactttacatccaaacatcactttggcttcgaagccgccgcctgatactggcattttgtagatgtggtttgactatttctgtatgtctccatctattgatgagggtcttactcttttagtataaatagtaccgttaacttccaattaactagttttgacaacattcaaaaaagagtaataaacttcgccttaattttaataatcaacaccctcctagccttactactaataattattacattttgactaccacaactcaacggctacatagaaaaatccaccccttacgagtgcggcttcgaccctatatcccccgcccgcgtccctttctccataaaattcttcttagtagctattaccttcttattatttgatctagaaattgccctccttttacccctaccatgagccctacaaacaactaacctgccactaatagttatgtcatccctcttattaatcatcatcctagccctaagtctggcctatgagtgactacaaaaaggattagactgaaccgaattggtatatagtttaaacaaaacgaatgatttcgactcattaaattatgataatcatatttaccaaatgcccctcatttacataaatattatactagcatttaccatctcacttctaggaatactagtatatcgctcacacctcatgtcctccctactatgcctagaaggaataatactatcgctgttcattatagctactctcataaccctcaacacccactccctcttagccaatattgtgcctattgccatactagtctttgccgcctgcgaagcagcggtgggcctagccctactagtctcaatctccaacacatatggcctagactacgtacataacctaaacctactccaatgctaaaactaatcgtcccaacaattatattactaccactgacatgactttccaaaaaacacataatttgaatcaacacaaccacccacagcctaattattagcatcatccctctactattttttaaccaaatcaacaacaacctatttagctgttccccaaccttttcctccgaccccctaacaacccccctcctaatactaactacctgactcctacccctcacaatcatggcaagccaacgccacttatccagtgaaccactatcacgaaaaaaactctacctctctatactaatctccctacaaatctccttaattataacattcacagccacagaactaatcatattttatatcttcttcgaaaccacacttatccccaccttggctatcatcacccgatgaggcaaccagccagaacgcctgaacgcaggcacatacttcctattctacaccctagtaggctcccttcccctactcatcgcactaatttacactcacaacaccctaggctcactaaacattctactactcaccctcactgcccaagaactatcaaactcctgagccaacaacttaatatgactagcttacacaatagcttttatagtaaagatacctctttacggactccacttatgactccctaaagcccatgtcgaagcccccatcgctgggtcaatagtacttgccgcagtactcttgaaactaggcggctatggtataatacgcctcacactcattctcaaccccctgacaaaacacatagcctaccccttccttgtactatccctatgaggcataattataacaagctccatctgcctacgacaaacagacctaaaatcgctcattgcatactcttcaatcagccacatagccctcgtagtaacagccattctcatccaaaccccctgaagcttcaccggcgcagtcattctcataatcgcccacggacttacatcctcattactattctgcctagcaaactcaaactacgaacgcactcacagtcgcatcataatcctctctcaaggacttcaaactctactcccactaatagctttttgatgacttctagcaagcctcgctaacctcgccttaccacccactattaacctactgggagaactctctgtgctagtaaccacgttctcctgatcaaatatcactctcctacttacaggactcaacatactagtcacagccctatactccctctacatatttaccacaacacaatggggctcactcacccaccacattaacaacataaaaccctcattcacacgagaaaacaccctcatgttcatacacctatcccccattctcctcctatccctcaaccccgacatcattaccgggttttcctcttgtaaatatagtttaaccaaaacatcagattgtgaatctgacaacagaggcttacgaccccttatttaccgagaaagctcacaagaactgctaactcatgcccccatgtctaacaacatggctttctcaacttttaaaggataacagctatccattggtcttaggccccaagaattttggtgcaactccaaataaaagtaataaccatgcacactactataaccaccctaaccctaacttccctaattccccccatccttaccaccctcgttaaccctaacaaaaaaaactcatacccccattatgtaaaatccattgtcgcatccacctttattatcagtctcttccccacaacaatattcatgtgcctagaccaagaagttattatctcgaactgacactgagccacaacccaaacaacccagctctccctaagcttcaaactagactacttctccataatattcatccctgtagcattgttcgttacatggtccatcatagaattctcactgtgatatataaactcagacccaaacattaatcagttcttcaaatatctactcatcttcctaattaccatactaatcttagttaccgctaacaacctattccaactgttcatcggctgagagggcgtaggaattatatccttcttgctcatcagttgatgatacgcccgagcagatgccaacacagcagccattcaagcaatcctatacaaccgtatcggcgatatcggtttcatcctcgccttagcatgatttatcctacactccaactcatgagacccacaacaaatagcccttctaaacgctaatccaagcctcaccccactactaggcctcctcctagcagcagcaggcaaatcagcccaattaggtctccacccctgactcccctcagccatagaaggccccaccccagtctcagccctactccactcaagcactatagttgtagcaggaatcttcttactcatccgcttccaccccctaacagaaaatagcccactaatccaaactctaacactatgcttaggcgctatcaccactctgttcgcagcagtctgcgcccttacacaaaatgacatcaaaaaaatcgtagccttctccacttcaagtcaactaggactcataatagttacaatcggcatcaaccaaccacacctagcattcctgcacatctgtacccacgccttcttcaaagccatactatttatgtgctccgggtccatcatccacaaccttaacaatgaacaagatattcgaaaaataggaggactactcaaaaccatacctctcacttcaacctccctcaccattggcagcctagcattagcaggaatacctttcctcacaggtttctactccaaagaccacatcatcgaaaccgcaaacatatcatacacaaacgcctgagccctatctattactctcatcgctacctccctgacaagcgcctatagcactcgaataattcttctcaccctaacaggtcaacctcgcttccccacccttactaacattaacgaaaataaccccaccctactaaaccccattaaacgcctggcagccggaagcctattcgcaggatttctcattactaacaacatttcccccgcatcccccttccaaacaacaatccccctctacctaaaactcacagccctcgctgtcactttcctaggacttctaacagccctagacctcaactacctaaccaacaaacttaaaataaaatccccactatgcacattttatttctccaacatactcggattctaccctagcatcacacaccgcacaatcccctatctaggccttcttacgagccaaaacctgcccctactcctcctagacctaacctgactagaaaagctattacctaaaacaatttcgcagcaccaaatctccacctccatcatcacctcaacccaaaaaggcataattaaactttacttcctctctttcttcttcccactcatcctaaccctactcctaatcacataacctattcccccgagcaatttcaattacaatatatacaccaacaaacaatgttcaaccagtaactactactaatcaacgcccataatcatacaaagcccccgcaccaataggatcctcccgaatcaaccctgacccctctccttcataaattattcagcttcctacactattaaagtttaccacaaccaccaccccatcatactctttcacccacagcaccaatcctacctccatcgctaaccccactaaaacactcaccaagacctcaacccctgacccccatgcctcaggatactcctcaatagccatcgctgtagtatatccaaagacaaccatcattccccctaaataaattaaaaaaactattaaacccatataacctcccccaaaattcagaataataacacacccgaccacaccgctaacaatcaatactaaacccccataaataggagaaggcttagaagaaaaccccacaaaccccattactaaacccacactcaacagaaacaaagcatacatcattattctcgcacggactacaaccacgaccaatgatatgaaaaaccatcgttgtatttcaactacaagaacaccaatgaccccaatacgcaaaattaaccccctaataaaattaattaaccactcactcatcgacctccccaccccatccaacatctccgcatgatgaaacttcggctcactccttggcgcctgcctaatcctccaaatcaccacaggactattcctagccatgcactactcaccagacgcctcaaccgccttttcatcaatcgcccacatcactcgagacgtaaattatggctgaatcatccgctaccttcacgccaatggcgcctcaatattctttatctgcctcttcctacacatcgggcgaggcctatattacggatcatttctctactcagaaacctgaaacatcggcattatcctcctgcttgcaactatagcaacagccttcataggctatgtcctcccgtgaggccaaatatcattctgaggggccacagtaattacaaacttactatccgccatcccatacattgggacagacctagttcaatgaatctgaggaggctactcagtagacagtcccaccctcacacgattctttacctttcacttcatcttgcccttcattattgcagccctagcagcactccacctcctattcttgcacgaaacgggatcaaacaaccccctaggaatcacctcccattccgataaaatcaccttccacccttactacacaatcaaagacgccctcggcttacttctcttccttctctccttaatgacattaacactattctcaccagacctcctaggcgacccagacaattataccctagccaaccccttaaacacccctccccacatcaagcccgaatgatatttcctattcgcctacacaattctccgatccgtccctaacaaactaggaggcgtccttgccctattactatccatcctcatcctagcaataatccccatcctccatatatccaaacaacaaagcataatatttcgcccactaagccaatcactttattgactcctagccgcagacctcctcattctaacctgaatcggaggacaaccagtaagctacccctttaccatcattggacaagtagcatccgtactatacttcacaacaatcctaatcctaataccaactatctccctaattgaaaacaaaatactcaaatgggcctgtccttgtagtataaactaatacaccagtcttgtaaaccggagatgaaaacctttttccaaggacaaatcagagaaaaagtctttaactccaccattagcacccaaagctaagattctaatttaaactattctctgttctttcatggggaagcagatttgggtaccacccaagtattgactcacccatcaacaaccgctatgtatttcgtacattactgccagccaccatgaatattgtacggtaccataaatacttgaccacctgtagtacataaaaacccaatccacatcaaaaccccctccccatgcttacaagcaagtacagcaatcaaccctcaactatcacacatcaactgcaactccaaagccacccctcacccactaggataccaacaaacctacccacccttaacagtacatagtacataaagccatttaccgtacatagcacattacagtcaaatcccttctcgtccccatggatgacccccctcagataggggtcccttgaccaccatcctccgtgaaatcaatatcccgcacaagagtgctactctcctcgctccgggcccataacacttgggggtagctaaagtgaactgtatccgacatctggttcctacttcagggtcataaagcctaaatagcccacacgttccccttaaataagacatcacgatg

SEQ ID NO: 472 - DNA, 16569 bp, Homo sapiens mitochondrial
  3107: "n" refers to a nucleotide at position 3107 of the Cambridge Reference Sequence (CRS, Anderson et al. 1981 Nature 290:457-465), later determined to be absent from the human mtDNA sequence according to the revised CRS (rCRS, Andrews et al. 1999 Nature Genetics 23:147); "n" therefore represents a single nucleotide deletion at a position corresponding to nucleotide 3107 of SEQ ID NO:1 as provided herein.
gatcacaggtctatcaccctattaaccactcacgggagctctccatgcatttggtattttcgtctggggggtatgcacgcgatagcattgcgagacgctggagccggagcaccctatgtcgcagtatctgtctttgattcctgcctcatcctattatttatcgcacctacgttcaatattacaggcgaacatacttactaaagtgtgttaattaattaatgcttgtaggacataataataacaattgaatgtctgcacagccactttccacacagacatcataacaaaaaatttccaccaaaccccccctcccccgcttctggccacagcacttaaacacatctctgccaaaccccaaaaacaaagaaccctaacaccagcctaaccagatttcaaattttatcttttggcggtatgcacttttaacagtcaccccccaactaacacattattttcccctcccactcccatactactaatctcatcaatacaacccccgcccatcctacccagcacacacacaccgctgctaaccccataccccgaaccaaccaaaccccaaagacaccccccacagtttatgtagcttacctcctcaaagcaatacactgaaaatgtttagacgggctcacatcaccccataaacaaataggtttggtcctagcctttctattagctcttagtaagattacacatgcaagcatccccgttccagtgagttcaccctctaaatcaccacgatcaaaagggacaagcatcaagcacgcagcaatgcagctcaaaacgcttagcctagccacacccccacgggaaacagcagtgattaacctttagcaataaacgaaagtttaactaagctatactaaccccagggttggtcaatttcgtgccagccaccgcggtcacacgattaacccaagtcaatagaagccggcgtaaagagtgttttagatcaccccctccccaataaagctaaaactcacctgagttgtaaaaaactccagttgatacaaaatagactacgaaagtggctttaacatatctgaacacacaatagctaagacccaaactgggattagataccccactatgcttagccctaaacctcaacagttaaatcaacaaaactgctcgccagaacactacgagccacagcttaaaactcaaaggacctggcggtgcttcatatccctctagaggagcctgttctgtaatcgataaaccccgatcaacctcaccacctcttgctcagcctatataccgccatcttcagcaaaccctgatgaaggctacaaagtaagcgcaagtacccacgtaaagacgttaggtcaaggtgtagcccatgaggtggcaagaaatgggctacattttctaccccagaaaactacgatagcccttatgaaacttaagggtcgaaggtggatttagcagtaaactgagagtagagtgcttagttgaacagggccctgaagcgcgtacacaccgcccgtcaccctcctcaagtatacttcaaaggacatttaactaaaacccctacgcatttatatagaggagacaagtcgtaacatggtaagtgtactggaaagtgcacttggacgaaccagagtgtagcttaacacaaagcacccaacttacacttaggagatttcaacttaacttgaccgctctgagctaaacctagccccaaacccactccaccttactaccagacaaccttagccaaaccatttacccaaataaagtataggcgatagaaattgaaacctggcgcaatagatatagtaccgcaagggaaagatgaaaaattataaccaagcataatatagcaaggactaacccctataccttctgcataatgaattaactagaaataactttgcaaggagagccaaagctaagacccccgaaaccagacgagctacctaagaacagctaaaagagcacacccgtctatgtagcaaaatagtgggaagatttataggtagaggcgacaaacctaccgagcctggtgatagctggttgtccaagatagaatcttagttcaactttaaatttgcccacagaaccctctaaatccccttgtaaatttaactgttagtccaaagaggaacagctctttggacactaggaaaaaaccttgtagagagagtaaaaaatttaacacccatagtaggcctaaaagcagccaccaattaagaaagcgttcaagctcaacacccactacctaaaaaatcccaaacatataactgaactcctcacacccaattggaccaatctatcaccctatagaagaactaatgttagtataagtaacatgaaaacattctcctccgcataagcctgcgtcagattaaaacactgaactgacaattaacagcccaatatctacaatcaaccaacaagtcattattaccctcactgtcaacccaacacaggcatgctcataaggaaaggttaaaaaaagtaaaaggaactcggcaaatcttaccccgcctgtttaccaaaaacatcacctctagcatcaccagtattagaggcaccgcctgcccagtgacacatgtttaacggccgcggtaccctaaccgtgcaaaggtagcataatcacttgttccttaaatagggacctgtatgaatggctccacgagggttcagctgtctcttacttttaaccagtgaaattgacctgcccgtgaagaggcgggcataacacagcaagacgagaagaccctatggagctttaatttattaatgcaaacagtacctaacaaacccacaggtcctaaactaccaaacctgcattaaaaatttcggttggggcgacctcggagcagaacccaacctccgagcagtacatgctaagacttcaccagtcaaagcgaactactatactcaattgatccaataacttgaccaacggaacaagttaccctagggataacagcgcaatcctattctagagtccatatcaacaatagggtttacgacctcgatgttggatcaggacatcccaatggtgcagccgctattaaaggttcgtttgttcaacgattaaagtcctacgtgatctgagttcagaccggagtaatccaggtcggtttctatctacnttcaaattcctccctgtacgaaaggacaagagaaataaggcctacttcacaaagcgccttcccccgtaaatgatatcatctcaacttagtattatacccacacccacccaagaacagggtttgttaagatggcagagcccggtaatcgcataaaacttaaaactttacagtcagaggttcaattcctcttcttaacaacatacccatggccaacctcctactcctcattgtacccattctaatcgcaatggcattcctaatgcttaccgaacgaaaaattctaggctatatacaactacgcaaaggccccaacgttgtaggcccctacgggctactacaacccttcgctgacgccataaaactcttcaccaaagagcccctaaaacccgccacatctaccatcaccctctacatcaccgccccgaccttagctctcaccatcgctcttctactatgaacccccctccccatacccaaccccctggtcaacctcaacctaggcctcctatttattctagccacctctagcctagccgtttactcaatcctctgatcagggtgagcatcaaactcaaactacgccctgatcggcgcactgcgagcagtagcccaaacaatctcatatgaagtcaccctagccatcattctactatcaacattactaataagtggctcctttaacctctccacccttatcacaacacaagaacacctctgattactcctgccatcatgacccttggccataatatgatttatctccacactagcagagaccaaccgaacccccttcgaccttgccgaaggggagtccgaactagtctcaggcttcaacatcgaatacgccgcaggccccttcgccctattcttcatagccgaatacacaaacattattataataaacaccctcaccactacaatcttcctaggaacaacatatgacgcactctcccctgaactctacacaacatattttgtcaccaagaccctacttctaacctccctgttcttatgaattcgaacagcatacccccgattccgctacgaccaactcatacacctcctatgaaaaaacttcctaccactcaccctagcattacttatatgatatgtctccatacccattacaatctccagcattccccctcaaacctaagaaatatgtctgataaaagagttactttgatagagtaaataataggagcttaaacccccttatttctaggactatgagaatcgaacccatccctgagaatccaaaattctccgtgccacctatcacaccccatcctaaagtaaggtcagctaaataagctatcgggcccataccccgaaaatgttggttatacccttcccgtactaattaatcccctggcccaacccgtcatctactctaccatctttgcaggcacactcatcacagcgctaagctcgcactgattttttacctgagtaggcctagaaataaacatgctagcttttattccagttctaaccaaaaaaataaaccctcgttccacagaagctgccatcaagtatttcctcacgcaagcaaccgcatccataatccttctaatagctatcctcttcaacaatatactctccggacaatgaaccataaccaatactaccaatcaatactcatcattaataatcataatggctatagcaataaaactaggaatagccccctttcacttctgagtcccagaggttacccaaggcacccctctgacatccggcctgcttctcctcacatgacaaaaactagcccccatctcaatcatataccaaatctctccctcactaaacgtaagccttctcctcactctctcaatcttatccatcatagcaggcagttgaggtggattaaaccaaacccagctacgcaaaatcttagcatactcctcaattacccacataggatgaataatagcagttctaccgtacaaccctaacataaccattcttaatttaactatttatattatcctaactactaccgcattcctactactcaacttaaactccagcaccacgaccctactactatctcgcacctgaaacaagctaacatgactaacacccttaattccatccaccctcctctccctaggaggcctgcccccactaaccggctttttgcccaaatgggccattatcgaagaattcacaaaaaacaatagcctcatcatccccaccatcatagccaccatcaccctccttaacctctacttctacctacgcctaatctactccacctcaatcacactactccccatatctaacaacgtaaaaataaaatgacagtttgaacatacaaaacccaccccattcctccccacactcatcgcccttaccacgctactcctacctatctccccttttatactaataatcttatagaaatttaggttaaatacagaccaagagccttcaaagccctcagtaagttgcaatacttaatttctgtaacagctaaggactgcaaaaccccactctgcatcaactgaacgcaaatcagccactttaattaagctaagcccttactagaccaatgggacttaaacccacaaacacttagttaacagctaagcaccctaatcaactggcttcaatctacttctcccgccgccgggaaaaaaggcgggagaagccccggcaggtttgaagctgcttcttcgaatttgcaattcaatatgaaaatcacctcggagctggtaaaaagaggcctaacccctgtctttagatttacagtccaatgcttcactcagccattttacctcacccccactgatgttcgccgaccgttgactattctctacaaaccacaaagacattggaacactatacctattattcggcgcatgagctggagtcctaggcacagctctaagcctccttattcgagccgagctgggccagccaggcaaccttctaggtaacgaccacatctacaacgttatcgtcacagcccatgcatttgtaataatcttcttcatagtaatacccatcataatcggaggctttggcaactgactagttcccctaataatcggtgcccccgatatggcgtttccccgcataaacaacataagcttctgactcttacctccctctctcctactcctgctcgcatctgctatagtggaggccggagcaggaacaggttgaacagtctaccctcccttagcagggaactactcccaccctggagcctccgtagacctaaccatcttctccttacacctagcaggtgtctcctctatcttaggggccatcaatttcatcacaacaattatcaatataaaaccccctgccataacccaataccaaacgcccctcttcgtctgatccgtcctaatcacagcagtcctacttctcctatctctcccagtcctagctgctggcatcactatactactaacagaccgcaacctcaacaccaccttcttcgaccccgccggaggaggagaccccattctataccaacacctattctgatttttcggtcaccctgaagtttatattcttatcctaccaggcttcggaataatctcccatattgtaacttactactccggaaaaaaagaaccatttggatacataggtatggtctgagctatgatatcaattggcttcctagggtttatcgtgtgagcacaccatatatttacagtaggaatagacgtagacacacgagcatatttcacctccgctaccataatcatcgctatccccaccggcgtcaaagtatttagctgactcgccacactccacggaagcaatatgaaatgatctgctgcagtgctctgagccctaggattcatctttcttttcaccgtaggtggcctgactggcattgtattagcaaactcatcactagacatcgtactacacgacacgtactacgttgtagcccacttccactatgtcctatcaataggagctgtatttgccatcataggaggcttcattcactgatttcccctattctcaggctacaccctagaccaaacctacgccaaaatccatttcactatcatattcatcggcgtaaatctaactttcttcccacaacactttctcggcctatccggaatgccccgacgttactcggactaccccgatgcatacaccacatgaaacatcctatcatctgtaggctcattcatttctctaacagcagtaatattaataattttcatgatttgagaagccttcgcttcgaagcgaaaagtcctaatagtagaagaaccctccataaacctggagtgactatatggatgccccccaccctaccacacattcgaagaacccgtatacataaaatctagacaaaaaaggaaggaatcgaaccccccaaagctggtttcaagccaaccccatggcctccatgactttttcaaaaaggtattagaaaaaccatttcataactttgtcaaagttaaattataggctaaatcctatatatcttaatggcacatgcagcgcaagtaggtctacaagacgctacttcccctatcatagaagagcttatcacctttcatgatcacgccctcataatcattttccttatctgcttcctagtcctgtatgcccttttcctaacactcacaacaaaactaactaatactaacatctcagacgctcaggaaatagaaaccgtctgaactatcctgcccgccatcatcctagtcctcatcgccctcccatccctacgcatcctttacataacagacgaggtcaacgatccctcccttaccatcaaatcaattggccaccaatggtactgaacctacgagtacaccgactacggcggactaatcttcaactcctacatacttcccccattattcctagaaccaggcgacctgcgactccttgacgttgacaatcgagtagtactcccgattgaagcccccattcgtataataattacatcacaagacgtcttgcactcatgagctgtccccacattaggcttaaaaacagatgcaattcccggacgtctaaaccaaaccactttcaccgctacacgaccgggggtatactacggtcaatgctctgaaatctgtggagcaaaccacagtttcatgcccatcgtcctagaattaattcccctaaaaatctttgaaatagggcccgtatttaccctatagcaccccctctaccccctctagagcccactgtaaagctaacttagcattaaccttttaagttaaagattaagagaaccaacacctctttacagtgaaatgccccaactaaatactaccgtatggcccaccataattacccccatactccttacactattcctcatcacccaactaaaaatattaaacacaaactaccacctacctccctcaccaaagcccataaaaataaaaaattataacaaaccctgagaaccaaaatgaacgaaaatctgttcgcttcattcattgcccccacaatcctaggcctacccgccgcagtactgatcattctatttccccctctattgatccccacctccaaatatctcatcaacaaccgactaatcaccacccaacaatgactaatcaaactaacctcaaaacaaatgataaccatacacaacactaaaggacgaacctgatctcttatactagtatccttaatcatttttattgccacaactaacctcctcggactcctgcctcactcatttacaccaaccacccaactatctataaacctagccatggccatccccttatgagcaggcgcagtgattataggctttcgctctaagattaaaaatgccctagcccacttcttaccacaaggcacacctacaccccttatccccatactagttattatcgaaaccatcagcctactcattcaaccaatagccctggccgtacgcctaaccgctaacattactgcaggccacctactcatgcacctaattggaagcgccaccctagcaatatcaaccattaaccttccctctacacttatcatcttcacaattctaattctactgactatcctagaaatcgctgtcgccttaatccaagcctacgttttcacacttctagtaagcctctacctgcacgacaacacataatgacccaccaatcacatgcctatcatatagtaaaacccagcccatgacccctaacaggggccctctcagccctcctaatgacctccggcctagccatgtgatttcacttccactccataacgctcctcatactaggcctactaaccaacacactaaccatataccaatgatggcgcgatgtaacacgagaaagcacataccaaggccaccacacaccacctgtccaaaaaggccttcgatacgggataatcctatttattacctcagaagtttttttcttcgcaggatttttctgagccttttaccactccagcctagcccctaccccccaattaggagggcactggcccccaacaggcatcaccccgctaaatcccctagaagtcccactcctaaacacatccgtattactcgcatcaggagtatcaatcacctgagctcaccatagtctaatagaaaacaaccgaaaccaaataattcaagcactgcttattacaattttactgggtctctattttaccctcctacaagcctcagagtacttcgagtctcccttcaccatttccgacggcatctacggctcaacattttttgtagccacaggcttccacggacttcacgtcattattggctcaactttcctcactatctgcttcatccgccaactaatatttcactttacatccaaacatcactttggcttcgaagccgccgcctgatactggcattttgtagatgtgatttgactatttctgtatgtctccatctattgatgagggtcttactcttttagtataaatagtaccgttaacttccaattaactagttttgacaacattcaaaaaagagtaataaacttcgccttaattttaataatcaacaccctcctagccttactactaataattattacattttgactaccacaactcaacggctacatagaaaaatccaccccttacgagtgcggcttcgaccctatatcccccgcccgcgtccctttctccataaaattcttcttagtagctattaccttcttattatttgatctagaaattgccctccttttacccctaccatgagccctacaaacaactaacctgccactaatagttatgtcatccctcttattaatcatcatcctagccctaagtctggcctatgagtgactacaaaaaggattagactgaaccgaattggtatatagtttaaacaaaacgaatgatttcgactcattaaattatgataatcatatttaccaaatgcccctcatttacataaatattatactagcatttaccatctcacttctaggaatactagtatatcgctcacacctcatatcctccctactatgcctagaaggaataatactatcgctgttcattatagctactctcataaccctcaacacccactccctcttagccaatattgtgcctattgccatactagtctttgccgcctgcgaagcagcggtgggcctagccctactagtctcaatctccaacacatatggcctagactacgtacataacctaaacctactccaatgctaaaactaatcgtcccaacaattatattactaccactgacatgactttccaaaaaacacataatttgaatcaacacaaccacccacagcctaattattagcatcatccctctactattttttaaccaaatcaacaacaacctatttagctgttccccaaccttttcctccgaccccctaacaacccccctcctaatactaactacctgactcctacccctcacaatcatggcaagccaacgccacttatccagtgaaccactatcacgaaaaaaactctacctctctatactaatctccctacaaatctccttaattataacattcacagccacagaactaatcatattttatatcttcttcgaaaccacacttatccccaccttggctatcatcacccgatgaggcaaccagccagaacgcctgaacgcaggcacatacttcctattctacaccctagtaggctcccttcccctactcatcgcactaatttacactcacaacaccctaggctcactaaacattctactactcactctcactgcccaagaactatcaaactcctgagccaacaacttaatatgactagcttacacaatagcttttatagtaaagatacctctttacggactccacttatgactccctaaagcccatgtcgaagcccccatcgctgggtcaatagtacttgccgcagtactcttaaaactaggcggctatggtataatacgcctcacactcattctcaaccccctgacaaaacacatagcctaccccttccttgtactatccctatgaggcataattataacaagctccatctgcctacgacaaacagacctaaaatcgctcattgcatactcttcaatcagccacatagccctcgtagtaacagccattctcatccaaaccccctgaagcttcaccggcgcagtcattctcataatcgcccacgggcttacatcctcattactattctgcctagcaaactcaaactacgaacgcactcacagtcgcatcataatcctctctcaaggacttcaaactctactcccactaatagctttttgatgacttctagcaagcctcgctaacctcgccttaccccccactattaacctactgggagaactctctgtgctagtaaccacgttctcctgatcaaatatcactctcctacttacaggactcaacatactagtcacagccctatactccctctacatatttaccacaacacaatggggctcactcacccaccacattaacaacataaaaccctcattcacacgagaaaacaccctcatgttcatacacctatcccccattctcctcctatccctcaaccccgacatcattaccgggttttcctcttgtaaatatagtttaaccaaaacatcagattgtgaatctgacaacagaggcttacgaccccttatttaccgagaaagctcacaagaactgctaactcatgcccccatgtctaacaacatggctttctcaacttttaaaggataacagctatccattggtcttaggccccaaaaattttggtgcaactccaaataaaagtaataaccatgcacactactataaccaccctaaccctgacttccctaattccccccatccttaccaccctcgttaaccctaacaaaaaaaactcatacccccattatgtaaaatccattgtcgcatccacctttattatcagtctcttccccacaacaatattcatgtgcctagaccaagaagttattatctcgaactgacactgagccacaacccaaacaacccagctctccctaagcttcaaactagactacttctccataatattcatccctgtagcattgttcgttacatggtccatcatagaattctcactgtgatatataaactcagacccaaacattaatcagttcttcaaatatctactcatcttcctaattaccatactaatcttagttaccgctaacaacctattccaactgttcatcggctgagagggcgtaggaattatatccttcttgctcatcagttgatgatacgcccgagcagatgccaacacagcagccattcaagcaatcctatacaaccgtatcggcgatatcggtttcatcctcgccttagcatgatttatcctacactccaactcatgagacccacaacaaatagcccttctaaacgctaatccaagcctcaccccactactaggcctcctcctagcagcagcaggcaaatcagcccaattaggtctccacccctgactcccctcagccatagaaggccccaccccagtctcagccctactccactcaagcactatagttgtagcaggaatcttcttactcatccgcttccaccccctagcagaaaatagcccactaatccaaactctaacactatgcttaggcgctatcaccactctgttcgcagcagtctgcgcccttacacaaaatgacatcaaaaaaatcgtagccttctccacttcaagtcaactaggactcataatagttacaatcggcatcaaccaaccacacctagcattcctgcacatctgtacccacgccttcttcaaagccatactatttatgtgctccgggtccatcatccacaaccttaacaatgaacaagatattcgaaaaataggaggactactcaaaaccatacctctcacttcaacctccctcaccattggcagcctagcattagcaggaatacctttcctcacaggtttctactccaaagaccacatcatcgaaaccgcaaacatatcatacacaaacgcctgagccctatctattactctcatcgctacctccctgacaagcgcctatagcactcgaataattcttctcaccctaacaggtcaacctcgcttccccacccttactaacattaacgaaaataaccccaccctactaaaccccattaaacgcctggcagccggaagcctattcgcaggatttctcattactaacaacatttcccccgcatcccccttccaaacaacaatccccctctacctaaaactcacagccctcgctgtcactttcctaggacttctaacagccctagacctcaactacctaaccaacaaacttaaaataaaatccccactatgcacattttatttctccaacatactcggattctaccctagcatcacacaccgcacaatcccctatctaggccttcttacgagccaaaacctgcccctactcctcctagacctaacctgactagaaaagctattacctaaaacaatttcacagcaccaaatctccacctccatcatcacctcaacccaaaaaggcataattaaactttacttcctctctttcttcttcccactcatcctaaccctactcctaatcacataacctattcccccgagcaatctcaattacaatatatacaccaacaaacaatgttcaaccagtaactactactaatcaacgcccataatcatacaaagcccccgcaccaataagatcctcccgaatcaaccctgacccctctccttcataaattattcagcttcctacactattaaagtttaccacaaccaccaccccatcatactctttcacccacagcaccaatcctacctccatcgctaaccccactaaaacactcaccaagacctcaacccctgacccccatgcctcaggatactcctcaatagccatcgctgtagtatatccaaagacaaccatcattccccctaaataaattaaaaaaactattaaacccatataacctcccccaaaattcagaataataacacacccgaccacaccgctaacaatcaatactaaacccccataaataggagaaggcttagaagaaaaccccacaaaccccattactaaacccacactcaacagaaacaaagcatacatcattattctcgcacggactacaaccacgaccaatgatatgaaaaaccatcgttgtatttcaactacaagaacaccaatgaccccaatacgcaaaactaaccccctaataaaattaattaaccactcattcatcgacctccccaccccatccaacatctccgcatgatgaaacttcggctcactccttggcgcctgcctgatcctccaaatcaccacaggactattcctagccatgcactactcaccagacgcctcaaccgccttttcatcaatcgcccacatcactcgagacgtaaattatggctgaatcatccgctaccttcacgccaatggcgcctcaatattctttatctgcctcttcctacacatcgggcgaggcctatattacggatcatttctctactcagaaacctgaaacatcggcattatcctcctgcttgcaactatagcaacagccttcataggctatgtcctcccgtgaggccaaatatcattctgaggggccacagtaattacaaacttactatccgccatcccatacattgggacagacctagttcaatgaatctgaggaggctactcagtagacagtcccaccctcacacgattctttacctttcacttcatcttgcccttcattattgcagccctagcagcactccacctcctattcttgcacgaaacgggatcaaacaaccccctaggaatcacctcccattccgataaaatcaccttccacccttactacacaatcaaagacgccctcggcttacttctcttccttctctccttaatgacattaacactattctcaccagacctcctaggcgacccagacaattataccctagccaaccccttaaacacccctccccacatcaagcccgaatgatatttcctattcgcctacacaattctccgatccgtccctaacaaactaggaggcgtccttgccctattactatccatcctcatcctagcaataatccccatcctccatatatccaaacaacaaagcataatatttcgcccactaagccaatcactttattgactcctagccgcagacctcctcattctaacctgaatcggaggacaaccagtaagctacccttttaccatcattggacaagtagcatccgtactatacttcacaacaatcctaatcctaataccaactatctccctaattgaaaacaaaatactcaaatgggcctgtccttgtagtataaactaatacaccagtcttgtaaaccggagatgaaaacctttttccaaggacaaatcagagaaaaagtctttaactccaccattagcacccaaagctaagattctaatttaaactattctctgttctttcatggggaagcagatttgggtaccacccaagtattgactcacccatcaacaaccgctatgtatttcgtacattactgccagccaccatgaatattgtacggtaccataaatacttgaccacctgtagtacataaaaacccaatccacatcaaaaccccctccccatgcttacaagcaagtacagcaatcaaccctcaactatcacacatcaactgcaactccaaagccacccctcacccactaggataccaacaaacctacccacccttaacagtacatagtacataaagccatttaccgtacatagcacattacagtcaaatcccttctcgtccccatggatgacccccctcagataggggtcccttgaccaccatcctccgtgaaatcaatatcccgcacaagagtgctactctcctcgctccgggcccataacacttgggggtagctaaagtgaactgtatccgacatctggttcctacttcagggtcataaagcctaaatagcccacacgttccccttaaataagacatcacgatg

SEQ ID NO: 473 - DNA, 16569 bp, Homo sapiens mitochondrial
  3107: "n" refers to a nucleotide at position 3107 of the Cambridge Reference Sequence (CRS, Anderson et al. 1981 Nature 290:457-465), later determined to be absent from the human mtDNA sequence according to the revised CRS (rCRS, Andrews et al. 1999 Nature Genetics 23:147); "n" therefore represents a single nucleotide deletion at a position corresponding to nucleotide 3107 of SEQ ID NO:1 as provided herein.
gatcacaggtctatcaccctattaaccactcacgggagctctccatgcatttggtattttcgtctggggggtatgcacgcgatagcattgcgagacgctggagccggagcaccctatgtcgcagtatctgtctttgattcctgcctcatcctattatttatcgcacctacgttcaatattacaggcgaacatacttactaaagtgtgttaattaattaatgcttgtaggacataataataacaattgaatgtctgcacagccactttccacacagacatcataacaaaaaatttccaccaaaccccccctcccccgcttctggccacagcacttaaacacatctctgccaaaccccaaaaacaaagaaccctaacaccagcctaaccagatttcaaattttatcttttggcggtatgcacttttaacagtcaccccccaactaacacattattttcccctcccactcccatactactaatctcatcaatacaacccccgcccatcctacccagcacacacacaccgctgctaaccccataccccgaaccaaccaaaccccaaagacaccccccacagtttatgtagcttacctcctcaaagcaatacactgaaaatgtttagacgggctcacatcaccccataaacaaataggtttggtcctagcctttctattagctcttagtaagattacacatgcaagcatccccgttccagtgagttcaccctctaaatcaccacgatcaaaagggacaagcatcaagcacgcagcaatgcagctcaaaacgcttagcctagccacacccccacgggaaacagcagtgattaacctttagcaataaacgaaagtttaactaagctatactaaccccagggttggtcaatttcgtgccagccaccgcggtcacacgattaacccaagtcaatagaagccggcgtaaagagtgttttagatcaccccctccccaataaagctaaaactcacctgagttgtaaaaaactccagttgacacaaaatagactacgaaagtggctttaacatatctgaacacacaatagctaagacccaaactgggattagataccccactatgcttagccctaaacctcaacagttaaatcaacaaaactgctcgccagaacactacgagccacagcttaaaactcaaaggacctggcggtgcttcatatccctctagaggagcctgttctgtaatcgataaaccccgatcaacctcaccacctcttgctcagcctatataccgccatcttcagcaaaccctgatgaaggctacaaagtaagcgcaagtacccacgtaaagacgttaggtcaaggtgtagcccatgaggtggcaagaaatgggctacattttctaccccagaaaactacgatagcccttatgaaacttaagggtcgaaggtggatttagcagtaaactgagagtagagtgcttagttgaacagggccctgaagcgcgtacacaccgcccgtcaccctcctcaagtatacttcaaaggacatttaactaaaacccctacgcatttatatagaggagacaagtcgtaacatggtaagtgtactggaaagtgcacttggacgaaccagagtgtagcttaacacaaagcacccaacttacacttaggagatttcaacttaacttgaccgctctgagctaaacctagccccaaacccactccaccttactaccagacaaccttagccaaaccatttacccaaataaagtataggcgatagaaattgaaacctggcgcaatagatatagtaccgcaagggaaagatgaaaaattatagccaagcataatatagcaaggactaacccctataccttctgcataatgaattaactagaaataactttgcaaggagagccaaagctaagacccccgaaaccagacgagctacctaagaacagctaaaagagcacacccgtctatgtagcaaaatagtgggaagatttataggtagaggcgacaaacctaccgagcctggtgatagctggttgtccaagatagaatcttagttcaactttaaatttgcccacagaaccctctaaatccccttgtaaatttaactgttagtccaaagaggaacagctctttggacactaggaaaaaaccttgtagagagagtaaaaaatttaacacccatagtaggcctaaaagcagccaccaattaagaaagcgttcaagctcaacacccactacctaaaaaatcccaaacatataactgaactcctcacacccaattggaccaatctatcaccctatagaagaactaatgttagtataagtaacatgaaaacattctcctccgcataagcctgcgtcagattaaaacactgaactgacaattaacagcccaatatctacaatcaaccaacaagtcattattaccctcactgtcaacccaacacaggcatgctcataaggaaaggttaaaaaaagtaaaaggaactcggcaaatcttaccccgcctgtttaccaaaaacatcacctctagcatcaccagtattagaggcaccgcctgcccagtgacacatgtttaacggccgcggtaccctaaccgtgcaaaggtagcataatcacttgttccttaaatagggacctgtatgaatggctccacgagggttcagctgtctcttacttttaaccagtgaaattgacctgcccgtgaagaggcgggcatgacacagcaagacgagaagaccctatggagctttaatttattaatgcaaacagtacctaacaaacccacaggtcctaaactaccaaacctgcattaaaaatttcggttggggcgacctcggagcagaacccaacctccgagcagtacatgctaagacttcaccagtcaaagcgaactactatactcaattgatccaataacttgaccaacggaacaagttaccctagggataacagcgcaatcctattctagagtccatatcaacaatagggtttacgacctcgatgttggatcaggacatcccgatggtgcagccgctattaaaggttcgtttgttcaacgattaaagtcctacgtgatctgagttcagaccggagtaatccaggtcggtttctatctacnttcaaattcctccctgtacgaaaggacaagagaaataaggcctacttcacaaagcgccttcccccgtaaatgatatcatctcaacttagtattatacccacacccacccaagaacagggtttgttaagatggcagagcccggtaatcgcataaaacttaaaactttacagtcagaggttcaattcctcttcttaacaacatacccatggccaacctcctactcctcattgtacccattctaatcgcaatggcattcctaatgcttaccgaacgaaaaattctaggctatatacaactacgcaaaggccccaacgttgtaggcccctacgggctactacaacccttcgctgacgccataaaactcttcaccaaagagcccctaaaacccgccacatctaccatcaccctctacatcaccgccccgaccttagctctcaccatcgctcttctactatgaacccccctccccatacccaaccccctggtcaacctcaacctaggcctcctatttattctagccacctctagcctagccgtttactcaatcctctgatcagggtgagcatcaaactcaaactacgccctgatcggcgcactgcgagcagtagcccagacaatctcatatgaagtcaccctagccatcattctactatcaacattactaataagtggctcctttaacctctccacccttatcacaacacaagaacacctctgattactcctgccatcatgacccttagccataatatgatttatctccacactagcagagaccaaccgaacccccttcgaccttgccgaaggggagtccgaactagtctcaggcttcaacatcgaatacgccgcaggccccttcgccctattcttcatagccgaatacacaaacattattataataaacaccctcaccactacaatcttcctaggaacaacatatgacgcactctcccctgaactctacacaacatattttgtcaccaagaccctacttctaacctccctgttcttatgaattcgaacagcatacccccgattccgctacgaccaactcatacacctcctatgaaaaaacttcctaccactcaccctagcattacttatatgatatgtctccatacccattacaatctccagcattccccctcaaacctaagaaatatgtctgataaaagagttactttgatagagtaaataataggagcttaaacccccttatttctaggactatgagaatcgaacccatccctgagaatccaaaattctccgtgccacctatcacaccccatcctaaagtaaggtcagctaaataagctatcgggcccataccccgaaaatgttggttatacccttcccgtactaattaatcccctggcccaacccgtcatctactctaccatctttgcaggcacactcatcacagcgctaagctcgcactgatttttcacctgagtaggcctagaaataaacatgctagcttttattccagttctaaccaaaaaaataaaccctcgttccacagaagctgccatcaagtatttcctcacgcaagcaaccgcatccataatccttctaatagctatcctcttcaacaatatactctccggacaatgaaccataaccaataccaccaatcaatactcatcattaataatcataatggctatagcaataaaactaggaatagccccctttcacttctgagtcccagaggttacccaaggcacccctctgacatccggcctgcttcttctcacatgacaaaaactagcccccatctcaatcatataccaaatctctccctcactaaacgtaagccttctcctcactctctcaatcttatccatcatagcaggcagttgaggtggattaaaccaaacccagctacgcaaaatcttagcatactcctcaattacccacataggatgaataatagcagttctaccgtacaaccctaacataaccattcttaatttaactatttatattatcctaactactaccgcattcctactactcaacttaaactccagcaccacgaccctactactatctcgcacctgaaacaagctaacatgactaacacccttaattccatccaccctcctctccctaggaggcctgcccccgctaaccggctttttgcccaaatgggccattatcgaagaattcacaaaaaacaatagcctcatcatccccaccatcatagccaccatcaccctccttaacctctacttctacctacgcctaatctactccacctcaatcacactactccccatgtctaacaacgtaaaaataaaatgacagtttgaacacacaaaacccaccccattcctccccacactcatcgcccttaccacgctactcctacctatctccccttttatactaataatcttatagaaatttaggttaaatacagaccaagagccttcaaagccctcagtaagttgcaatacttaatttctgtaacagctaaggactgcaaaaccccactctgcatcaactgaacgcaaatcagccactttaattaagctaagcccttactagaccaatgggacttaaacccacaaacacttagttaacagctaagcaccctaatcaactggcttcaatctacttctcccgccgccgggaaaaaaggcgggagaagccccggcaggtttgaagctgcttcttcgaatttgcaattcaatatgaaaatcacctcggagctggtaaaaagaggcctaacccctgtctttagatttacagtccaatgcttcactcagccattttacctcacccccactgatgttcgccgaccgttgactattctctacaaaccacaaagacattggaacactatacctattattcggcgcatgagctggagtcctaggcacagctctaagcctccttattcgagccgagctgggccagccaggcaaccttttaggtaacgaccacatctacaacgttatcgtcacagcccatgcatttgtaataatcttcttcatagtaatacccatcataatcggaggctttggcaactgactagtccccctaataatcggtgcccccgatatggcgtttccccgcataaacaacataagcttctgactcttacctccctctctcctactcctgctcgcatctgctatagtggaggccggagcaggaacaggttgaacagtctaccctcccttagcagggaactactcccaccctggagcctccgtagacctaaccatcttctccttacacctagcaggtgtctcctctatcttaggggccatcaatttcatcacaacaattatcaatataaaaccccctgccataacccaataccaaacgcccctcttcgtctgatccgtcctaatcacagcagtcctacttctcctatctctcccagtcctagctgctggcatcactatactactaacagaccgcaacctcaacaccaccttcttcgaccccgccggaggaggagaccccattctataccaacacctattctgatttttcggtcaccctgaagtttatattcttatcctaccaggcttcggaataatctcccatattgtaacttactactccggaaaaaaagaaccatttggatacataggtatggtctgagctatgatatcaattggcttcctagggtttatcgtgtgagcacaccatatatttacagtaggaatagacgtagacacacgagcatatttcacctccgctaccataatcatcgctatccccaccggcgtcaaagtatttagctgactcgccacactccacggaagcaatatgaaatgatctgctgcagtgctctgagccctaggattcatctttcttttcaccgtaggtggcctgactggcattgtattagcaaactcatcactagacatcgtactacacgacacgtactacgttgtagctcacttccactatgtcctatcaataggagctgtatttgccatcataggaggcttcattcactgatttcccctattctcaggctacaccctagaccaaacctacgccaaaatccatttcactatcatattcatcggcgtaaatctaactttcttcccacaacactttctcggcctatccggaatgccccgacgttactcggactaccccgatgcatacaccacatgaaacatcctatcatctgtaggctcattcatttctctaacagcagtaatattaataattttcatgatttgagaagccttcgcttcgaagcgaaaagtcctaatagtagaagaaccctccataaacctggagtgactatatggatgccccccaccctaccacacattcgaagaacccgtatacataaaatctagacaaaaaaggaaggaatcgaaccccccaaagctggtttcaagccaaccccatggcctccatgactttttcaaaaaggtattagaaaaaccatttcataactttgtcaaagttaaattataggctaaatcctatatatcttaatggcacatgcagcgcaagtaggtctacaagacgctacttcccctatcatagaagagcttatcacctttcatgatcacgccctcataatcattttccttatctgcttcctagtcctgtatgcccttttcctaacactcacaacaaaactaactaatactaacatctcagacgctcaggaaatagaaaccgtctgaactatcctgcccgccatcatcctagtcctcatcgccctcccatccctacgcatcctttacataacagacgaggtcaacgatccctcccttaccatcaaatcaattggccaccaatggtactgaacctacgagtacaccgactacggcggactaatcttcaactcctacatacttcccccattattcctagaaccaggcgacctgcgactccttgacgttgacaatcgagtagtactcccgattgaagcccccattcgtataataattacatcacaagacgtcttgcactcatgagctgtccccacattaggcttaaaaacagatgcaattcccggacgtctaaaccaaaccactttcaccgctacacgaccgggggtatactacggtcaatgctctgaaatctgtggagcaaaccacagtttcatgcccatcgtcctagaattaattcccctaaaaatctttgaaatagggcccgtatttaccctatagcaccccctctaccccctctagagcccactgtaaagctaacttagcattaaccttttaagttaaagattaagagaaccaacacctctttacagtgaaatgccccaactaaatactaccgtatggcccaccataattacccccatactccttacactattcctcatcacccaactaaaaatattaaacacaaactaccacctacccccctcaccaaagcccataaaaataaaaaattataacaaaccctgagaaccaaaatgaacgaaaatctgttcgcttcattcattgcccccacaatcctaggcctacccgccgcagtactgatcattctatttccccctctattgatccccacctccaaatatctcatcaacaaccgactaatcaccacccaacaatgactaatcaaactaacctcaaaacaaatgataaccatacacaacactaaaggacgaacctgatctcttatactagtatccttaatcatttttattgccacaactaacctcctcggactcctgcctcactcatttacaccaaccacccaactatctataaacctagccatggccatccccttatgagcgggcgcagtgattataggctttcgctctaagattaaaaatgccctagcccacttcttaccacaaggcacacctacaccccttatccccatactagttattatcgaaaccatcagcctactcattcaaccaatagccctggccgtacgcctaaccgctaacattactgcaggccacctactcatgcacctaattggaagcgccaccctagcaatatcaaccattaaccttccctctacacttatcatcttcacaattctaattctactgactatcctagaaatcgctgtcgccttaatccaagcctacgttttcacacttctagtaagcctctacctgcacgacaacacataatgacccaccaatcacatgcctatcatatagtaaaacccagcccatgacccctaacaggggccctctcagccctcctaatgacctccggcctagccatgtgatttcacttccactccataacgctcctcatactaggcctactaaccaacacactaaccatataccaatgatggcgcgatgtaacacgagaaagcacataccaaggccaccacacaccacctgtccaaaaaggccttcgatacgggataatcctatttattacctcagaagtttttttcttcgcaggatttttctgagccttttaccactccagcctagcccctaccccccaattaggagggcactggcccccaacaggcatcaccccgctaaatcccctagaagtcccactcctaaacacatccgtattactcgcatcaggagtatcaatcacctgagctcaccatagtctaatagaaaacaaccgaaaccaaataattcaagcactgcttattacaattttactgggtctctattttaccctcctacaagcctcagagtacttcgagtctcccttcaccatttccgacggcatctacggctcaacattttttgtagccacaggcttccacggacttcacgtcattattggctcaactttcctcactatctgcttcatccgccaactaatatttcactttacatccaaacatcactttggcttcgaagccgccgcctgatactggcattttgtagatgtggtttgactatttctgtatgtctccatctattgatgagggtcttactcttttagtataaatagtaccgttaacttccaattaactagttttgacaacattcaaaaaagagtaataaacttcgccttaattttaataatcaacaccctcctagccttactactaataattattacattttgactaccacaactcaacggctacatagaaaaatccaccccttacgagtgcggcttcgaccctatatcccccgcccgcgtccctttctccataaaattcttcttagtagctattaccttcttattatttgatctagaaattgccctccttttacccctaccatgagccctacaaacaactaacctgccactaatagttatgtcatccctcttattaatcatcatcctagccctaagtctggcctatgagtgactacaaaaaggattagactgaaccgaattggtatatagtttaaacaaaacgaatgatttcgactcattaaattatgataatcatatttaccaaatgcccctcatttacataaatattatactagcatttaccatctcacttctaggaatactagtatatcgctcacacctcatatcctccctactatgcctagaaggaataatactatcgctgttcattatagctactctcataaccctcaacacccactccctcttagccaatattgtgcctattgccatactagtctttgccgcctgcgaagcagcggtgggcctagccctactagtctcaatctccaacacatatggcctagactacgtacataacctaaacctactccaatgctaaaactaatcgtcccaacaattatattactaccactgacatgactttccaaaaaacacataatttgaatcaacacaaccacccacagcctaattattagcatcatccctctgctattttttaaccaaatcaacaacaacctatttagctgttccccaaccttttcctccgaccccctaacaacccccctcctaatactaactacctgactcctacccctcacaatcatggcaagccaacgccacttatccagtgaaccactatcacgaaaaaaactctacctctctatactaatctccctacaaatctccttaattataacattcacagccacagaactaatcatattttatatcttcttcgaaaccacacttatccccaccttggctatcatcacccgatgaggcaaccagccagaacgcctgaacgcaggcacatacttcctattctacaccctagtaggctcccttcccctactcatcgcactaatttacactcacaacaccctaggctcactaaacattctactactcactctcactgcccaagaactatcaaactcctgagccaacaacttaatatgactagcttacacaatagcttttatagtaaagatacctctttacggactccacttatgactccctaaagcccatgtcgaagcccccatcgctgggtcaatagtacttgccgcagtactcttgaaactaggcggctatggtataatacgcctcacactcattctcaaccccctgacaaaacacatagcctaccccttccttgtactatccctatgaggcataattataacaagctccatctgcctacgacaaacagacctaaaatcgctcattgcatactcttcaatcagccacatagccctcgtagtaacagccattctcatccaaaccccctgaagcttcaccggcgcagtcattctcataatcgcccacggacttacatcctcattactattctgcctagcaaactcaaactacgaacgcactcacagtcgcatcataatcctctctcaaggacttcaaactctactcccactaatagctttttgatgacttctagcaagcctcgctaacctcgccttaccccccactattaacctactgggagaactctctgtgctagtaaccacgttctcctgatcaaatatcactctcctacttacaggactcaacatactagtcacagccctatactccctctacatatttaccacaacacaatggggctcactcacccaccacattaacaacataaaaccctcattcacacgagaaaacaccctcatgttcatacacctatcccccattctcctcctatccctcaaccccgacatcattaccgggttttcctcttgtaaatatagtttaaccaaaacatcagattgtgaatctgacaacagaggcttacgaccccttatttaccgagaaagctcacaagaactgctaactcatgcccccatgtctaacaacatggctttctcaacttttaaaggataacagctatccattggtcttaggccccaagaattttggtgcaactccaaataaaagtaataaccatgcacactactataaccaccctaaccctaacttccctaattccccccatccttaccaccctcgttaaccctaacaaaaaaaactcatacccccattatgtaaaatccattgtcgcatccacctttattatcagtctcttccccacaacaatattcatgtgcctagaccaagaagttattatctcgaactgacactgagccacaacccaaacaatccagctctccctaagcttcaaactagactacttctccataatattcatccctgtagcattgttcgttacatggtccatcatagaattctcactgtgatatataaactcagacccaaacattaatcagttcttcaaatatctactcatcttcctaattaccatactaatcttagttaccgctaacaacctattccaactgttcatcggctgagagggcgtaggaattatatccttcttgctcatcagttgatgatacgcccgagcagatgccaacacagcagccattcaagcaatcctatacaaccgtatcggcgatatcggtttcatcctcgccttagcatgatttatcctacactccaactcatgagacccacaacaaatagcccttctaaacgctaatccaagcctcaccccactactaggcctcctcctagcagcagcaggcaaatcagcccaattaggcctccacccctgactcccctcagccatagaaggccccaccccagtctcagccctactccactcaagcactatagttgtagcaggaatcttcttactcatccgcttccaccccctagcagaaaatagcccactaatccaaactctaacactatgcttaggcgctatcaccactctgttcgcagcagtctgcgcccttacacaaaatgacatcaaaaaaatcgtagccttctccacttcaagtcaactaggactcataatagttacaatcggcatcaaccaaccacacctagcattcctgcacatctgtacccacgccttcttcaaagccatactatttatgtgctccgggtccatcatccacaaccttaacaatgaacaagatattcgaaaaataggaggactactcaaaaccatacctctcacttcaacctccctcaccattggcagcctagcattagcaggaatacctttcctcacaggtttctactccaaagaccacatcatcgaaaccgcaaacatatcatacacaaacgcctgagccctatctattactctcatcgctacctccctgacaagcgcctatagcactcgaataattcttctcaccctaacaggtcaacctcgcttccccacccttactaacattaacgaaaataaccccaccctactaaaccccattaaacgcctggcagccggaagcctattcgcaggattcctcattactaacaacatttcccccgcatcccccttccaaacaacaatccccctctacctaaaactcacagccctcgctgtcactttcctaggacttctaacagccctagacctcaactacctaaccaacaaacttaaaataaaatccccactatgcacattttatttctccaacatactcggattctaccctagcatcacacaccgcacaatcccctatctaggccttcttacgagccaaaacctgcccctactcctcctagacctaacctgactagaaaagctattacctaaaacaatttcacagcaccaaatctccacctccatcatcacctcaacccaaaaaggcataattaaactttacttcctctctttcttcttcccactcatcctaaccctactcctaatcacataacctattcccccgagcaatctcaattacaatatatacaccaacaaacaatgttcaaccagtaactactactaatcaacgcccataatcatacaaagcccccgcaccaataggatcctcccgaatcaaccctgacccctctccttcataaattattcagcttcctacactattaaagtttaccacaaccaccaccccatcatactctttcacccacagcaccaatcctacctccatcgctaaccccactaaaacactcaccaagacctcaacccctgacccccatgcctcaggatactcctcaatagccatcgctgtagtatatccaaagacaaccatcattccccctaaataaattaaaaaaactattaaacccatataacctcccccaaaattcagaataataacacacccgaccacaccgctaacaatcaatactaaacccccataaataggagaaggcttagaagaaaaccccacaaaccccattactaaacccacactcaacagaaacaaagcatacatcattattctcgcacggactacaaccacgaccaatgatatgaaaaaccatcgttgtatttcaactacaagaacaccaatgaccccaatacgcaaaattaaccccctaataaaattaattaaccactcattcatcgacctccccaccccatccaacatctccgcatgatgaaacttcggctcactccttggcgcctgcctgatcctccaaatcaccacaggactattcctagccatgcactactcaccagacgcctcaaccgccttttcatcaatcgcccacatcactcgagacgtaaattatggctgaatcatccgctaccttcacgccaatggcgcctcaatattctttatctgcctcttcctacacatcgggcgaggcctatattacggatcatttctctactcagaaacctgaaacatcggcattatcctcctgcttgcaactatagcaacagccttcataggctatgtcctcccgtgaggccaaatatcattctgaggggccacagtaattacaaacttactatccgccatcccatacattgggacagacctagttcaatgaatctgaggaggctactcagtagacagtcccaccctcacacgattctttacctttcacttcatcttgcccttcattattgcagccctagcagcactccacctcctattcttgcacgaaacgggatcaaacaaccccctaggaatcacctcccattccgataaaatcaccttccacccttactacacaatcaaagacgccctcggcttacttctcttccttctctccttaatgacattaacactattctcaccagacctcctaggcgacccagacaattataccctagccaaccccttaaacacccctccccacatcaagcccgaatgatatttcctattcgcctacacaattctccgatccgtccctaacaaactaggaggcgtccttgccctattactatccatcctcatcctagcaataatccccatcctccatatatccaaacaacaaagcataatatttcgcccactaagccaatcactttattgactcctagccgcagacctcctcattctaacctgaatcggaggacaaccagtaagctacccttttaccatcattggacaagtagcatccgtactatacttcacaacaatcctaatcctaataccaactatctccctaattgaaaacaaaatactcaaatgggcctgtccttgtagtataaactagtacaccagtcttgtaaaccggagatgaaaacctttttccaaggacaaatcagagaaaaagtctttaactccaccattagcacccaaagctaagattctaatttaaactattctctgttctttcatggggaagcagatttgggtaccacccaagtattgactcacccatcaacaaccgctatgtatttcgtacattactgccagccaccatgaatattgtacggtaccataaatacttgaccacctgtagtacataaaaacccaatccacatcaaaaccccctccccatgcttacaagcaagtacagcaatcaaccctcaactatcacacatcaactgcaactccaaagccacccctcacccactaggataccaacaaacctacccacccttaacagtacatagtacataaagccatttaccgtacatagcacattacagtcaaatcccttctcgtccccatggatgacccccctcagataggggtcccttgaccaccatcctccgtgaaatcaatatcccgcacaagagtgctactctcctcgctccgggcccataacacttgggggtagctaaagtgaactgtatccgacatctggttcctacttcagggtcataaagcctaaatagcccacacgttccccttaaataagacatcacgatg

SEQ ID NO: 474 - DNA, 16569 bp, Homo sapiens mitochondrial
  3107: "n" refers to a nucleotide at position 3107 of the Cambridge Reference Sequence (CRS, Anderson et al. 1981 Nature 290:457-465), later determined to be absent from the human mtDNA sequence according to the revised CRS (rCRS, Andrews et al. 1999 Nature Genetics 23:147); "n" therefore represents a single nucleotide deletion at a position corresponding to nucleotide 3107 of SEQ ID NO:1 as provided herein.
gatcacaggtctatcaccctattaaccactcacgggagctctccatgcatttggtattttcgtctggggggtatgcacgcgatagcattgcgagacgctggagccggagcaccctatgtcgcagtatctgtctttgattcctgcctcatcctattatttatcgcacctacgttcaatattacaggcgaacatacttactaaagtgtgttaattaattaatgcttgtaggacataataataacaattgaatgtctgcacagccactttccacacagacatcataacaaaaaatttccaccaaaccccccctcccccgcttctggccacagcacttaaacacatctctgccaaaccccaaaaacaaagaaccctaacaccagcctaaccagatttcaaattttatcttttggcggtatgcacttttaacagtcaccccccaactaacacattattttcccctcccactcccatactactaatctcatcaatacaacccccgcccatcctacccagcacacacacaccgctgctaaccccataccccgaaccaaccaaaccccaaagacaccccccacagtttatgtagcttacctcctcaaagcaatacactgaaaatgtttagacgggctcacatcaccccataaacaaataggtttggtcctagcctttctattagctcttagtaagattacacatgcaagcatccccgttccagtgagttcaccctctaaatcaccacgatcaaaagggacaagcatcaagcacgcagcaatgcagctcaaaacgcttagcctagccacacccccacgggaaacagcagtgattaacctttagcaataaacgaaagtttaactaagctatactaaccccagggttggtcaatttcgtgccagccaccgcggtcacacgattaacccaagtcaatagaagccggcgtaaagagtgttttagatcaccccctccccaataaagctaaaactcacctgagttgtaaaaaactccagttgacacaaaatagactacgaaagtggctttaacatatctgaacacacaatagctaagacccaaactgggattagataccccactatgcttagccctaaacctcaacagttaaatcaacaaaactgctcgccagaacactacgagccacagcttaaaactcaaaggacctggcggtgcttcatatccctctagaggagcctgttctgtaatcgataaaccccgatcaacctcaccacctcttgctcagcctatataccgccatcttcagcaaaccctgatgaaggctacaaagtaagcgcaagtacccacgtaaagacgttaggtcaaggtgtagcccatgaggtggcaagaaatgggctacattttctaccccagaaaactacgatagcccttatgaaacttaagggtcgaaggtggatttagcagtaaactgagagtagagtgcttagttgaacagggccctgaagcgcgtacacaccgcccgtcaccctcctcaagtatacttcaaaggacatttaactaaaacccctacgcatttatatagaggagacaagtcgtaacatggtaagtgtactggaaagtgcacttggacgaaccagagtgtagcttaacacaaagcacccaacttacacttaggagatttcaacttaacttgaccgctctgagctaaacctagccccaaacccactccaccttactaccagacaaccttagccaaaccatttacccaaataaagtataggcgatagaaattgaaacctggcgcaatagatatagtaccgcaagggaaagatgaaaaattataaccaagcataatatagcaaggactaacccctataccttctgcataatgaattaactagaaataactttgcaaggagagccaaagctaagacccccgaaaccagacgagctacctaagaacagctaaaagagcacacccgtctatgtagcaaaatagtgggaagatttataggtagaggcgacaaacctaccgagcctggtgatagctggttgtccaagatagaatcttagttcaactttaaatttgcccacagaaccctctaaatccccttgtaaatttaactgttagtccaaagaggaacagctctttggacactaggaaaaaaccttgtagagagagtaaaaaatttaacacccatagtaggcctaaaagcagccaccaattaagaaagcgttcaagctcaacacccactacctaaaaaatcccaaacatataactgaactcctcacacccaattggaccaatctatcaccctatagaagaactaatgttagtataagtaacatgaaaacattctcctccgcataagcctgcgtcagattaaaacactgaactgacaattaacagcccaatatctacaatcaaccaacaagtcattattaccctcactgtcaacccaacacaggcatgctcataaggaaaggttaaaaaaagtaaaaggaactcggcaaatcttaccccgcctgtttaccaaaaacatcacctctagcatcaccagtattagaggcaccgcctgcccagtgacacatgtttaacggccgcggtaccctaaccgtgcaaaggtagcataatcacttgttccttaaatagggacctgtatgaatggctccacgagggttcagctgtctcttacttttaaccagtgaaattgacctgcccgtgaagaggcgggcataacacagcaagacgagaagaccctatggagctttaatttattaatgcaaacagtacctaacaaacccacaggtcctaaactaccaaacctgcattaaaaatttcggttggggcgacctcggagcagaacccaacctccgagcagtacatgctaagacttcaccagtcaaagcgaactactatactcaattgatccaataacttgaccaacggaacaagttaccctagggataacagcgcaatcctattctagagtccatatcaacaatagggtttacgacctcgatgttggatcaggacatcccgatggtgcagccgctattaaaggttcgtttgttcaacgattaaagtcctacgtgatctgagttcagaccggagtaatccaggtcggtttctatctacnttcaaattcctccctgtacgaaaggacaagagaaataaggcctacttcacaaagcgccttcccccgtaaatgatatcatctcaacttagtattatacccacacccacccaagaacagggtttgttaagatggcagagcccggtaatcgcataaaacttaaaactttacagtcagaggttcaattcctcttcttaacaacatacccatggccaacctcctactcctcattgtacccattctaatcgcaatggcattcctaatgcttaccgaacgaaaaattctaggctatatacaactacgcaaaggccccaacgttgtaggcccctacgggctactacaacccttcgctgacgccataaaactcttcaccaaagagcccctaaaacccgccacatctaccatcaccctctacatcaccgccccgaccttagctctcaccatcgctcttctactatgaacccccctccccatacccaaccccctggtcaacctcaacctaggcctcctatttattctagccacctctagcctagccgtttactcaatcctctgatcagggtgagcatcaaactcaaactacgccctgatcggcgcactgcgagcagtagcccaaacaatctcatatgaagtcaccctagccatcattctactatcaacattactaataagtggctcctttaacctctccacccttatcacaacacaagaacacctctgattactcctgccatcatgacccttggccataatatgatttatctccacactagcagagaccaaccgaacccccttcgaccttgccgaaggggagtccgaactagtctcaggcttcaacatcgaatacgccgcaggccccttcgccctattcttcatagccgaatacacaaacattattataataaacaccctcaccactacaatcttcctaggaacaacatatgacgcactctcccctgaactctacacaacatattttgtcaccaagaccctacttctaacctccctgttcttatgaattcgaacagcatacccccgattccgctacgaccaactcatacacctcctatgaaaaaacttcctaccactcaccctagcattacttatatgatatgtctccatacccattacaatctccagcattccccctcaaacctaagaaatatgtctgataaaagagttactttgatagagtaaataataggagcttaaacccccttatttctaggactatgagaatcgaacccatccctgagaatccaaaattctccgtgccacctatcacaccccatcctaaagtaaggtcagctaaataagctatcgggcccataccccgaaaatgttggttatacccttcccgtactaattaatcccctggcccaacccgtcatctactctaccatctttgcaggcacactcatcacagcgctaagctcgcactgattttttacctgagtaggcctagaaataaacatgctagcttttattccagttctaaccaaaaaaataaaccctcgttccacagaagctgccatcaagtatttcctcacgcaagcaaccgcatccataatccttctaatagctatcctcttcaacaatatactctccggacaatgaaccataaccaatactaccaatcaatactcatcattaataatcataatggctatagcaataaaactaggaatagccccctttcacttctgagtcccagaggttacccaaggcacccctctgacatccggcctgcttcttctcacatgacaaaaactagcccccatctcaatcatataccaaatctctccctcactaaacgtaagccttctcctcactctctcaatcttatccatcatagcaggcagttgaggtggattaaaccaaacccagctacgcaaaatcttagcatactcctcaattacccacataggatgaataatagcagttctaccgtacaaccctaacataaccattcttaatttaactatttatattatcctaactactaccgcattcctactactcaacttaaactccagcaccacgaccctactactatctcgcacctgaaacaagctaacatgactaacacccttaattccatccaccctcctctccctaggaggcctgcccccgctaaccggctttttgcccaaatgggccattatcgaagaattcacaaaaaacaatagcctcatcatccccaccatcatagccaccatcaccctccttaacctctacttctacctacgcctaatctactccacctcaatcacactactccccatatctaacaacgtaaaaataaaatgacagtttgaacatacaaaacccaccccattcctccccacactcatcgcccttaccacgctactcctacctatctccccttttatactaataatcttatagaaatttaggttaaatacagaccaagagccttcaaagccctcagtaagttgcaatacttaatttctgtaacagctaaggactgcaaaaccccactctgcatcaactgaacgcaaatcagccactttaattaagctaagcccttactagaccaatgggacttaaacccacaaacacttagttaacagctaagcaccctaatcaactggcttcaatctacttctcccgccgccgggaaaaaaggcgggagaagccccggcaggtttgaagctgcttcttcgaatttgcaattcaatatgaaaatcacctcggagctggtaaaaagaggcctaacccctgtctttagatttacagtccaatgcttcactcagccattttacctcacccccactgatgttcgccgaccgttgactattctctacaaaccacaaagacattggaacactatacctattattcggcgcatgagctggagtcctaggcacagctctaagcctccttattcgagccgagctgggccagccaggcaaccttctaggtaacgaccacatctacaacgttatcgtcacagcccatgcatttgtaataatcttcttcatagtaatacccatcataatcggaggctttggcaactgactagttcccctaataatcggtgcccccgatatggcgtttccccgcataaacaacataagcttctgactcttacctccctctctcctactcctgctcgcatctgctatagtggaggccggagcaggaacaggttgaacagtctaccctcccttagcagggaactactcccaccctggagcctccgtagacctaaccatcttctccttacacctagcaggtgtctcctctatcttaggggccatcaatttcatcacaacaattatcaatataaaaccccctgccataacccaataccaaacgcccctcttcgtctgatccgtcctaatcacagcagtcctacttctcctatctctcccagtcctagctgctggcatcactatactactaacagaccgcaacctcaacaccaccttcttcgaccccgccggaggaggagaccccattctataccaacacctattctgatttttcggtcaccctgaagtttatattcttatcctaccaggcttcggaataatctcccatattgtaacttactactccggaaaaaaagaaccatttggatacataggtatggtctgagctatgatatcaattggcttcctagggtttatcgtgtgagcacaccacatatttacagtaggaatagacgtagacacacgagcatatttcacctccgctaccataatcatcgctatccccaccggcgtcaaagtatttagctgactcgccacactccacggaagcaatatgaaatgatctgctgcagtgctctgagccctaggattcatctttcttttcaccgtaggtggcctgactggcattgtattagcaaactcatcactagacatcgtactacacgacacgtactacgttgtagcccacttccactatgtcctatcaataggagctgtatttgccatcataggaggcttcattcactgatttcccctattctcaggctacaccctagaccaaacctacgccaaaatccatttcactatcatattcatcggcgtaaatctaactttcttcccacaacactttctcggcctatccggaatgccccgacgttactcggactaccccgatgcatacaccacatgaaacatcctatcatctgtaggctcattcatttctctaacagcagtaatattaataattttcatgatttgagaagccttcgcttcgaagcgaaaagtcctaatagtagaagaaccctccataaacctggagtgactatatggatgccccccaccctaccacacattcgaagaacccgtatacataaaatctagacaaaaaaggaaggaatcgaaccccccaaagctggtttcaagccaaccccatggcctccatgactttttcaaaaaggtattagaaaaaccatttcataactttgtcaaagttaaattataggctaaatcctatatatcttaatggcacatgcagcgcaagtaggtctacaagacgctacttcccctatcatagaagagcttatcacctttcatgatcacgccctcataatcattttccttatctgcttcctagtcctgtatgcccttttcctaacactcacaacaaaactaactaatactaacatctcagacgctcaggaaatagaaaccgtctgaactatcctgcccgccatcatcctagtcctcatcgccctcccatccctacgcatcctttacataacagacgaggtcaacgatccctcccttaccatcaaatcaattggccaccaatggtactgaacctacgagtacaccgactacggcggactaatcttcaactcctacatacttcccccattattcctagaaccaggcgacctgcgactccttgacgttgacaatcgagtagtactcccgattgaagcccccattcgtataataattacatcacaagacgtcttgcactcatgagctgtccccacattaggcttaaaaacagatgcaattcccggacgtctaaaccaaaccactttcaccgctacacgaccgggggtatactacggtcaatgctctgaaatctgtggagcaaaccacagtttcatgcccatcgtcctagaattaattcccctaaaaatctttgaaatagggcccgtatttaccctatagcaccccctctaccccctctagagcccactgtaaagctaacttagcattaaccttttaagttaaagattaagagaaccaacacctctttacagtgaaatgccccaactaaatactaccgtatggcccaccataattacccccatactccttacactattcctcatcacccaactaaaaatattaaacacaaactaccacctacctccctcaccaaagcccataaaaataaaaaattataacaaaccctgagaaccaaaatgaacgaaaatctgttcgcttcattcattgcccccacaatcctaggcctacccgccgcagtactgatcattctatttccccctctattgatccccacctccaaatatctcatcaacaaccgactaatcaccacccaacaatgactaatcaaactaacctcaaaacaaatgataaccatacacaacactaaaggacgaacctgatctcttatactagtatccttaatcatttttattgccacaactaacctcctcggactcctgcctcactcatttacaccaaccacccaactatctataaacctagccatggccatccccttatgagcgggcgcagtgattataggctttcgctctaagattaaaaatgccctagcccacttcttaccacaaggcacacctacaccccttatccccatactagttattatcgaaaccatcagcctactcattcaaccaatagccctggccgtacgcctaaccgctaacattactgcaggccacctactcatgcacctaattggaagcgccaccctagcaatatcaaccattaaccttccctctacacttatcatcttcacaattctaattctactgactatcctagaaatcgctgtcgccttaatccaagcctacgttttcacacttctagtaagcctctacctgcacgacaacacataatgacccaccaatcacatgcctatcatatagtaaaacccagcccatgacccctaacaggggccctctcagccctcctaatgacctccggcctagccatgtgatttcacttccactccataacgctcctcatactaggcctactaaccaacacactaaccatataccaatgatggcgcgatgtaacacgagaaagcacataccaaggccaccacacaccacctgtccaaaaaggccttcgatacgggataatcctatttattacctcagaagtttttttcttcgcaggatttttctgagccttttaccactccagcctagcccctaccccccaattaggagggcactggcccccaacaggcatcaccccgctaaatcccctagaagtcccactcctaaacacatccgtattactcgcatcaggagtatcaatcacctgagctcaccatagtctaatagaaaacaaccgaaaccaaataattcaagcactgcttattacaattttactgggtctctattttaccctcctacaagcctcagagtacttcgagtctcccttcaccatttccgacggcatctacggctcaacattttttgtagccacaggcttccacggacttcacgtcattattggctcaactttcctcactatctgcttcatccgccaactaatatttcactttacatccaaacatcactttggcttcgaagccgccgcctgatactggcattttgtagatgtggtttgactatttctgtatgtctccatctattgatgagggtcttactcttttagtataaatagtaccgttaacttccaattaactagttttgacaacattcaaaaaagagtaataaacttcgccttaattttaataatcaacaccctcctagccttactactaataattattacattttgactaccacaactcaacggctacatagaaaaatccaccccttacgagtgcggcttcgaccctatatcccccgcccgcgtccctttctccataaaattcttcttagtagctattaccttcttattatttgatctagaaattgccctccttttacccctaccatgagccctacaaacaactaacctgccactaatagttatgtcatccctcttattaatcatcatcctagccctaagtctggcctatgagtgactacaaaaaggattagactgaaccgaattggtatatagtttaaacaaaacgaatgatttcgactcattaaattatgataatcatatttaccaaatgcccctcatttacataaatattatactagcatttaccatctcacttctaggaatactagtatatcgctcacacctcatatcctccctactatgcctagaaggaataatactatcgctgttcattatagctactctcataaccctcaacacccactccctcttagccaatattgtgcctattgccatactagtctttgccgcctgcgaagcagcggtgggcctagccctactagtctcaatctccaacacatatggcctagactacgtacataacctaaacctactccaatgctaaaactaatcgtcccaacaattatattactaccactgacatgactttccaaaaaacacataatttgaatcaacacaaccacccacagcctaattattagcatcatccctctactattttttaaccaaatcaacaacaacctatttagctgttccccaaccttttcctccgaccccctaacaacccccctcctaatactaactacctgactcctacccctcacaatcatggcaagccaacgccacttatccagtgaaccactatcacgaaaaaaactctacctctctatactaatctccctacaaatctccttaattataacattcacagccacagaactaatcatattttatatcttcttcgaaaccacacttatccccaccttggctatcatcacccgatgaggcaaccagccagaacgcctgaacgcaggcacatacttcctattctacaccctagtaggctcccttcccctactcatcgcactaatttacactcacaacaccctaggctcactaaacattctactactcactctcactgcccaagaactatcaaactcctgagccaacaacttaatatgactagcttacacaatagcttttatagtaaagatacctctttacggactccacttatgactccctaaagcccatgtcgaagcccccatcgctgggtcaatagtacttgccgcagtactcttaaaactaggcggctatggtataatacgcctcacactcattctcaaccccctgacaaaacacatagcctaccccttccttgtactatccctatgaggcataattataacaagctccatctgcctacgacaaacagacctaaaatcgctcattgcatactcttcaatcagccacatagccctcgtagtaacagccattctcatccaaaccccctgaagcttcaccggcgcagtcattctcataatcgcccacgggcttacatcctcattactattctgcctagcaaactcaaactacgaacgcactcacagtcgcatcataatcctctctcaaggacttcaaactctactcccactaatagctttttgatgacttctagcaagcctcgctaacctcgccttaccccccactattaacctactgggagaactctctgtgctagtaaccacgttctcctgatcaaatatcactctcctacttacaggactcaacatactagtcacagccctatactccctctacatatttaccacaacacaatggggctcactcacccaccacattaacaacataaaaccctcattcacacgagaaaacaccctcatgttcatacacctatcccccattctcctcctatccctcaaccccgacatcattaccgggttttcctcttgtaaatatagtttaaccaaaacatcagattgtgaatctgacaacagaggcttacgaccccttatttaccgagaaagctcacaagaactgctaactcatgcccccatgtctaacaacatggctttctcaacttttaaaggataacagctatccattggtcttaggccccaaaaattttggtgcaactccaaataaaagtaataaccatgcacactactataaccaccctaaccctgacttccctaattccccccatccttaccaccctcgttaaccctaacaaaaaaaactcatacccccattatgtaaaatccattgtcgcatccacctttattatcagtctcttccccacaacaatattcatgtgcctagaccaagaagttattatctcgaactgacactgagccacaacccaaacaacccagctctccctaagcttcaaactagactacttctccataatattcatccctgtagcattgttcgttacatggtccatcatagaattctcactgtgatatataaactcagacccaaacattaatcagttcttcaaatatctactcatcttcctaattaccatactaatcttagttaccgctaacaacctattccaactgttcatcggctgagagggcgtaggaattatatccttcttgctcatcagttgatgatacgcccgagcagatgccaacacagcagccattcaagcaatcctatacaaccgtatcggcgatatcggtttcatcctcgccttagcatgatttatcctacactccaactcatgagacccacaacaaatagcccttctaaacgctaatccaagcctcaccccactactaggcctcctcctagcagcagcaggcaaatcagcccaattaggtctccacccctgactcccctcagccatagaaggccccaccccagtctcagccctactccactcaagcactatagttgtagcaggaatcttcttactcatccgcttccaccccctagcagaaaatagcccactaatccaaactctaacactatgcttaggcgctatcaccactctgttcgcagcagtctgcgcccttacacaaaatgacatcaaaaaaatcgtagccttctccacttcaagtcaactaggactcataatagttacaatcggcatcaaccaaccacacctagcattcctgcacatctgtacccacgccttcttcaaagccatactatttatgtgctccgggtccatcatccacaaccttaacaatgaacaagatatccgaaaaataggaggactactcaaaaccatacctctcacttcaacctccctcaccattggcagcctagcattagcaggaatacctttcctcacaggtttctactccaaagaccacatcatcgaaaccgcaaacatatcatacacaaacgcctgagccctatctattactctcatcgctacctccctgacaagcgcctatagcactcgaataattcttctcaccctaacaggtcaacctcgcttccccacccttactaacattaacgaaaataaccccaccctactaaaccccattaaacgcctggcagccggaagcctattcgcaggatttctcattactaacaacatttcccccgcatcccccttccaaacaacaatccccctctacctaaaactcacagccctcgctgtcactttcctaggacttctaacagccctagacctcaactacctaaccaacaaacttaaaataaaatccccactatgcacattttatttctccaacatactcggattctaccctagcatcacacaccgcacaatcccctatctaggccttcttacgagccaaaacctgcccctactcctcctagacctaacctgactagaaaagctattacctaaaacaatttcacagcaccaaatctccacctccatcatcacctcaacccaaaaaggcataattaaactttacttcctctctttcttcttcccactcatcttaaccctactcctaatcacataacctattcccccgagcaatctcaattacaatatatacaccaacaaacaatgttcaaccagtaactactactaatcaacgcccataatcatacaaagcccccgcaccaataggatcctcccgaatcaaccctgacccctctccttcataaattattcagcttcctacactattaaagtttaccacaaccaccaccccatcatactctttcacccacagcaccaatcctacctccatcgctaaccccactaaaacactcaccaagacctcaacccctgacccccatgcctcaggatactcctcaatagccatcgctgtagtatatccaaagacaaccatcattccccctaaataaattaaaaaaactattaaacccatataacctcccccaaaattcagaataataacacacccgaccacaccgctaacaatcaatactaaacccccataaataggagaaggcttagaagaaaaccccacaaaccccattactaaacccacactcaacagaaacaaagcatacatcattattctcgcacggactacaaccacgaccaatgatatgaaaaaccatcgttgtatttcaactacaagaacaccaatgaccccaatacgcaaaactaaccccctaataaaattaattaaccactcattcatcgacctccccaccccatccaacatctccgcatgatgaaacttcggctcactccttggcgcctgcctgatcctccaaatcaccacaggactattcctagccatgcactactcaccagacgcctcaaccgccttttcatcaatcgcccacatcactcgagacgtaaattatggctgaatcatccgctaccttcacgccaatggcgcctcaatattctttatctgcctcttcctacacatcgggcgaggcctatattacggatcatttctctactcagaaacctgaaacatcggcattatcctcctgcttgcaactatagcaacagccttcataggctatgtcctcccgtgaggccaaatatcattctgaggggccacagtaattacaaacttactatccgccatcccatacattgggacagacctagttcaatgaatctgaggaggctactcagtagacagtcccaccctcacacgattctttacctttcacttcatcttgcccttcattattgcagccctagcagcactccacctcctattcttgcacgaaacgggatcaaacaaccccctaggaatcacctcccattccgataaaatcaccttccacccttactacacaatcaaagacgccctcggcttacttctcttccttctctccttaatgacattaacactattctcaccagacctcctaggcgacccagacaattataccctagccaaccccttaaacacccctccccacatcaagcccgaatgatatttcctattcgcctacacaattctccgatccgtccctaacaaactaggaggcgtccttgccctattactatccatcctcatcctagcaataatccccatcctccatatatccaaacaacaaagcataatatttcgcccactaagccaatcactttattgactcctagccgcagacctcctcattctaacctgaatcggaggacaaccagtaagctacccttttaccatcattggacaagtagcatccgtactatacttcacaacaatcctaatcctaataccaactatctccctaattgaaaacaaaatactcaaatgggcctgtccttgtagtataaactaatacaccagtcttgtaaaccggagatgaaaacctttttccaaggacaaatcagagaaaaagtctttaactccaccattagcacccaaagctaagattctaatttaaactattctctgttctttcatggggaagcagatttgggtaccacccaagtattgactcacccatcaacaaccgctatgtatttcgtacattactgccagccaccatgaatattgtacggtaccataaatacttgaccacctgtagtacataaaaacccaatccacatcaaaaccccctccccatgcttacaagcaagtacagcaatcaaccctcaactatcacacatcaactgcaactccaaagccacccctcacccactaggataccaacaaacctacccacccttaacagtacatagtacataaagccatttaccgtacatagcacattacagtcaaatcccttctcgtccccatggatgacccccctcagataggggtcccttgaccaccatcctccgtgaaatcaatatcccgcacaagagtgctactctcctcgctccgggcccataacacttgggggtagctaaagtgaactgtatccgacatctggttcctacttcagggtcataaagcctaaatagcccacacgttccccttaaataagacatcacgatg

SEQ ID NO: 475 - DNA, 16569 bp, Homo sapiens mitochondrial
  3107: "n" refers to a nucleotide at position 3107 of the Cambridge Reference Sequence (CRS, Anderson et al. 1981 Nature 290:457-465), later determined to be absent from the human mtDNA sequence according to the revised CRS (rCRS, Andrews et al. 1999 Nature Genetics 23:147); "n" therefore represents a single nucleotide deletion at a position corresponding to nucleotide 3107 of SEQ ID NO:1 as provided herein.
gatcacaggtctatcaccctattaaccactcacgggagctctccatgcatttggtattttcgtctggggggtatgcacgcgatagcattgcgagacgctggagccggagcaccctatgtcgcagtatctgtctttgattcctgcctcatcctattatttatcgcacctacgttcaatattacaggcgaacatacttactaaagtgtgttaattaattaatgcttgtaggacataataataacaattgaatgtctgcacagccactttccacacagacatcataacaaaaaatttccaccaaaccccccctcccccgcttctggccacagcacttaaacacatctctgccaaaccccaaaaacaaagaaccctaacaccagcctaaccagatttcaaattttatcttttggcggtatgcacttttaacagtcaccccccaactaacacattattttcccctcccactcccatactactaatctcatcaatacaacccccgcccatcctacccagcacacacacaccgctgctaaccccataccccgaaccaaccaaaccccaaagacaccccccacagtttatgtagcttacctcctcaaagcaatacactgaaaatgtttagacgggctcacatcaccccataaacaaataggtttggtcctagcctttctattagctcttagtaagattacacatgcaagcatccccgttccagtgagttcaccctctaaatcaccacgatcaaaagggacaagcatcaagcacgcagcaatgcagctcaaaacgcttagcctagccacacccccacgggaaacagcagtgattaacctttagcaataaacgaaagtttaactaagctatactaaccccagggttggtcaatttcgtgccagccaccgcggtcacacgattaacccaagtcaatagaagccggcgtaaagagtgttttagatcaccccctccccaataaagctaaaactcacctgagttgtaaaaaactccagttgacacaaaatagactacgaaagtggctttaacatatctgaacacacaatagctaagacccaaactgggattagataccccactatgcttagccctaaacctcaacagttaaatcaacaaaactgctcgccagaacactacgagccacagcttaaaactcaaaggacctggcggtgcttcatatccctctagaggagcctgttctgtaatcgataaaccccgatcaacctcaccacctcttgctcagcctatataccgccatcttcagcaaaccctgatgaaggctacaaagtaagcgcaagtacccacgtaaagacgttaggtcaaggtgtagcccatgaggtggcaagaaatgggctacattttctaccccagaaaactacgatagcccttatgaaacttaagggtcgaaggtggatttagcagtaaactgagagtagagtgcttagttgaacagggccctgaagcgcgtacacaccgcccgtcaccctcctcaagtatacttcaaaggacatttaactaaaacccctacgcatttatatagaggagacaagtcgtaacatggtaagtgtactggaaagtgcacttggacgaaccagagtgtagcttaacacaaagcacccaacttacacttaggagatttcaacttaacttgaccgctctgagctaaacctagccccaaacccactccaccttactaccagacaaccttagccaaaccatttacccaaataaagtataggcgatagaaattgaaacctggcgcaatagatatagtaccgcaagggaaagatgaaaaattatagccaagcataatatagcaaggactaacccctataccttctgcataatgaattaactagaaataactttgcaaggagagccaaagctaagacccccgaaaccagacgagctacctaagaacagctaaaagagcacacccgtctatgtagcaaaatagtgggaagatttataggtagaggcgacaaacctaccgagcctggtgatagctggttgtccaagatagaatcttagttcaactttaaatttgcccacagaaccctctaaatccccttgtaaatttaactgttagtccaaagaggaacagctctttggacactaggaaaaaaccttgtagagagagtaaaaaatttaacacccatagtaggcctaaaagcagccaccaattaagaaagcgttcaagctcaacatccactacctaaaaaatcccaaacatataactgaactcctcacacccaattggaccaatctatcaccctatagaagaactaatgttagtataagtaacatgaaaacattctcctccgcataagcctgcgtcagattaaaacactgaactgacaattaacagcccaatatctacaatcaaccaacaagtcattattaccctcactgtcaacccaacacaggcatgctcataaggaaaggttaaaaaaagtaaaaggaactcggcaaatcttaccccgcctgtttaccaaaaacatcacctctagcatcaccagtattagaggcaccgcctgcccagtgacacatgtttaacggccgcggtaccctaaccgtgcaaaggtagcataatcacttgttccttaaatagggacctgtatgaatggctccacgagggttcagctgtctcttacttttaaccagtgaaattgacctgcccgtgaagaggcgggcatgacacagcaagacgagaagaccctatggagctttaatttattaatgcaaacagtacctaacaaacccacaggtcctaaactaccaaacctgcattaaaaatttcggttggggcgacctcggagcagaacccaacctccgagcagtacatgctaagacttcaccagtcaaagcgaactactatactcaattgatccaataacttgaccaacggaacaagttaccctagggataacagcgcaatcctattctagagtccatatcaacaatagggtttacgacctcgatgttggatcaggacatcccgatggtgcagccgctattaaaggttcgtttgttcaacgattaaagtcctacgtgatctgagttcagaccggagtaatccaggtcggtttctatctacnttcaaattcctccctgtacgaaaggacaagagaaataaggcctacttcacaaagcgccttcccccgtaaatgatatcatctcaacttagtattatacccacacccacccaagaacagggtttgttaagatggcagagcccggtaatcgcataaaacttaaaactttacagtcagaggttcaattcctcttcttaacaacatacccatggccaacctcctactcctcattgtacccattctaatcgcaatggcattcctaatgcttaccgaacgaaaaattctaggctatatacaactacgcaaaggccccaacgttgtaggcccctacgggctactacaacccttcgctgacgccataaaactcttcaccaaggagcccctaaaacccgccacatctaccatcaccctctacatcaccgccccgaccttagctctcaccatcgctcttctactatgaacccccctccccatacccaaccccctggtcaacctcaacctaggcctcctatttattctagccacctctagcctagccgtttactcaatcctctgatcagggtgagcatcaaactcaaactacgccctgatcggcgcactgcgagcagtagcccaaacaatctcatatgaagtcaccctagccatcattctactatcaacattactaataagtggctcctttaacctctccacccttatcacaacacaagaacacctctgattactcctgccatcatgacccttggccataatatgatttatctccacactagcagagaccaaccgaacccccttcgaccttgccgaaggggagtccgaactagtctcaggcttcaacatcgaatacgccgcaggccccttcgccctattcttcatagccgaatacacaaacattattataataaacaccctcaccactacaatcttcctaggaacaacatatgacgcactctcccctgaactctacacaacatattttgtcaccaagaccctacttctaacctccctgttcttatgaattcgaacagcatacccccgattccgctacgaccaactcatacacctcctatgaaaaaacttcctaccactcaccctagcattacttatatgatatgtctccatacccattacaatctccagcattccccctcaaacctaagaaatatgtctgataaaagagttactttgatagagtaaataataggagcttaaacccccttatttctaggactatgagaatcgaacccatccctgagaatccaaaattctccgtgccacctatcacaccccatcctaaagtaaggtcagctaaataagctatcgggcccataccccgaaaatgttggttatacccttcccgtactaattaatcccctggcccaacccgtcatctactctaccatctttgcaggcacactcatcacagcgctaagctcgcactgattttttacctgagtaggcctagaaataaacatgctagcttttattccagttctaaccaaaaaaataaaccctcgttccacagaagctgccatcaagtatttcctcacgcaagcaaccgcatccataatccttctaatagctatcctcttcaacaatatactctccggacaatgaaccataaccaatactaccaatcaatactcatcattaataatcataatggctatagcaataaaactaggaatagccccctttcacttctgagtcccagaggttacccaaggcacccctctgacatccggcctgcttcttctcacatgacaaaaactagcccccatctcaatcatataccaaatctctccctcactaaacgtaagccttctcctcactctctcaatcttatccatcatagcaggcagttgaggtggattaaaccaaacccagctacgcaaaatcttagcatactcctcaattacccacataggatgaataatagcagttctaccgtacaaccctaacataaccattcttaatttaactatttatattatcctaactactaccgcattcctactactcaacttaaactccagcaccacgaccctactactatctcgcacctgaaacaagctaacatgactaacacccttaattccatccaccctcctctccctaggaggcctacccccgctaaccggctttttgcccaaatgggccattatcgaagaattcacaaaaaacaatagcctcatcatccccaccatcatagccaccatcaccctccttaacctctacttctacctacgcctaatctactccacctcaatcacactactccccatatctaacaacgtaaaaataaaatgacagtttgaacatacaaaacccaccccattcctccccacactcatcgcccttaccacgctactcctacctatctccccttttatactaataatcttatagaaatttaggttaaatacagaccaagagccttcaaagccctcagtaagttgcaatacttaatttctgtaacagctaaggactgcaaaaccccactctgcatcaactgaacgcaaatcagccactttaattaagctaagcccttactagaccaatgggacttaaacccacaaacacttagttaacagctaagcaccctaatcaactggcttcaatctacttctcccgccgccgggaaaaaaggcgggagaagccccggcaggtttgaagctgcttcttcgaatttgcaattcaatatgaaaatcacctcggagctggtaaaaagaggcctaacccctgtctttagatttacagtccaatgcttcactcagccattttacctcacccccactgatgttcgccgaccgttgactattctctacaaaccacaaagacattggaacactatacctattattcggcgcatgagctggagtcctaggcacagctctaagcctccttattcgagccgagctgggccagccaggcaaccttctaggtaacgaccacatctacaacgttatcgtcacagcccatgcatttgtaataatcttcttcatagtaatacccatcataatcggaggctttggcaactgactagttcccctaataatcggtgcccccgatatggcgtttccccgcataaacaacataagcttctgactcttacctccctctctcctactcctgctcgcatctgctatagtggaggccggagcaggaacaggttgaacagtctaccctcccttagcagggaactactcccaccctggagcctccgtagacctaaccatcttctccttacacctagcaggtgtctcctctatcttaggggccatcaatttcatcacaacaattatcaatataaaaccccctgccataacccaataccaaacgcccctcttcgtctgatccgtcctaatcacagcagtcctacttctcctatctctcccagtcctagctgctggcatcactatactactaacagaccgcaacctcaacaccaccttcttcgaccccgccggaggaggagaccccattctataccaacacctattctgatttttcggtcaccctgaagtttatattcttatcctaccaggcttcggaataatctcccatattgtaacttactactccggaaaaaaagaaccatttggatacataggtatggtctgagctatgatatcaattggcttcctagggtttatcgtgtgagcacaccatatatttacagtaggaatagacgtagacacacgagcatatttcacctccgctaccataatcatcgctatccccaccggcgtcaaagtatttagctgactcgccacactccacggaagcaatatgaaatgatctgctgcagtgctctgagccctaggattcatctttcttttcaccgtaggtggcctgactggcattgtattagcaaactcatcactagacatcgtactacacgacacgtactacgttgtagctcacttccactatgtcctatcaataggagctgtatttgccatcataggaggcttcattcactgatttcccctattctcaggctacaccctagaccaaacctacgccaaaatccatttcactatcatattcatcggcgtaaatctaactttcttcccacaacactttctcggcctatccggaatgccccgacgttactcggactaccccgatgcatacaccacatgaaacatcctatcatctgtaggctcattcatttctctaacagcagtaatattaataattttcatgatttgagaagccttcgcttcgaagcgaaaagtcctaatagtagaagaaccctccataaacctggagtgactatatggatgccccccaccctaccacacattcgaagaacccgtatacataaaatctagacaaaaaaggaaggaatcgaaccccccaaagctggtttcaagccaaccccatggcctccatgactttttcaaaaaggtattagaaaaaccatttcataactttgtcaaagttaaattataggctaaatcctatatatcttaatggcacatgcagcgcaagtaggtctacaagacgctacttcccctatcatagaagagcttatcacctttcatgatcacgccctcataatcattttccttatctgcttcctagtcctgtatgcccttttcctaacactcacaacaaaactaactaatactaacatctcagacgctcaggaaatagaaaccgtctgaactatcctgcccgccatcatcctagtcctcatcgccctcccatccctacgcatcctttacataacagacgaggtcaacgatccctcccttaccatcaaatcaattggccaccaatggtactgaacctacgagtacaccgactacggcggactaatcttcaactcctacatacttcccccattattcctagaaccaggcgacctgcgactccttgacgttgacaatcgagtagtactcccgattgaagcccccattcgtataataattacatcacaagacgtcttgcactcatgagctgtccccacattaggcttaaaaacagatgcaattcccggacgtctaaaccaaaccactttcaccgctacacgaccgggggtatactacggtcaatgctctgaaatctgtggagcaaaccacagtttcatgcccatcgtcctagaattaattcccctaaaaatctttgaaatagggcccgtatttaccctatagcaccccctctaccccctctagagcccactgtaaagctaacttagcattaaccttttaagttaaagattaagagaaccaacacctctttacagtgaaatgccccaactaaatactaccgtatggcccaccataattacccccatactccttacactattcctcatcacccaactaaaaatattaaacacaaactaccacctacctccctcaccaaagcccataaaaataaaaaattataacaaaccctgagaaccaaaatgaacgaaaatctgttcgcttcattcattgcccccacaatcctaggcctacccgccgcagtactgatcattctatttccccctctattgatccccacctccaaatatctcatcaacaaccgactaatcaccacccaacaatgactaatcaaactaacctcaaaacaaatgataaccatacacaacactaaaggacgaacctgatctcttatactagtatccttaatcatttttattgccacaactaacctcctcggactcctgcctcactcatttacaccaaccacccaactatctataaacctagccatggccatccccttatgagcgggcgcagtgattataggctttcgctctaagattaaaaatgccctagcccacttcttaccacaaggcacacctacaccccttatccccatactagttattatcgaaaccatcagcctactcattcaaccaatagccctggccgtacgcctaaccgctaacattactgcaggccacctactcatgcacctaattggaagcaccaccctagcaatatcaaccattaaccttccctctacacttatcatcttcacaattctaattctactgactatcctagaaatcgctgtcgccttaatccaagcctacgttttcacacttctagtaagcctctacctgcacgacaacacataatgacccaccaatcacatgcctatcatatagtaaaacccagcccatgacccctaacaggggccctctcagccctcctaatgacctccggcctagccatgtgatttcacttccactccataacgctcctcatactaggcctactaaccaacacactaaccatataccaatgatggcgcgatgtaacacgagaaagcacataccaaggccaccacacaccacctgtccaaaaaggccttcgatacgggataatcctatttattacctcagaagtttttttcttcgcaggatttttctgagccttttaccactccagcctagcccctaccccccaattaggagggcactggcccccaacaggcatcaccccgctaaatcccctagaagtcccactcctaaacacatccgtattactcgcatcaggagtatcaatcacctgagctcaccatagtctaatagaaaacaaccgaaaccaaataattcaagcactgctcattacaattttactgggcctctattttaccctcctacaagcctcagagtacttcgagtctcccttcaccatttccgacggcatctacggctcaacattttttgtagccacaggcttccacggacttcacgtcattattggctcaactttcctcactatctgcttcatccgccaactaatatttcactttacatccaaacatcactttggcttcgaagccgccgcctgatactggcattttgtagatgtggtttgactatttctgtatgtctccatctattgatgagggtcttactcttttagtataaatagtaccgttaacttccaattaactagttttgacaacattcaaaaaagagtaataaacttcgccttaattttaataatcaacaccctcctagccttactactaataattattacattttgactaccacaactcaacggctacatagaaaaatccaccccttacgagtgcggcttcgaccctatatcccccgcccgcgtccctttctccataaaattcttcttagtagctattaccttcttattatttgatctagaaattgccctccttttacccctaccatgagccctacaaacaactaacctgccactaatagttatgtcatccctcttattaatcatcatcctagccctaagtctggcctatgagtgactacaaaaaggattagactgaaccgaattggtatatagtttaaacaaaacgaatgatttcgactcattaaattatgataatcatatttaccaaatgcccctcatttacataaatattatactagcatttaccatctcacttctaggaatactagtatatcgctcacacctcatgtcctccctactatgcctagaaggaataatactatcgctgttcattatagctactctcataaccctcaacacccactccctcttagccaatattgtgcctattgccatactagtctttgccgcctgcgaagcagcggtgggcctagccctactagtctcaatctccaacacatatggcctagactacgtacataacctaaacctactccaatgctaaaactaatcgtcccaacaattatattactaccactgacatgactttccaaaaaacacataatttgaatcaacacaaccacccacagcctaattattagcatcatccctctactattttttaaccaaatcaacaacaacctatttagctgttccccaaccttttcctccgaccccctaacaacccccctcctaatactaactacctgactcctacccctcacaatcatggcaagccaacgccacttatccagtgaaccactatcacgaaaaaaactctacctctctatactaatctccctacaaatctccttaattataacattcacagccacagaactaatcatattttatatcttcttcgaaaccacacttatccccaccttggctatcatcacccgatgaggcaaccagccagaacgcctgaacgcaggcacatacttcctattctacaccctagtaggctcccttcccctactcatcgcactaatttacactcacaacaccctaggctcactaaacattctactactcaccctcactgcccaagaactatcaaactcctgagccaacaacttaatatgactagcttacacaatagcttttatagtaaagatacctctttacggactccacttatgactccctaaagcccatgtcgaagcccccatcgctgggtcaatagtacttgccgcagtactcttgaaactaggcggctatggtataatacgcctcacactcattctcaaccccctgacaaaacacatagcctaccccttccttgtactatccctatgaggcataattataacaagctccatctgcctacgacaaacagacctaaaatcgctcattgcatactcttcaatcagccacatagccctcgtagtaacagccattctcatccaaaccccctgaagcttcaccggcgcagtcattctcataatcgcccacggacttacatcctcattactattctgcctagcaaactcaaactacgaacgcactcacagtcgcatcataatcctctctcaaggacttcaaactctactcccactaatagctttttgatgacttctagcaagcctcgctaacctcgccttaccacccactattaacctactgggagaactctctgtgctagtaaccacgttctcctgatcaaatatcactctcctacttacaggactcaacatactagtcacagccctatactccctctacatatttaccacaacacaatggggctcactcacccaccacattaacaacataaaaccctcattcacacgagaaaacaccctcatgttcatacacctatcccccattctcctcctatccctcaaccccgacatcattaccgggttttcctcttgtaaatatagtttaaccaaaacatcagattgtgaatctgacaacagaggcttacgaccccttatttaccgagaaagctcacaagaactgctaactcatgcccccatgtctaacaacatggctttctcaacttttaaaggataacagctatccattggtcttaggccccaagaattttggtgcaactccaaataaaagtaataaccatgcacactactataaccaccctaaccctaacttccctaattccccccatccttaccaccctcgttaaccctaacaaaaaaaactcatacccccattatgtaaaatccattgtcgcatccacctttattatcagtctcttccccacaacaatattcatgtgcctagaccaagaagttattatctcgaactgacactgagccacaacccaaacaacccagctctccctaagcttcaaactagactacttctccataatattcatccctgtagcattgttcgttacatggtccatcatagaattctcactgtgatatataaactcagacccaaacattaatcagttcttcaaatatctactcatcttcctaattaccatactaatcttagttaccgctaacaacctattccaactgttcatcggctgagagggcgtaggaattatatccttcttgctcatcagttgatgatacgcccgagcagatgccaacacagcagccattcaagcaatcctatacaaccgtatcggcgatatcggtttcatcctcgccttagcatgatttatcctacactccaactcatgagacccacaacaaatagcccttctaaacgctaatccaagcctcaccccactactaggcctcctcctagcagcagcaggcaaatcagcccaattaggtctccacccctgactcccctcagccatagaaggccccaccccagtctcagccctactccactcaagcactatagttgtagcaggaatcttcttactcatccgcttccaccccctaacagaaaatagcccactaatccaaactctaacactatgcttaggcgctatcaccactctgttcgcagcagtctgcgcccttacacaaaatgacatcaaaaaaatcgtagccttctccacttcaagtcaactaggactcataatagttacaatcggcatcaaccaaccacacctagcattcctgcacatctgtacccacgccttcttcaaagccatactatttatgtgctccgggtccatcatccacaaccttaacaatgaacaagatattcgaaaaataggaggactactcaaaaccatacctctcacttcaacctccctcaccattggcagcctagcattagcaggaatacctttcctcacaggtttctactccaaagaccacatcatcgaaaccgcaaacatatcatacacaaacgcctgagccctatctattactctcatcgctacctccctgacaagcgcctatagcactcgaataattcttctcaccctaacaggtcaacctcgcttccccacccttactaacattaacgaaaataaccccaccctactaaaccccattaaacgcctggcagccggaagcctattcgcaggatttctcattactaacaacatttcccccgcatcccccttccaaacaacaatccccctctacctaaaactcacagccctcgctgtcactttcctaggacttctaacagccctagacctcaactacctaaccaacaaacttaaaataaaatccccactatgcacattttatttctccaacatactcggattctaccctagcatcacacaccgcacaatcccctatctaggccttcttacgagccaaaacctgcccctactcctcctagacctaacctgactagaaaagctattacctaaaacaatttcgcagcaccaaatctccacctccatcatcacctcaacccaaaaaggcataattaaactttacttcctctctttcttcttcccactcatcctaaccctactcctaatcacataacctattcccccgagcaatttcaattacaatatatacaccaacaaacaatgttcaaccagtaactactactaatcaacgcccataatcatacaaagcccccgcaccaataggatcctcccgaatcaaccctgacccctctccttcataaattattcagcttcctacactattaaagtttaccacaaccaccaccccatcatactctttcacccacagcaccaatcctacctccatcgctaaccccactaaaacactcaccaagacctcaacccctgacccccatgcctcaggatactcctcaatagccatcgctgtagtatatccaaagacaaccatcattccccctaaataaattaaaaaaactattaaacccatataacctcccccaaaattcagaataataacacacccgaccacaccgctaacaatcaatactaaacccccataaataggagaaggcttagaagaaaaccccacaaaccccattactaaacccacactcaacagaaacaaagcatacatcattattctcgcacggactacaaccacgaccaatgatatgaaaaaccatcgttgtatttcaactacaagaacaccaatgaccccaatacgcaaaattaaccccctaataaaattaattaaccactcactcatcgacctccccaccccatccaacatctccgcatgatgaaacttcggctcactccttggcgcctgcctgatcctccaaatcaccacaggactattcctagccatgcactactcaccagacgcctcaaccgccttttcatcaatcgcccacatcactcgagacgtaaattatggctgaatcatccgctaccttcacgccaatggcgcctcaatattctttatctgcctcttcctacacatcgggcgaggcctatattacggatcatttctctactcagaaacctgaaacatcggcattatcctcctgcttgcaactatagcaacagccttcataggctatgtcctcccgtgaggccaaatatcattctgaggggccacagtaattacaaacttactatccgccatcccatacattgggacagacctagttcaatgaatctgaggaggctactcagtagacagtcccaccctcacacgattctttacctttcacttcatcttgcccttcattattgcagccctagcagcactccacctcctattcttgcacgaaacgggatcaaacaaccccctaggaatcacctcccattccgataaaatcaccttccacccttactacacaatcaaagacgccctcggcttacttctcttccttctctccttaatgacattaacactattctcaccagacctcctaggcgacccagacaattataccctagccaaccccttaaacacccctccccacatcaagcccgaatgatatttcctattcgcctacacaattctccgatccgtccctaacaaactaggaggcgtccttgccctattactatccatcctcatcctagcaataatccccatcctccatatatccaaacaacaaagcataatatttcgcccactaagccaatcactttattgactcctagccgcagacctcctcattctaacctgaatcggaggacaaccagtaagctacccttttaccatcattggacaagtagcatccgtactatacttcacaacaatcctaatcctaataccaactatctccctaattgaaaacaaaatactcaaatgggcctgtccttgtagtataaactaatacaccagtcttgtaaaccggagatgaaaacctttttccaaggacaaatcagagaaaaagtctttaactccaccattagcacccaaagctaagattctaatttaaactattctctgttctttcatggggaagcagatttgggtaccacccaagtattgactcacccatcaacaaccgctatgtatttcgtacattactgccagccaccatgaatattgtacggtaccataaatacttgaccacctgtagtacataaaaacccaatccacatcaaaaccccctccccatgcttacaagcaagtacagcaatcaaccctcaactatcacacatcaactgcaactccaaagccacccctcacccactaggataccaacaaacctacccacccttaacagtacatagtacataaagccatttaccgtacatagcacattacagtcaaatcccttctcgtccccatggatgacccccctcagataggggtcccttgaccaccatcctccgtgaaatcaatatcccgcacaagagtgctactctcctcgctccgggcccataacacttgggggtagctaaagtgaactgtatccgacatctggttcctacttcagggtcataaagcctaaatagcccacacgttccccttaaataagacatcacgatg

SEQ ID NO: 476 - DNA, 16569 bp, Homo sapiens mitochondrial
  3107: "n" refers to a nucleotide at position 3107 of the Cambridge Reference Sequence (CRS, Anderson et al. 1981 Nature 290:457-465), later determined to be absent from the human mtDNA sequence according to the revised CRS (rCRS, Andrews et al. 1999 Nature Genetics 23:147); "n" therefore represents a single nucleotide deletion at a position corresponding to nucleotide 3107 of SEQ ID NO:1 as provided herein.
gatcacaggtctatcaccctattaaccactcacgggagctctccatgcatttggtattttcgtctggggggtatgcacgcgatagcattgcgagacgctggagccggagcaccctatgtcgcagtatctgtctttgattcctgcctcatcctattatttatcgcacctacgttcaatattacaggcgaacatacttactaaagtgtgttaattaattaatgcttgtaggacataataataacaattgaatgtctgcacagccactttccacacagacatcataacaaaaaatttccaccaaaccccccctcccccgcttctggccacagcacttaaacacatctctgccaaaccccaaaaacaaagaaccctaacaccagcctaaccagatttcaaattttatcttttggcggtatgcacttttaacagtcaccccccaactaacacattattttcccctcccactcccatactactaatctcatcaatacaacccccgcccatcctacccagcacacacacaccgctgctaaccccataccccgaaccaaccaaaccccaaagacaccccccacagtttatgtagcttacctcctcaaagcaatacactgaaaatgtttagacgggctcacatcaccccataaacaaataggtttggtcctagcctttctattagctcttagtaagattacacatgcaagcatccccgttccagtgagttcaccctctaaatcaccacgatcaaaagggacaagcatcaagcacgcagcaatgcagctcaaaacgcttagcctagccacacccccacgggaaacagcagtgattaacctttagcaataaacgaaagtttaactaagctatactaaccccagggttggtcaatttcgtgccagccaccgcggtcacacgattaacccaagtcaatagaagccggcgtaaagagtgttttagatcaccccctccccaataaagctaaaactcacctgagttgtaaaaaactccagttgacacaaaatagactacgaaagtggctttaacatatctgaacacacaatagctaagacccaaactgggattagataccccactatgcttagccctaaacctcaacagttaaatcaacaaaactgctcgccagaacactacgagccacagcttaaaactcaaaggacctggcggtgcttcatatccctctagaggagcctgttctgtaatcgataaaccccgatcaacctcaccacctcttgctcagcctatataccgccatcttcagcaaaccctgatgaaggctacaaagtaagcgcaagtacccacgtaaagacgttaggtcaaggtgtagcccatgaggtggcaagaaatgggctacattttctaccccagaaaactacgatagcccttatgaaacttaagggtcgaaggtggatttagcagtaaactgagagtagagtgcttagttgaacagggccctgaagcgcgtacacaccgcccgtcaccctcctcaagtatacttcaaaggacatttaactaaaacccctacgcatttatatagaggagacaagtcgtaacatggtaagtgtactggaaagtgcacttggacgaaccagagtgtagcttaacacaaagcacccaacttacacttaggagatttcaacttaacttgaccgctctgagctaaacctagccccaaacccactccaccttactaccagacaaccttagccaaaccatttacccaaataaagtataggcgatagaaattgaaacctggcgcaatagatatagtaccgcaagggaaagatgaaaaattataaccaagcataatatagcaaggactaacccctataccttctgcataatgaattaactagaaataactttgcaaggagagccaaagctaagacccccgaaaccagacgagctacctaagaacagctaaaagagcacacccgtctatgtagcaaaatagtgggaagatttataggtagaggcgacaaacctaccgagcctggtgatagctggttgtccaagatagaatcttagttcaactttaaatttgcccacagaaccctctaaatccccttgtaaatttaactgttagtccaaagaggaacagctctttggacactaggaaaaaaccttgtagagagagtaaaaaatttaacacccatagtaggcctaaaagcagccaccaattaagaaagcgttcaagctcaacacccactacctaaaaaatcccaaacatataactgaactcctcacacccaattggaccaatctatcaccctatagaagaactaatgttagtataagtaacatgaaaacattctcctccgcataagcctgcgtcagattaaaacactgaactgacaattaacagcccaatatctacaatcaaccaacaagtcattattaccctcactgtcaacccaacacaggcatgctcataaggaaaggttaaaaaaagtaaaaggaactcggcaaatcttaccccgcctgtttaccaaaaacatcacctctagcatcaccagtattagaggcaccgcctgcccagtgacacatgtttaacggccgcggtaccctaaccgtgcaaaggtagcataatcacttgttccttaaatagggacctgtatgaatggctccacgagggttcagctgtctcttacttttaaccagtgaaattgacctgcccgtgaagaggcgggcataacacagcaagacgagaagaccctatggagctttaatttattaatgcaaacagtacctaacaaacccacaggtcctaaactaccaaacctgcattaaaaatttcggttggggcgacctcggagcagaacccaacctccgagcagtacatgctaagacttcaccagtcaaagcgaactactatactcaattgatccaataacttgaccaacggaacaagttaccctagggataacagcgcaatcctattctagagtccatatcaacaatagggtttacgacctcgatgttggatcaggacatcccgatggtgcagccgctattaaaggttcgtttgttcaacgattaaagtcctacgtgatctgagttcagaccggagtaatccaggtcggtttctatctacnttcaaattcctccctgtacgaaaggacaagagaaataaggcctacttcacaaagcgccttcccccgtaaatgatatcatctcaacttagtattatacccacacccacccaagaacagggtttgttaagatggcagagcccggtaatcgcataaaacttaaaactttacagtcagaggttcaattcctcttcttaacaacatacccatggccaacctcctactcctcattgtacccattctaatcgcaatggcattcctaatgcttaccgaacgaaaaattctaggctatatacaactacgcaaaggccccaacgttgtaggcccctacgggctactacaacccttcgctgacgccataaaactcttcaccaaagagcccctaaaacccgccacatctaccatcaccctctacatcaccgccccgaccttagctctcaccatcgctcttctactatgaacccccctccccatacccaaccccctggtcaacctcaacctaggcctcctatttattctagccacctctagcctagccgtttactcaatcctctgatcagggtgagcatcaaactcaaactacgccctgatcggcgcactgcgagcagtagcccaaacaatctcatatgaagtcaccctagccatcattctactatcaacattactaataagtggctcctttaacctctccacccttatcacaacacaagaacacctctgattactcctgccatcatgacccttggccataatatgatttatctccacactagcagagaccaaccgaacccccttcgaccttgccgaaggggagtccgaactagtctcaggcttcaacatcgaatacgccgcaggccccttcgccctattcttcatagccgaatacacaaacattattataataaacaccctcaccactacaatcttcctaggaacaacatatgacgcactctcccctgaactctacacaacatattttgtcaccaagaccctacttctaacctccctgttcttatgaattcgaacagcatacccccgattccgctacgaccaactcatacacctcctatgaaaaaacttcctaccactcaccctagcattacttatatgatatgtctccatacccattacaatctccagcattccccctcaaacctaagaaatatgtctgataaaagagttactttgatagagtaaataataggagcttaaacccccttatttctaggactatgagaatcgaacccatccctgagaatccaaaattctccgtgccacctatcacaccccatcctaaagtaaggtcagctaaataagctatcgggcccataccccgaaaatgttggttatacccttcccgtactaattaatcccctggcccaacccgtcatctactctaccatctttgcaggcacactcatcacagcgctaagctcgcactgattttttacctgagtaggcctagaaataaacatgctagcttttattccagttctaaccaaaaaaataaaccctcgttccacagaagctgccatcaagtatttcctcacgcaagcaaccgcatccataatccttctaatagctatcctcttcaacaatatactctccggacaatgaaccataaccaatactaccaatcaatactcatcattaataatcataatggctatagcaataaaactaggaatagccccctttcacttctgagtcccagaggttacccaaggcacccctctgacatccggcctgcttcttctcacatgacaaaaactagcccccatctcaatcatataccaaatctctccctcactaaacgtaagccttctcctcactctctcaatcttatccatcatagcaggcagttgaggtggattaaaccaaacccagctacgcaaaatcttagcatactcctcaattacccacataggatgaataatagcagttctaccgtacaaccctaacataaccattcttaatttaactatttatattatcctaactactaccgcattcctactactcaacttaaactccagcaccacgaccctactactatctcgcacctgaaacaagctaacatgactaacacccttaattccatccaccctcctctccctaggaggcctgcccccgctaaccggctttttgcccaaatgggccattatcgaagaattcacaaaaaacaatagcctcatcatccccaccatcatagccaccatcaccctccttaacctctacttctacctacgcctaatctactccacctcaatcacactactccccatatctaacaacgtaaaaataaaatgacagtttgaacatacaaaacccaccccattcctccccacactcatcgcccttaccacgctactcctacctatctccccttttatactaataatcttatagaaatttaggttaaatacagaccaagagccttcaaagccctcagtaagttgcaatacttaatttctgtaacagctaaggactgcaaaaccccactctgcatcaactgaacgcaaatcagccactttaattaagctaagcccttactagaccaatgggacttaaacccacaaacacttagttaacagctaagcaccctaatcaactggcttcaatctacttctcccgccgccgggaaaaaaggcgggagaagccccggcaggtttgaagctgcttcttcgaatttgcaattcaatatgaaaatcacctcggagctggtaaaaagaggcctaacccctgtctttagatttacagtccaatgcttcactcagccattttacctcacccccactgatgttcgccgaccgttgactattctctacaaaccacaaagacattggaacactatacctattattcggcgcatgagctggagtcctaggcacagctctaagcctccttattcgagccgagctgggccagccaggcaaccttctaggtaacgaccacatctacaacgttatcgtcacagcccatgcatttgtaataatcttcttcatagtaatacccatcataatcggaggctttggcaactgactagttcccctaataatcggtgcccccgatatggcgtttccccgcataaacaacataagcttctgactcttacctccctctctcctactcctgctcgcatctgctatagtggaggccggagcaggaacaggttgaacagtctaccctcccttagcagggaactactcccaccctggagcctccgtagacctaaccatcttctccttacacctagcaggtgtctcctctatcttaggggccatcaatttcatcacaacaattatcaatataaaaccccctgccataacccaataccaaacgcccctcttcgtctgatccgtcctaatcacagcagtcctacttctcctatctctcccagtcctagctgctggcatcactatactactaacagaccgcaacctcaacaccaccttcttcgaccccgccggaggaggagaccccattctataccaacacctattctgatttttcggtcaccctgaagtttatattcttatcctaccaggcttcggaataatctcccatattgtaacttactactccggaaaaaaagaaccatttggatacataggtatggtctgagctatgatatcaattggcttcctagggtttatcgtgtgagcacaccacatatttacagtaggaatagacgtagacacacgagcatatttcacctccgctaccataatcatcgctatccccaccggcgtcaaagtatttagctgactcgccacactccacggaagcaatatgaaatgatctgctgcagtgctctgagccctaggattcatctttcttttcaccgtaggtggcctgactggcattgtattagcaaactcatcactagacatcgtactacacgacacgtactacgttgtagcccacttccactatgtcctatcaataggagctgtatttgccatcataggaggcttcattcactgatttcccctattctcaggctacaccctagaccaaacctacgccaaaatccatttcactatcatattcatcggcgtaaatctaactttcttcccacaacactttctcggcctatccggaatgccccgacgttactcggactaccccgatgcatacaccacatgaaacatcctatcatctgtaggctcattcatttctctaacagcagtaatattaataattttcatgatttgagaagccttcgcttcgaagcgaaaagtcctaatagtagaagaaccctccataaacctggagtgactatatggatgccccccaccctaccacacattcgaagaacccgtatacataaaatctagacaaaaaaggaaggaatcgaaccccccaaagctggtttcaagccaaccccatggcctccatgactttttcaaaaaggtattagaaaaaccatttcataactttgtcaaagttaaattataggctaaatcctatatatcttaatggcacatgcagcgcaagtaggtctacaagacgctacttcccctatcatagaagagcttatcacctttcatgatcacgccctcataatcattttccttatctgcttcctagtcctgtatgcccttttcctaacactcacaacaaaactaactaatactaacatctcagacgctcaggaaatagaaaccgtctgaactatcctgcccgccatcatcctagtcctcatcgccctcccatccctacgcatcctttacataacagacgaggtcaacgatccctcccttaccatcaaatcaattggccaccaatggtactgaacctacgagtacaccgactacggcggactaatcttcaactcctacatacttcccccattattcctagaaccaggcgacctgcgactccttgacgttgacaatcgagtagtactcccgattgaagcccccattcgtataataattacatcacaagacgtcttgcactcatgagctgtccccacattaggcttaaaaacagatgcaattcccggacgtctaaaccaaaccactttcaccgctacacgaccgggggtatactacggtcaatgctctgaaatctgtggagcaaaccacagtttcatgcccatcgtcctagaattaattcccctaaaaatctttgaaatagggcccgtatttaccctatagcaccccctctaccccctctagagcccactgtaaagctaacttagcattaaccttttaagttaaagattaagagaaccaacacctctttacagtgaaatgccccaactaaatactaccgtatggcccaccataattacccccatactccttacactattcctcatcacccaactaaaaatattaaacacaaactaccacctacctccctcaccaaagcccataaaaataaaaaattataacaaaccctgagaaccaaaatgaacgaaaatctgttcgcttcattcattgcccccacaatcctaggcctacccgccgcagtactgatcattctatttccccctctattgatccccacctccaaatatctcatcaacaaccgactaatcaccacccaacaatgactaatcaaactaacctcaaaacaaatgataaccatacacaacactaaaggacgaacctgatctcttatactagtatccttaatcatttttattgccacaactaacctcctcggactcctgcctcactcatttacaccaaccacccaactatctataaacctagccatggccatccccttatgagcgggcgcagtgattataggctttcgctctaagattaaaaatgccctagcccacttcttaccacaaggcacacctacaccccttatccccatactagttattatcgaaaccatcagcctactcattcaaccaatagccctggccgtacgcctaaccgctaacattactgcaggccacctactcatgcacctaattggaagcgccaccctagcaatatcaaccattaaccttccctctacacttatcatcttcacaattctaattctactgactatcctagaaatcgctgtcgccttaatccaagcctacgttttcacacttctagtaagcctctacctgcacgacaacacataatgacccaccaatcacatgcctatcatatagtaaaacccagcccatgacccctaacaggggccctctcagccctcctaatgacctccggcctagccatgtgatttcacttccactccataacgctcctcatactaggcctactaaccaacacactaaccatataccaatgatggcgcgatgtaacacgagaaagcacataccaaggccaccacacaccacctgtccaaaaaggccttcgatacgggataatcctatttattacctcagaagtttttttcttcgcaggatttttctgagccttttaccactccagcctagcccctaccccccaattaggagggcactggcccccaacaggcatcaccccgctaaatcccctagaagtcccactcctaaacacatccgtattactcgcatcaggagtatcaatcacctgagctcaccatagtctaatagaaaacaaccgaaaccaaataattcaagcactgcttattacaattttactgggtctctattttaccctcctacaagcctcagagtacttcgagtctcccttcaccatttccgacggcatctacggctcaacattttttgtagccacaggcttccacggacttcacgtcattattggctcaactttcctcactatctgcttcatccgccaactaatatttcactttacatccaaacatcactttggcttcgaagccgccgcctgatactggcattttgtagatgtggtttgactatttctgtatgtctccatctattgatgagggtcttactcttttagtataaatagtaccgttaacttccaattaactagttttgacaacattcaaaaaagagtaataaacttcgccttaattttaataatcaacaccctcctagccttactactaataattattacattttgactaccacaactcaacggctacatagaaaaatccaccccttacgagtgcggcttcgaccctatatcccccgcccgcgtccctttctccataaaattcttcttagtagctattaccttcttattatttgatctagaaattgccctccttttacccctaccatgagccctacaaacaactaacctgccactaatagttatgtcatccctcttattaatcatcatcctagccctaagtctggcctatgagtgactacaaaaaggattagactgaaccgaattggtatatagtttaaacaaaacgaatgatttcgactcattaaattatgataatcatatttaccaaatgcccctcatttacataaatattatactagcatttaccatctcacttctaggaatactagtatatcgctcacacctcatatcctccctactatgcctagaaggaataatactatcgctgttcattatagctactctcataaccctcaacacccactccctcttagccaatattgtgcctattgccatactagtctttgccgcctgcgaagcagcggtgggcctagccctactagtctcaatctccaacacatatggcctagactacgtacataacctaaacctcctccaatgctaaaactaatcgtcccaacaattatattactaccactgacatgactttccaaaaaacacataatttgaatcaacacaaccacccacagcctaattattagcatcatccctctactattttttaaccaaatcaacaacaacctatttagctgttccccaaccttttcctccgaccccctaacaacccccctcctaatactaactacctgactcctacccctcacaatcatggcaagccaacgccacttatccagtgaaccactatcacgaaaaaaactctacctctctatactaatctccctacaaatctccttaattataacattcacagccacagaactaatcatattttatatcttcttcgaaaccacacttatccccaccttggctatcatcacccgatgaggcaaccagccagaacgcctgaacgcaggcacatacttcctattctacaccctagtaggctcccttcccctactcatcgcactaatttacactcacaacaccctaggctcactaaacattctactactcactctcactgcccaagaactatcaaactcctgagccaacaacttaatatgactagcttacacaatagcttttatagtaaagatacctctttacggactccacttatgactccctaaagcccatgtcgaagcccccatcgctgggtcaatagtacttgccgcagtactcttaaaactaggcggctatggtataatacgcctcacactcattctcaaccccctgacaaaacacatagcctaccccttccttgtactatccctatgaggcataattataacaagctccatctgcctacgacaaacagacctaaaatcgctcattgcatactcttcaatcagccacatagccctcgtagtaacagccattctcatccaaaccccctgaagcttcaccggcgcagtcattctcataatcgcccacgggcttacatcctcattactattctgcctagcaaactcaaactacgaacgcactcacagtcgcatcataatcctctctcaaggacttcaaactctactcccactaatagctttttgatgacttctagcaagcctcgctaacctcgccttaccccccactattaacctactgggagaactctctgtgctagtaaccacgttctcctgatcaaatatcactctcctacttacaggactcaacatactagtcacagccctatactccctctacatatttaccacaacacaatggggctcactcacccaccacattaacaacataaaaccctcattcacacgagaaaacaccctcatgttcatacacctatcccccattctcctcctatccctcaaccccgacatcattaccgggttttcctcttgtaaatatagtttaaccaaaacatcagattgtgaatctgacaacagaggcttacgaccccttatttaccgagaaagctcacaagaactgctaactcatgcccccatgtctaacaacatggctttctcaacttttaaaggataacagctatccattggtcttaggccccaaaaattttggtgcaactccaaataaaagtaataaccatgcacactactataaccaccctaaccctgacttccctaattccccccatccttaccaccctcgttaaccctaacaaaaaaaactcatacccccattatgtaaaatccattgtcgcatccacctttattatcagtctcttccccacaacaatattcatgtgcctagaccaagaagttattatctcgaactgacactgagccacaacccaaacaacccagctctccctaagcttcaaactagactacttctccataatattcatccctgtagcattgttcgttacatggtccatcatagaattctcactgtgatatataaactcagacccaaacattaatcagttcttcaaatatctactcatcttcctaattaccatactaatcttagttaccgctaacaacctattccaactgttcatcggctgagagggcgtaggaattatatccttcttgctcatcagttgatgatacgcccgagcagatgccaacacagcagccattcaagcaatcctatacaaccgtatcggcgatatcggtttcatcctcgccttagcatgatttatcctacactccaactcatgagacccacaacaaatagcccttctaaacgctaatccaagcctcaccccactactaggcctcctcctagcagcagcaggcaaatcagcccaattaggtctccacccctgactcccctcagccatagaaggccccaccccagtctcagccctactccactcaagcactatagttgtagcaggaatcttcttactcatccgcttccaccccctagcagaaaatagcccactaatccaaactctaacactatgcttaggcgctatcaccactctgttcgcagcagtctgcgcccttacacaaaatgacatcaaaaaaatcgtagccttctccacttcaagtcaactaggactcataatagttacaatcggcatcaaccaaccacacctagcattcctgcacatctgtacccacgccttcttcaaagccatactatttatgtgctccgggtccatcatccacaaccttaacaatgaacaagatattcgaaaaataggaggactactcaaaaccatacctctcacttcaacctccctcaccattggcagcctagcattagcaggaatacctttcctcacaggtttctactccaaagaccacatcatcgaaaccgcaaacatatcatacacaaacgcctgagccctatctattactctcatcgctacctccctgacaagcgcctatagcactcgaataattcttctcaccctaacaggtcaacctcgcttccccacccttactaacattaacgaaaataaccccaccctactaaaccccattaaacgcctggcagccggaagcctattcgcaggatttctcattactaacaacatttcccccgcatcccccttccaaacaacaatccccctctacctaaaactcacagccctcgctgtcactttcctaggacttctaacagccctagacctcaactacctaaccaacaaacttaaaataaaatccccactatgcacattttatttctccaacatactcggattctaccctagcatcacacaccgcacaatcccctatctaggccttcttacgagccaaaacctgcccctactcctcctagacctaacctgactagaaaagctattacctaaaacaatttcacagcaccaaatctccacctccatcatcacctcaacccaaaaaggcataattaaactttacttcctctctttcttcttcccactcatcctaaccctactcctaatcacataacctattcccccgagcaatctcaattacaatatatacaccaacaaacaatgttcaaccagtaactactactaatcaacgcccataatcatacaaagcccccgcaccaataggatcctcccgaatcaaccctgacccctctccttcataaattattcagcttcctacactattaaagtttaccacaaccaccaccccatcatactctttcacccacagcaccaatcctacctccatcgctaaccccactaaaacactcaccaagacctcaacccctgacccccatgcctcaggatactcctcaatagccatcgctgtagtatatccaaagacaaccatcattccccctaaataaattaaaaaaactattaaacccatataacctcccccaaaattcagaataataacacacccgaccacaccgctaacaatcaatactaaacccccataaataggagaaggcttagaagaaaaccccacaaaccccattactaaacccacactcaacagaaacaaagcatacatcattattctcgcacggactacaaccacgaccaatgatatgaaaaaccatcgttgtatttcaactacaagaacaccaatgaccccaatacgcaaaactaaccccctaataaaattaattaaccactcattcatcgacctccccaccccatccaacatctccgcatgatgaaacttcggctcactccttggcgcctgcctgatcctccaaatcaccacaggactattcctagccatgcactactcaccagacgcctcaaccgccttttcatcaatcgcccacatcactcgagacgtaaattatggctgaatcatccgctaccttcacgccaatggcgcctcaatattctttatctgcctcttcctacacatcgggcgaggcctatattacggatcatttctctactcagaaacctgaaacatcggcattatcctcctgcttgcaactatagcaacagccttcataggctatgtcctcccgtgaggccaaatatcattctgaggggccacagtaattacaaacttactatccgccatcccatacattgggacagacctagttcaatgaatctgaggaggctactcagtagacagtcccaccctcacacgattctttacctttcacttcatcttgcccttcattattgcagccctagcagcactccacctcctattcttgcacgaaacgggatcaaacaaccccctaggaatcacctcccattccgataaaatcaccttccacccttactacacaatcaaagacgccctcggcttacttctcttccttctctccttaatgacattaacactattctcaccagacctcctaggcgacccagacaattataccctagccaaccccttaaacacccctccccacatcaagcccgaatgatatttcctattcgcctacacaattctccgatccgtccctaacaaactaggaggcgtccttgccctattactatccatcctcatcctagcaataatccccatcctccatatatccaaacaacaaagcataatatttcgcccactaagccaatcactttattgactcctagccgcagacctcctcattctaacctgaatcggaggacaaccagtaagctacccttttaccatcattggacaagtagcatccgtactatacttcacaacaatcctaatcctaataccaactatctccctaattgaaaacaaaatactcaaatgggcctgtccttgtagtataaactaatacaccagtcttgtaaaccggagatgaaaacctttttccaaggacaaatcagagaaaaagtctttaactccaccattagcacccaaagctaagattctaatttaaactattctctgttctttcatggggaagcagatttgggtaccacccaagtattgactcacccatcaacaaccgctatgtatttcgtacattactgccagccaccatgaatattgtacggtaccataaatacttgaccacctgtagtacataaaaacccaatccacatcaaaaccccctccccatgcttacaagcaagtacagcaatcaaccctcaactatcacacatcaactgcaactccaaagccacccctcacccactaggataccaacaaacctacccacccttaacagtacatagtacataaagccatttaccgtacatagcacattacagtcaaatcccttctcgtccccatggatgacccccctcagataggggtcccttgaccaccatcctccgtgaaatcaatatcccgcacaagagtgctactctcctcgctccgggcccataacacttgggggtagctaaagtgaactgtatccgacatctggttcctacttcagggtcataaagcctaaatagcccacacgttccccttaaataagacatcacgatg

SEQ ID NO: 477 - DNA, 16569 bp, Homo sapiens mitochondrial
  3107: "n" refers to a nucleotide at position 3107 of the Cambridge Reference Sequence (CRS, Anderson et al. 1981 Nature 290:457-465), later determined to be absent from the human mtDNA sequence according to the revised CRS (rCRS, Andrews et al. 1999 Nature Genetics 23:147); "n" therefore represents a single nucleotide deletion at a position corresponding to nucleotide 3107 of SEQ ID NO:1 as provided herein.
gatcacaggtctatcaccctattaaccactcacgggagctctccatgcatttggtattttcgtctggggggtatgcacgcgatagcattgcgagacgctggagccggagcaccctatgtcgcagtatctgtctttgattcctgcctcatcctattatttatcgcacctacgttcaatattacaggcgaacatacttactaaagtgtgttaattaattaatgcttgtaggacataataataacaattgaatgtctgcacagccactttccacacagacatcataacaaaaaatttccaccaaaccccccctcccccgcttctggccacagcacttaaacacatctctgccaaaccccaaaaacaaagaaccctaacaccagcctaaccagatttcaaattttatcttttggcggtatgcacttttaacagtcaccccccaactaacacattattttcccctcccactcccatactactaatctcatcaatacaacccccgcccatcctacccagcacacacacaccgctgctaaccccataccccgaaccaaccaaaccccaaagacaccccccacagtttatgtagcttacctcctcaaagcaatacactgaaaatgtttagacgggctcacatcaccccataaacaaataggtttggtcctagcctttctattagctcttagtaagattacacatgcaagcatccccgttccagtgagttcaccctctaaatcaccacgatcaaaagggacaagcatcaagcacgcagcaatgcagctcaaaacgcttagcctagccacacccccacgggaaacagcagtgattaacctttagcaataaacgaaagtttaactaagctatactaaccccagggttggtcaatttcgtgccagccaccgcggtcacacgattaacccaagtcaatagaagccggcgtaaagagtgttttagatcaccccctccccaataaagctaaaactcacctgagttgtaaaaaactccagttgacacaaaatagactacgaaagtggctttaacatatctgaacacacaatagctaagacccaaactgggattagataccccactatgcttagccctaaacctcaacagttaaatcaacaaaactgctcgccagaacactacgagccacagcttaaaactcaaaggacctggcggtgcttcatatccctctagaggagcctgttctgtaatcgataaaccccgatcaacctcaccacctcttgctcagcctatataccgccatcttcagcaaaccctgatgaaggctacaaagtaagcgcaagtacccacgtaaagacgttaggtcaaggtgtagcccatgaggtggcaagaaatgggctacattttctaccccagaaaactacgatagcccttatgaaacttaagggtcgaaggtggatttagcagtaaactgagagtagagtgcttagttgaacagggccctgaagcgcgtacacaccgcccgtcaccctcctcaagtatacttcaaaggacatttaactaaaacccctacgcatttatatagaggagacaagtcgtaacatggtaagtgtactggaaagtgcacttggacgaaccagagtgtagcttaacacaaagcacccaacttacacttaggagatttcaacttaacttgaccgctctgagctaaacctagccccaaacccactccaccttactaccagacaaccttagccaaaccatttacccaaataaagtataggcgatagaaattgaaacctggcgcaatagatatagtaccgcaagggaaagatgaaaaattataaccaagcataatatagcaaggactaacccctataccttctgcataatgaattaactagaaataactttgcaaggagagccaaagctaagacccccgaaaccagacgagctacctaagaacagctaaaagagcacacccgtctatgtagcaaaatagtgggaagatttataggtagaggcgacaaacctaccgagcctggtgatagctggttgtccaagatagaatcttagttcaactttaaatttgcccacagaaccctctaaatccccttgtaaatttaactgttagtccaaagaggaacagctctttggacactaggaaaaaaccttgtagagagagtaaaaaatttaacacccatagtaggcctaaaagcagccaccaattaagaaagcgttcaagctcaacacccactacctaaaaaatcccaaacatataactgaactcctcacacccaattggaccaatctatcaccctatagaagaactaatgttagtataagtaacatgaaaacattctcctccgcataagcctgcgtcagattaaaacactgaactgacaattaacagcccaatatctacaatcaaccaacaagtcattattaccctcactgtcaacccaacacaggcatgctcataaggaaaggttaaaaaaagtaaaaggaactcggcaaatcttaccccgcctgtttaccaaaaacatcacctctagcatcaccagtattagaggcaccgcctgcccagtgacacatgtttaacggccgcggtaccctaaccgtgcaaaggtagcataatcacttgttccttaaatagggacctgtatgaatggctccacgagggttcagctgtctcttacttttaaccagtgaaattgacctgcccgtgaagaggcgggcatgacacagcaagacgagaagaccctatggagctttaatttattaatgcaaacagtacctaacaaacccacaggtcctaaactaccaaacctgcattaaaaatttcggttggggcgacctcggagcagaacccaacctccgagcagtacatgctaagacttcaccagtcaaagcgaactactatactcaattgatccaataacttgaccaacggaacaagttaccctagggataacagcgcaatcctattctagagtccatatcaacaatagggtttacgacctcgatgttggatcaggacatcccaatggtgcagccgctattaaaggttcgtttgttcaacgattaaagtcctacgtgatctgagttcagaccggagtaatccaggtcggtttctatctacnttcaaattcctccctgtacgaaaggacaagagaaataaggcctacttcacaaagcgccttcccccgtaaatgatatcatctcaacttagtattatacccacacccacccaagaacagggtttgttaagatggcagagcccggtaatcgcataaaacttaaaactttacagtcagaggttcaattcctcttcttaacaacatacccatggccaacctcctactcctcattgtacccattctaatcgcaatggcattcctaatgcttaccgaacgaaaaattctaggctatatacaactacgcaaaggccccaacgttgtaggcccctacgggctactacaacccttcgctgacgccataaaactcttcaccaaagagcccctaaaacccgccacatctaccatcaccctctacatcaccgccccgaccttagctctcaccatcgctcttctactatgaacccccctccccatacccaaccccctggtcaacctcaacctaggcctcctatttattctagccacctctagcctagccgtttactcaatcctctgatcagggtgagcatcaaactcaaactacgccctgatcggcgcactgcgagcagtagcccaaacaatctcatatgaagtcaccctagccatcattctactatcaacattactaataagtggctcctttaacctctccacccttatcacaacacaagaacacctctgattactcctgccatcatgacccttggccataatatgatttatctccacactagcagagaccaaccgaacccccttcgaccttgccgaaggggagtccgaactagtctcaggcttcaacatcgaatacgccgcaggccccttcgccctattcttcatagccgaatacacaaacattattataataaacaccctcaccactacaatcttcctaggaacaacatatgacgcactctcccctgaactctacacaacatattttgtcaccaagaccctacttctaacctccctgttcttatgaattcgaacagcatacccccgattccgctacgaccaactcatacacctcctatgaaaaaacttcctaccactcaccctagcattacttatatgacatgtctccatacccattacaatctccagcattccccctcaaacctaagaaatatgtctgataaaagagttactttgatagagtaaataataggagcttaaacccccttatttctaggactatgagaatcgaacccatccctgagaatccaaaattctccgtgccacctatcacaccccatcctaaagtaaggtcagctaaataagctatcgggcccataccccgaaaatgttggttatacccttcccgtactaattaatcccctggcccaacccgtcatctactctaccatctttgcaggcacactcatcacagcgctaagctcgcactgattttttacctgagtaggcctagaaataaacatgctagcttttattccagttctaaccaaaaaaataaaccctcgttccacagaagctgccatcaagtatttcctcacgcaagcaaccgcatccataatccttctaatagctatcctcttcaacaatatactctccggacaatgaaccataaccaatactaccaatcaatactcatcattaataatcataatggctatagcaataaaactaggaatagccccctttcacttctgagtcccagaggttacccaaggcacccctctgacatccggcctgcttcttctcacatgacaaaaactagcccccatctcaatcatataccaaatctctccctcactaaacgtaagccttctcctcactctctcaatcttatccatcatagcaggcagttgaggtggattaaaccaaacccagctacgcaaaatcttagcatactcctcaattacccacataggatgaataatagcagttctaccgtacaaccctaacataaccattcttaatttaactatttatattatcctaactactaccgcattcctactactcaacttaaactccagcaccacgaccctactactatctcgcacctgaaacaagctaacatgactaacacccttaattccatccaccctcctctccctaggaggcctgcccccgctaaccggctttttgcccaaatgggccattatcgaagaattcacaaaaaacaatagcctcatcatccccaccatcatagccaccatcaccctccttaacctctacttctacctacgcctaatctactccacctcaatcacactactccccatatctaacaacgtaaaaataaaatgacagtttgaacatacaaaacccaccccattcctccccacactcatcgcccttaccacgctactcctacctatctccccttttatactaataatcttatagaaatttaggttaaatacagaccaagagccttcaaagccctcagtaagttgcaatacttaatttctgtaacagctaaggactgcaaaaccccactctgcatcaactgaacgcaaatcagccactttaattaagctaagcccttactagaccaatgggacttaaacccacaaacacttagttaacagctaagcaccctaatcaactggcttcaatctacttctcccgccgccgggaaaaaaggcgggagaagccccggcaggtttgaagctgcttcttcgaatttgcaattcaatatgaaaatcacctcggagctggtaaaaagaggcctaacccctgtctttagatttacagtccaatgcttcactcagccattttacctcacccccactgatgttcgccgaccgttgactattctctacaaaccacaaagacattggaacactatacctattattcggcgcatgagctggagtcctaggcacagctctaagcctccttattcgagccgagctgggccagccaggcaaccttctaggtaacgaccacatctacaacgttatcgtcacagcccatgcatttgtaataatcttcttcatagtaatacccatcataatcggaggctttggcaactgactagttcccctaataatcggtgcccccgatatggcgtttccccgcataaacaacataagcttctgactcttacctccctctctcctactcctgctcgcatctgctatagtggaggccggagcaggaacaggttgaacagtctaccctcccttagcagggaactactcccaccctggagcctccgtagacctaaccatcttctccttacacctagcaggtgtctcctctatcttaggggccatcaatttcatcacaacaattatcaatataaaaccccctgccataacccaataccaaacgcccctcttcgtctgatccgtcctaatcacagcagtcctacttctcctatctctcccagtcctagctgctggcatcactatactactaacagaccgcaacctcaacaccaccttcttcgaccccgccggaggaggagaccccattctataccaacacctattctgatttttcggtcaccctgaagtttatattcttatcctaccaggcttcggaataatctcccatattgtaacttactactccggaaaaaaagaaccatttggatacataggtatggtctgagctatgatatcaattggcttcctagggtttatcgtgtgagcacaccatatatttacagtaggaatagacgtagacacacgagcatatttcacctccgctaccataatcatcgctatccccaccggcgtcaaagtatttagctgactcgccacactccacggaagcaatatgaaatgatctgctgcagtgctctgagccctaggattcatctttcttttcaccgtaggtggcctgactggcattgtattagcaaactcatcactagacatcgtactacacgacacgtactacgttgtagctcacttccactatgtcctatcaataggagctgtatttgccatcataggaggcttcattcactgatttcccctattctcaggctacaccctagaccaaacctacgccaaaatccatttcactatcatattcatcggcgtaaatctaactttcttcccacaacactttctcggcctatccggaatgccccgacgttactcggactaccccgatgcatacaccacatgaaacatcctatcatctgtaggctcattcatttctctaacagcagtaatattaataattttcatgatttgagaagccttcgcttcgaagcgaaaagtcctaatagtagaagaaccctccataaacctggagtgactatatggatgccccccaccctaccacacattcgaagaacccgtatacataaaatctagacaaaaaaggaaggaatcgaaccccccaaagctggtttcaagccaaccccatggcctccatgactttttcaaaaaggtattagaaaaaccatttcataactttgtcaaagttaaattataggctaaatcctatatatcttaatggcacatgcagcgcaagtaggtctacaagacgctacttcccctatcatagaagagcttatcacctttcatgatcacgccctcataatcattttccttatctgcttcctagtcctgtatgcccttttcctaacactcacaacaaaactaactaatactaacatctcagacgctcaggaaatagaaaccgtctgaactatcctgcccgccatcatcctagtcctcatcgccctcccatccctacgcatcctttacataacagacgaggtcaacgatccctcccttaccatcaaatcaattggccaccaatggtactgaacctacgagtacaccgactacggcggactaatcttcaactcctacatacttcccccattattcctagaaccaggcgacctgcgactccttgacgttgacaatcgagtagtactcccgattgaagcccccattcgtataataattacatcacaagacgtcttgcactcatgagctgtccccacattaggcttaaaaacagatgcaattcccggacgtctaaaccaaaccactttcaccgctacacgaccgggggtatactacggtcaatgctctgaaatctgtggagcaaaccacagtttcatgcccatcgtcctagaattaattcccctaaaaatctttgaaatagggcccgtatttaccctatagcaccccctctaccccctctagagcccactgtaaagctaacttagcattaaccttttaagttaaagattaagagaaccaacacctctttacagtgaaatgccccaactaaatactaccgtatggcccaccataattacccccatactccttacactattcctcatcacccaactaaaaatattaaacacaaactaccacctacctccctcaccaaagcccataaaaataaaaaattataacaaaccctgagaaccaaaatgaacgaaaatctgttcgcttcattcattgcccccacaatcctaggcctacccgccgcagtactgatcattctatttccccctctattgatccccacctccaaatatctcatcaacaaccgactaatcaccacccaacaatgactaatcaaactaacctcaaaacaaatgataaccatacacaacactaaaggacgaacctgatctcttatactagtatccttaatcatttttattgccacaactaacctcctcggactcctgcctcactcatttacaccaaccacccaactatctataaacctagccatggccatccccttatgagcgggcgcagtgattataggctttcgctctaagattaaaaatgccctagcccacttcttaccacaaggcacacctacaccccttatccccatactagttattatcgaaaccatcagcctactcattcaaccaatagccctggccgtacgcctaaccgctaacattactgcaggccacctactcatgcacctaattggaagcgccaccctagcaatatcaaccattaaccttccctctacacttatcatcttcacaattctaattctactgactatcctagaaatcgctgtcgccttaatccaagcctacgttttcacacttctagtaagcctctacctgcacgacaacacataatgacccaccaatcacatgcctatcatatagtaaaacccagcccatgacccctaacaggggccctctcagccctcctaatgacctccggcctagccatgtgatttcacttccactccataacgctcctcatactaggcctactaaccaacacactaaccatataccaatgatggcgcgatgtaacacgagaaagcacataccaaggccaccacacaccacctgtccaaaaaggccttcgatacgggataatcctatttattacctcagaagtttttttcttcgcaggatttttctgagccttttaccactccagcctagcccctaccccccaattaggagggcactggcccccaacaggcatcaccccgctaaatcccctagaagtcccactcctaaacacatccgtattactcgcatcaggagtatcaatcacctgagctcaccatagtctaatagaaaacaaccgaaaccaaataattcaagcactgcttattacaattttactgggtctctattttaccctcctacaagcctcagagtacttcgagtctcccttcaccatttccgacggcatctacggctcaacattttttgtagccacaggcttccacggacttcacgtcattattggctcaactttcctcactatctgcttcatccgccaactaatatttcactttacatccaaacatcactttggcttcgaagccgccgcctgatactggcattttgtagatgtggtttgactatttctgtatgtctccatctattgatgagggtcttactcttttagtataaatagtaccgttaacttccaattaactagttttgacaacattcaaaaaagagtaataaacttcgccttaattttaataaccaacaccctcctagccttactactaataattattacattttgactaccacaactcaacggctacatagaaaaatccaccccttacgagtgcggcttcgaccctatatcccccgcccgcgtccctttctccataaaattcttcttagtagctattaccttcttattatttgatctagaaattgccctccttttacccctaccatgagccctacaaacaactaacctgccactaatagttatgtcatccctcttattaatcatcatcctagccctaagtctggcctatgagtgactacaaaaaggattagactgaaccgaattggtatatagtttaaacaaaacgaatgatttcgactcattaaattatgataatcatatttaccaaatgcccctcatttacataaatattatactagcatttaccatctcacttctaggaatactagtatatcgctcacacctcatatcctccctactatgcctagaaggaataatactatcgctgttcattatagctactctcataaccctcaacacccactccctcttagccaatattgtgcctattgccatactagtctttgccgcctgcgaagcagcggtgggcctagccctactagtctcaatctccaacacatatggcctagactacgtacataacctaaacctactccaatgctaaaactaatcgtcccaacaattatattactaccactgacatgactttccaaaaaacacataatttgaatcaacacaaccacccacagcctaattattagcatcatccctctactattttttaaccaaatcaacaacaacctatttagctgttccccaaccttttcctccgaccccctaacaacccccctcctaatactaactacctgactcctacccctcacaatcatggcaagccaacgccacttatccagtgaaccactatcacgaaaaaaactctacctctctatactaatctccctacaaatctccttaattataacattcacagccacagaactaatcatattttatatcttcttcgaaaccacacttatccccaccttggctatcatcacccgatgaggcaaccagccagaacgcctgaacgcaggcacatacttcctattctacaccctagtaggctcccttcccctactcatcgcactgatttacactcacaacaccctaggctcactaaacattctactactcactctcactgcccaagaactatcaaactcctgagccaacaacttaatatgactagcttacacaatagcttttatagtaaagatacctctttacggactccacttatgactccctaaagcccatgtcgaagcccccatcgctgggtcaatagtacttgccgcagtactcttaaaactaggcggctatggtataatacgcctcacactcattctcaaccccctgacaaaacacatagcctaccccttccttgtactatccctatgaggcataattataacaagctccatctgcctacgacaaacagacctaaaatcgctcattgcatactcttcaatcagccacatagccctcgtagtaacagccattctcatccaaaccccctgaagcttcaccggcgcagtcattctcataatcgcccacggacttacatcctcattactattctgcctagcaaactcaaactacgaacgcactcacagtcgcatcataatcctctctcaaggacttcaaactctactcccactaatagctttttgatgacttctagcaagcctcgctaacctcgccttaccccccactattaacctactgggagaactctctgtgctagtaaccacgttctcctgatcaaatatcactctcctacttacaggactcaacatactagtcacagccctatactccctctacatatttaccacaacacaatggggctcactcacccaccacattaacaacataaaaccctcattcacacgagaaaacaccctcatgttcatacacctatcccccattctcctcctatccctcaaccccgacatcattaccgggttttcctcttgtaaatatagtttaaccaaaacatcagattgtgaatctgacaacagaggcttacgaccccttatttaccgagaaagctcacaagaactgctaactcatgcccccatgtctaacaacatggctttctcaacttttaaaggataacagctatccattggtcttaggccccaaaaattttggtgcaactccaaataaaagtaataaccatgcacactactataaccaccctaaccctgacttccctaattccccccatccttaccaccctcgttaaccctaacaaaaaaaactcatacccccattatgtaaaatccattgtcgcatccacctttattatcagtctcttccccacaacaatattcatgtgcctagaccaagaagttattatctcgaactgacactgagccacaacccaaacaacccagctctccctaagcttcaaactagactacttctccataatattcatccctgtggcattgttcgttacatggtccatcatagaattctcactgtgatatataaactcagacccaaacattaatcagttcttcaaatatctactcatcttcctaattaccatactaatcttagttaccgctaacaacctattccaactgttcatcggctgagagggcgtaggaattatatccttcttgctcatcagttgatgatacgcccgagcagatgccaacacagcagccattcaagcaatcctatacaaccgtatcggcgatatcggtttcatcctcgccttagcatgatttatcctacactccaactcatgagacccacaacaaatagcccttctaaacgctaatccaagcctcaccccactactaggcctcctcctagcagcagcaggcaaatcagcccaattaggtctccacccctgactcccctcagccatagaaggccccaccccagtctcagccctactccactcaagcactatagttgtagcaggaatcttcttactcatccgcttccaccccctagcagaaaatagcccactaatccaaactctaacactatgcttaggcgctatcaccactctgttcgcagcagtctgcgcccttacacaaaatgacatcaaaaaaatcgtagccttctccacttcaagtcaactaggactcataatagttacaatcggcatcaaccaaccacacctagcattcctgcacatctgtacccacgccttcttcaaagccatactatttatgtgctccgggtccatcatccacaaccttaacaatgaacaagatattcgaaaaataggaggactactcaaaaccatacctctcacttcaacctccctcaccattggcagcctagcattagcaggaatacctttcctcacaggtttctactccaaagaccacatcatcgaaaccgcaaacatatcatacacaaacgcctgagccctatctattactctcatcgctacctccctgacaagcgcctatagcactcgaataattcttctcaccctaacaggtcaacctcgcttccccacccttactaacattaacgaaaataaccccaccctactaaaccccattaaacgcctgacagccggaagcctattcgcaggatttctcattactaacaacatttcccccgcatcccccttccaaacaacaatccccctctacctaaaactcacagccctcgctgtcactttcctaggacttctaacagccctagacctcaactacctaaccaacaaacttaaaataaaatccccactatgcacattttatttctccaacatactcggattctaccctagcatcacacaccgcacaatcccctatctaggccttcttacgagccaaaacctgcccctactcctcctagacctaacctgactagaaaagctattacctaaaacaatttcacagcaccaaatctccacctccatcatcacctcaacccaaaaaggcataattaaactttacttcctctctttcttcttcccactcatcctaaccctactcctaatcacataacctattcccccgagcaatctcaattacaatatatacaccaacaaacaatgttcaaccagtaactactactaatcaacgcccataatcatacaaagcccccgcaccaataggatcctcccgaatcaaccctgacccctctccttcataaattattcagcttcctacactattaaagtttaccacaaccaccaccccatcatactctttcacccacagcaccaatcctacctccatcgctaaccccactaaaacactcaccaagacctcaacccctgacccccatgcctcaggatactcctcaatagccatcgctgtagtatatccaaagacaaccatcattccccctaaataaattaaaaaaactattaaacccatataacctcccccaaaattcagaataataacacacccgaccacaccgctaacaatcaatactaaacccccataaataggagaaggcttagaagaaaaccccacaaaccccattactaaacccacactcaacagaaacaaagcatacatcattattctcgcacggactacaaccacgaccaatgatatgaaaaaccatcgttgtatttcaactacaagaacaccaatgaccccaatacgcaaaattaaccccctaataaaattaattaaccactcactcatcgacctccccaccccatccaacatctccgcatgatgaaacttcggctcactccttggcgcctgcctgatcctccaaatcaccacaggactattcctagccatgcactactcaccagacgcctcaaccgccttttcatcaatcgcccacatcactcgagacgtaaattatggctgaatcatccgctaccttcacgccaatggcgcctcaatattctttatctgcctcttcctacacatcgggcgaggcctatattacggatcatttctctactcagaaacctgaaacatcggcattatcctcctgcttgcaactatagcaacagccttcataggctatgtcctcccgtgaggccaaatatcattctgaggggccacagtaattacaaacttactatccgccatcccatacattgggacagacctagttcaatgaatctgaggaggctactcagtagacagtcccaccctcacacgattctttacctttcacttcatcttgcccttcattattgcagccctagcagcactccacctcctattcttgcacgaaacgggatcaaacaaccccctaggaatcacctcccattccgataaaatcaccttccacccttactacacaatcaaagacgccctcggcttacttctcttcattctctccttaatgacattaacactattctcaccagacctcctaggcgacccagacaattataccctagccaaccccttaaacacccctccccacatcaagcccgaatgatatttcctattcgcctacacaattctccgatccgtccctaacaaactaggaggcgtccttgccctattactatccatcctcatcctagcaataatccccatcctccatatatccaaacaacaaagcataatatttcgcccactaagccaatcactttattgactcctagccgcagacctcctcattctaacctgaatcggagggcaaccagtaagctacccttttaccatcattggacaagtagcatccgtactatacttcacaacaatcctaatcctaataccaactatctccctaattgaaaacaaaatactcaaatgggcctgtccttgtagtataaactaatacaccagtcttgtaaaccggagatgaaaacctttttccaaggacaaatcagagaaaaagtctttaactccaccattagcacccaaagctaagattctaatttaaactattctctgttctttcatggggaagcagatttgggtaccacccaagtattgactcacccatcaacaaccgctatgtatttcgtacattactgccagccaccatgaatattgtacggtaccataaatacttgaccacctgtagtacataaaaacccaatccacatcaaaaccccctccccatgcttacaagcaagtacagcaatcaaccctcaactatcacacatcaactgcaactccaaagccacccctcacccactaggataccaacaaacctacccacccttaacagtacatagtacataaagccatttaccgtacatagcacattacagtcaaatcccttctcgtccccatggatgacccccctcagataggggtcccttgaccaccatcctccgtgaaatcaatatcccgcacaagagtgctactctcctcgctccgggcccataacacttgggggtagctaaagtgaactgtatccgacatctggttcctacttcagggtcataaagcctaaatagcccacacgttccccttaaataagacatcacgatg

SEQ ID NO: 478 - DNA, 16569 bp, Homo sapiens mitochondrial
  3107: "n" refers to a nucleotide at position 3107 of the Cambridge Reference Sequence (CRS, Anderson et al. 1981 Nature 290:457-465), later determined to be absent from the human mtDNA sequence according to the revised CRS (rCRS, Andrews et al. 1999 Nature Genetics 23:147); "n" therefore represents a single nucleotide deletion at a position corresponding to nucleotide 3107 of SEQ ID NO:1 as provided herein.
gatcacaggtctatcaccctattaaccactcacgggagctctccatgcatttggtattttcgtctggggggtatgcacgcgatagcattgcgagacgctggagccggagcaccctatgtcgcagtatctgtctttgattcctgcctcatcctattatttatcgcacctacgttcaatattacaggcgaacatacttactaaagtgtgttaattaattaatgcttgtaggacataataataacaattgaatgtctgcacagccactttccacacagacatcataacaaaaaatttccaccaaaccccccctcccccgcttctggccacagcacttaaacacatctctgccaaaccccaaaaacaaagaaccctaacaccagcctaaccagatttcaaattttatcttttggcggtatgcacttttaacagtcaccccccaactaacacattattttcccctcccactcccatactactaatctcatcaatacaacccccgcccatcctacccagcacacacacaccgctgctaaccccataccccgaaccaaccaaaccccaaagacaccccccacagtttatgtagcttacctcctcaaagcaatacactgaaaatgtttagacgggctcacatcaccccataaacaaataggtttggtcctagcctttctattagctcttagtaagattacacatgcaagcatccccgttccagtgagttcaccctctaaatcaccacgatcaaaagggacaagcatcaagcacgcagcaatgcagctcaaaacgcttagcctagccacacccccacgggaaacagcagtgattaacctttagcaataaacgaaagtttaactaagctatactaaccccagggttggtcaatttcgtgccagccaccgcggtcacacgattaacccaagtcaatagaagccggcgtaaagagtgttttagatcaccccctccccaataaagctaaaactcacctgagttgtaaaaaactccagttgacacaaaatagactacgaaagtggctttaacatatctgaacacacaatagctaagacccaaactgggattagataccccactatgcttagccctaaacctcaacagttaaatcaacaaaactgctcgccagaacactacgagccacagcttaaaactcaaaggacctggcggtgcttcatatccctctagaggagcctgttctgtaatcgataaaccccgatcaacctcaccacctcttgctcagcctatataccgccatcttcagcaaaccctgatgaaggctacaaagtaagcgcaagtacccacgtaaagacgttaggtcaaggtgtagcccatgaggtggcaagaaatgggctacattttctaccccagaaaactacgatagcccttatgaaacttaagggtcgaaggtggatttagcagtaaactgagagtagagtgcttagttgaacagggccctgaagcgcgtacacaccgcccgtcaccctcctcaagtatacttcaaaggacatttaactaaaacccctacgcatttatatagaggagacaagtcgtaacatggtaagtgtactggaaagtgcacttggacgaaccagagtgtagcttaacacaaagcacccaacttacacttaggagatttcaacttaacttgaccgctctgagctaaacctagccccaaacccactccaccttactaccagacaaccttagccaaaccatttacccaaataaagtataggcgatagaaattgaaacctggcgcaatagatatagtaccgcaagggaaagatgaaaaattataaccaagcataatatagcaaggactaacccctataccttctgcataatgaattaactagaaataactttgcaaggagagccaaagctaagacccccgaaaccagacgagctacctaagaacagctaaaagagcacacccgtctatgtagcaaaatagtgggaagatttataggtagaggcgacaaacctaccgagcctggtgatagctggttgtccaagatagaatcttagttcaactttaaatttgcccacagaaccctctaaatccccttgtaaatttaactgttagtccaaagaggaacagctctttggacactaggaaaaaaccttgtagagagagtaaaaaatttaacacccatagtaggcctaaaagcagccaccaattaagaaagcgttcaagctcaacacccactacctaaaaaatcccaaacatataactgaactcctcacacccaattggaccaatctatcaccctatagaagaactaatgttagtataagtaacatgaaaacattctcctccgcataagcctgcgtcagattaaaacactgaactgacaattaacagcccaatatctacaatcaaccaacaagtcattattaccctcactgtcaacccaacacaggcatgctcataaggaaaggttaaaaaaagtaaaaggaactcggcaaatcttaccccgcctgtttaccaaaaacatcacctctagcatcaccagtattagaggcaccgcctgcccagtgacacatgtttaacggccgcggtaccctaaccgtgcaaaggtagcataatcacttgttccttaaatagggacctgtatgaatggctccacgagggttcagctgtctcttacttttaaccagtgaaattgacctgcccgtgaagaggcgggcatgacacagcaagacgagaagaccctatggagctttaatttattaatgcaaacagtacctaacaaacccacaggtcctaaactaccaaacctgcattaaaaatttcggttggggcgacctcggagcagaacccaacctccgagcagtacatgctaagacttcaccagtcaaagcgaactactatactcaattgatccaataacttgaccaacggaacaagttaccctagggataacagcgcaatcctattctagagtccatatcaacaatagggtttacgacctcgatgttggatcaggacatcccgatggtgcagccgctattaaaggttcgtttgttcaacgattaaagtcctacgtgatctgagttcagaccggagtaatccaggtcggtttctatctacnttcaaattcctccctgtacgaaaggacaagagaaataaggcctacttcacaaagcgccttcccccgtaaatgatatcatctcaacttagcattatacccacacccacccaagaacagggtttgttaagatggcagagcccggtaatcgcataaaacttaaaactttacagtcagaggttcaattcctcttcttaacaacatacccatggccaacctcctactcctcattgtacccattctaatcgcaatggcattcctaatgcttaccgaacgaaaaattctaggctatatacaactacgcaaaggccccaacgttgtaggcccctacgggctactacaacccttcgctgacgccataaaactcttcaccaaagagcccctaaaacccgccacatctaccatcaccctctacatcaccgccccgaccttagctctcaccatcgctcttctactatgaacccccctccccatacccaaccccctggtcaacctcaacctaggcctcctatttattctagccacctctagcctagccgtttactcaatcctctgatcagggtgagcatcaaactcaaactacgccctgatcggcgcactgcgagcagtagcccaaacaatctcatatgaagtcaccctagccatcattctactatcaacattactaataagtggctcctttaacctctccacccttatcacaacacaagaacacctctgattactcctgccatcatgacccttggccataatatgatttatctccacactagcagagaccaaccgaacccccttcgaccttgccgaaggggagtccgaactagtctcaggcttcaacatcgaatacgccgcaggccccttcgccctattcttcatagccgaatacacaaacattattataataaacaccctcaccactacaatcttcctaggaacaacatatgacgcactctcccctgaactctacacaacatattttgtcaccaagaccctacttctaacctccctgttcttatgaattcgaacagcatacccccgattccgctacgaccaactcatacacctcctatgaaaaaacttcctaccactcaccctagcattacttatatgatatgtctccatacccattacaatctccagcattccccctcaaacctaagaaatatgtctgataaaagagttactttgatagagtaaataataggagcttaaacccccttatttctaggactatgagaatcgaacccatccctgagaatccaaaattctccgtgccacctatcacaccccatcctaaagtaaggtcagctaaataagctatcgggcccataccccgaaaatgttggttatacccttcccgtactaattaatcccctggcccaacccgtcatctactctaccatctttgcaggcacactcatcacagcgctaagctcgcactgattttttacctgagtaggcctagaaataaacatgctagcttttattccagttctaaccaaaaaaataaaccctcgttccacagaagctgccatcaagtatttcctcacgcaagcaaccgcatccataatccttctaatagctatcctcttcaacaatatactctccggacaatgaaccataaccaatactaccaatcaatactcatcattaataatcataatggctatagcaataaaactaggaatagccccctttcacttctgagtcccagaggttacccaaggcacccctctgacatccggcctgcttcttctcacatgacaaaaactagcccccatctcaatcatataccaaatctctccctcactaaacgtaagccttctcctcactctctcaatcttatccatcatagcaggcagttgaggtggattaaaccaaacccagctacgcaaaatcttagcatactcctcaattacccacataggatgaataatagcagttctaccgtacaaccctaacataaccattcttaatttaactatttatattatcctaactactaccgcattcctactactcaacttaaactccagcaccacgaccctactactatctcgcacctgaaacaagctaacatgactaacacccttaattccatccaccctcctctccctaggaggcctgcccccgctaaccggctttttgcccaaatgggccattatcgaagaattcacaaaaaacaatagcctcatcatccccaccatcatagccaccatcaccctccttaacctctacttctacctacgcctaatctactccacctcaatcacactactccccatatctaacaacgtaaaaataaaatgacagtttgaacatacaaaacccaccccattcctccccacactcatcgcccttaccacgctactcctacctatctccccttttatactaataatcttatagaaatttaggttaaatacagaccaagagccttcaaagccctcagtaagttgcaatacttaatttctgtaacagctaaggactgcaaaaccccactctgcatcaactgaacgcaaatcagccactttaattaagctaagcccttactagaccaatgggacttaaacccacaaacacttagttaacagctaagcaccctaatcaactggcttcaatctacttctcccgccgccgggaaaaaaggcgggagaagccccggcaggtttgaagctgcttcttcgaatttgcaattcaatatgaaaatcacctcggagctggtaaaaagaggcctaacccctgtctttagatttacagtccaatgcttcactcagccattttacctcacccccactgatgttcgccgaccgttgactattctctacaaaccacaaagacattggaacactatacctattattcggcgcatgagctggagtcctaggcacagctctaagcctccttattcgagccgagctgggccagccaggcaaccttctaggtaacgaccacatctacaacgttatcgtcacagcccatgcatttgtaataatcttcttcatagtaatacccatcataatcggaggctttggcaactgactagttcccctaataatcggtgcccccgatatggcgtttccccgcataaacaacataagcttctgactcttacctccctctctcctactcctgctcgcatctgctatagtggaggccggagcaggaacaggttgaacagtctaccctcccttagcagggaactactcccaccctggagcctccgtagacctaaccatcttctccttacacctagcaggtgtctcctctatcttaggggccatcaatttcatcacaacaattatcaatataaaaccccctgccataacccaataccaaacgcccctcttcgtctgatccgtcctaatcacagcagtcctacttctcctatctctcccagtcctagctgctggcatcactatactactaacagaccgcaacctcaacaccaccttcttcgaccccgccggaggaggagaccccattctataccaacacctattctgatttttcggtcaccctgaagtttatattcttatcctaccaggcttcggaataatctcccatattgtaacttactactccggaaaaaaagaaccatttggatacataggtatggtctgagctatgatatcaattggcttcctagggtttatcgtgtgagcacaccatatatttacagtaggaatagacgtagacacacgagcatatttcacctccgctaccataatcatcgctatccccaccggcgtcaaagtatttagctgactcgccacactccacggaagcaatatgaaatgatctgctgcagtgctctgagccctaggattcatctttcttttcaccgtaggtggcctgactggcattgtattagcaaactcatcactagacatcgtactacacgacacgtactacgttgtagctcacttccactatgtcctatcaataggagctgtatttgccatcataggaggcttcattcactgatttcccctattctcaggctacaccctagaccaaacctacgccaaaatccatttcactatcatattcatcggcgtaaatctaactttcttcccacaacactttctcggcctatccggaatgccccgacgttactcggactaccccgatgcatacaccacatgaaacatcctatcatctgtaggctcattcatttctctaacagcagtaatattaataattttcatgatttgagaagccttcgcttcgaagcgaaaagtcctaatagtagaagaaccctccataaacctggagtgactatatggatgccccccaccctaccacacattcgaagaacccgtatacataaaatctagacaaaaaaggaaggaatcgaaccccccaaagctggtttcaagccaaccccatggcctccatgactttttcaaaaaggtattagaaaaaccatttcataactttgtcaaagttaaattataggctaaatcctatatatcttaatggcacatgcagcgcaagtaggtctacaagacgctacttcccctatcatagaagagcttatcacctttcatgatcacgccctcataatcattttccttatctgcttcctagtcctgtatgcccttttcctaacactcacaacaaaactaactaatactaacatctcagacgctcaggaaatagaaaccgtctgaactatcctgcccgccatcatcctagtcctcatcgccctcccatccctacgcatcctttacataacagacgaggtcaacgatccctcccttaccatcaaatcaattggccaccaatggtactgaacctacgagtacaccgactacggcggactaatcttcaactcctacatacttcccccattattcctagaaccaggcgacctgcgactccttgacgttgacaatcgagtagtactcccgattgaagcccccattcgtataataattacatcacaagacgtcttgcactcatgagctgtccccacattaggcttaaaaacagatgcaattcccggacgtctaaaccaaaccactttcaccgctacacgaccgggggtatactacggtcaatgctctgaaatctgtggagcaaaccacagtttcatgcccatcgtcctagaattaattcccctaaaaatctttgaaatagggcccgtatttaccctatagcaccccctctaccccctctagagcccactgtaaagctaacttagcattaaccttttaagttaaagattaagagaaccaacacctctttacagtgaaatgccccaactaaatactaccgtatggcccaccataattacccccatactccttacactattcctcatcacccaactaaaaatattaaacacaaactaccacctacctccctcaccaaagcccataaaaataaaaaattataacaaaccctgagaaccaaaatgaacgaaaatctgttcgcttcattcattgcccccacaatcctaggcctacccgccgcagtactgatcattctatttccccctctattgatccccacctccaaatatctcatcaacaaccgactaatcaccacccaacaatgactaatcaaactaacctcaaaacaaatgataaccatacacaacactaaaggacgaacctgatctcttatactagtatccttaatcatttttattgccacaactaacctcctcggactcctgcctcactcatttacaccaaccacccaactatctataaacctagccatggccatccccttatgagcgggcgcagtgattataggctttcgctctaagattaaaaatgccctagcccacttcttaccacaaggcacacctacaccccttatccccatactagttattatcgaaaccatcagcctactcattcaaccaatagccctggccgtacgcctaaccgctaacattactgcaggccacctactcatgcacctaattggaagcgccaccctagcaatatcaaccattaaccttccctctacacttatcatcttcacaattctaattctactgactatcctagaaatcgctgtcgccttaatccaagcctacgttttcacacttctagtaagcctctacctgcacgacaacacataatgacccaccaatcacatgcctatcatatagtaaaacccagcccatgacccctaacaggggccctctcagccctcctaatgacctccggcctagccatgtgatttcacttccactccataacgctcctcatactaggcctactaaccaacacactaaccatataccaatgatggcgcgatgtaacacgagaaagcacataccaaggccaccacacaccacctgtccaaaaaggccttcgatacgggataatcctatttattacctcagaaatttttttcttcgcaggatttttctgagccttttaccactccagcctagcccctaccccccaattaggagggcactggcccccaacaggcatcaccccgctaaatcccctagaagtcccactcctaaacacatccgtattactcgcatcaggagtatcaatcacctgagctcaccatagtctaatagaaagcaaccgaaaccaaataattcaagcactgcttattacaattttactgggtctctattttaccctcctacaagcctcagagtacttcgagtctcccttcaccatttccgacggcatctacggctcaacattttttgtagccacaggcttccacggacttcacgtcattattggctcaactttcctcactatctgcttcatccgccaactaatatttcactttacatccaaacatcactttggcttcgaagccgccgcctgatactggcattttgtagatgtggtttgactatttctgtatgtctccatctattgatgagggtcttactcttttagtataaatagtaccgttaacttccaattaactagttttgacaacattcaaaaaagagtaataaacttcgccttaattttaataatcaacaccctcctagccttactactaataattattacattttgactaccacaactcaacggctacatagaaaaatccaccccttacgagtgcggcttcgaccctatatcccccgcccgcgtccctttctccataaaattcttcttagtagctattaccttcttattatttgatctagaaattgccctccttttacccctaccatgagccctacaaacaactaacctgccactaatagttatgtcatccctcttattaatcatcatcctagccctaagtctggcctatgagtgactacaaaaaggattagactgaaccgaattggtatatagtttaaacaaaacgaatgatttcgactcattaaattatgataatcatatttaccaaatgcccctcatttacataaatattatactagcatttaccatctcacttctaggaatactagtatatcgctcacacctcatatcctccctactatgcctagaaggaataatactatcgctgttcattatagctactctcataaccctcaacacccactccctcttagccaatattgtgcctattgccatactagtctttgccgcctgcgaagcagcggtgggcctagccctactagtctcaatctccaacacatatggcctagactacgtacataacctaaacctactccaatgctaaaactaatcgtcccaacaattatattactaccactgacatgactttccaaaaaacacataatttgaatcaacacaaccacccacagcctaattattagcatcatccctctactattttttaaccaaatcaacaacaacctatttagctgttccccaaccttttcctccgaccccctaacaacccccctcctaatactaactacctgactcctacccctcacaatcatggcaagccaacgccacttatccagtgaaccactatcacgaaaaaaactctacctctctatactaatctccctacaaatctccttaattataacattcacagccacagaactaatcatattttatatcttcttcgaaaccacacttatccccaccttggctatcatcacccgatgaggcaaccagccagaacgcctgaacgcaggcacatacttcctattctacaccctagtaggctcccttcccctactcatcgcactaatttacactcacaacaccctaggctcactaaacattctactactcactctcactgcccaagaactatcaaactcctgagccaacaacttaatatgactagcttacacaatagcttttatagtaaagatacctctttacggactccacttatgactccctaaagcccatgtcgaagcccccatcgctgggtcaatagtacttgccgcagtactcttgaaactaggcggctatggtataatacgcctcacactcattctcaaccccctgacaaaacacatagcctaccccttccttgtactatccctatgaggcataattataacaagctccatctgcctacgacaaacagacctaaaatcgctcattgcatactcttcaatcagccacatagccctcgtagtaacagccattctcatccaaaccccctgaagcttcaccggcgcagtcattctcataatcgcccacggacttacatcctcattactattctgcctagcaaactcaaactacgaacgcactcacagtcgcatcataatcctctctcaaggacttcaaactctactcccactaatagctttttgatgacttctagcaagcctcgctaacctcgccttaccccccactattaacctactgggagaactctctgtgctagtaaccacgttctcctgatcaaatatcactctcctacttacaggactcaacatactagtcacagccctatactccctctacatatttaccacaacacaatggggctcactcacccaccacattaacaacataaaaccctcattcacacgagaaaacaccctcatgttcatacacctatcccccattctcctcctatccctcaaccccgacatcattaccgggttttcctcttgtaaatatagtttaaccaaaacatcagattgtgaatctgacaacagaggcttacgaccccttatttaccgagaaagctcacaagaactgctaactcatgcccccatgtctaacaacatggctttctcaacttttaaaggataacagctatccattggtcttaggccccaagaattttggtgcaactccaaataaaagtaataaccatgcacactactataaccaccctaaccctaacttccctaattccccccatccttaccaccctcgttaaccctaacaaaaaaaactcatacccccattatgtaaaatccattgtcgcatccacctttattatcagtctcttccccacaacaatattcatgtgcctagaccaagaagttattatctcgaactgacactgagccacaacccaaacaacccagctctccctaagcttcaaactagactacttctccataatattcatccctgtagcattgttcgttacatggtccatcatagaattctcactgtgatatataaactcagacccaaacattaatcagttcttcaaatatctactcatcttcctaattaccatactaatcttagttaccgctaacaacctattccaactgttcatcggctgagagggcgtaggaattatatccttcttgctcatcagttgatgatacgcccgagcagatgccaacacagcagccattcaagcaatcctatacaaccgtatcggcgatatcggtttcatcctcgccttagcatgatttatcctacactccaactcatgagacccacaacaaatagcccttctaaacgctaatccaagcctcaccccactactaggcctcctcctagcagcagcaggcaaatcagcccaattaggtctccacccctgactcccctcagccatagaaggccccaccccagtctcagccctactccactcaagcactatagttgtagcaggaatcttcttactcatccgcttccaccccctagcagaaaatagcccactaatccaaactctaacactatgcttaggcgctatcaccactctgttcgcagcagtctgcgcccttacacaaaatgacatcaaaaaaatcgtagccttctccacttcaagtcaactaggactcataatagttacaatcggcatcaaccaaccacacctagcattcctgcacatctgtacccacgccttcttcaaagccatactatttatgtgctccgggtccatcatccacaaccttaacaatgaacaagatattcgaaaaataggaggactactcaaaaccatacctctcacttcaacctccctcaccattggcagcctagcattagcaggaatacctttcctcacaggtttctactccaaagaccacatcatcgaaaccgcaaacatatcatacacaaacgcctgagccctatctattactctcatcgctacctccctgacaagcgcctatagcactcgaataatccttctcaccctaacaggtcaacctcgcttccccacccttactaacattaacgaaaataaccccaccctactaaaccccattaaacgcctggcagccggaagcctattcgcaggatttctcattactaacaacatttcccccgcatcccccttccaaacaacaatccccctctacctaaaactcacagccctcgctgtcactttcctaggacttctaacagccctagacctcaactacctaaccaacaaacttaaaataaaatccccactatgcacattttatttctccaacatactcggattctaccctagcatcacacaccgcacaatcccctatctaggccttcttacgagccaaaacctgcccctactcctcctagacctaacctgactagaaaagctattacctaaaacaatttcacagcaccaaatctccacctccatcatcacctcaacccaaaaaggcataattaaactttacttcctctctttcttcttcccactcatcctaaccctactcctaatcacataacctattcccccgagcaatctcaattacaatatatacaccaacaaacaatgttcaaccagtaactactactaatcaacgcccataatcatacaaagcccccgcaccaataggatcctcccgaatcaaccctgacccctctccttcataaattattcagcttcctacactattaaagtttaccacaaccaccaccccatcatactctttcacccacagcaccaatcctacctccatcgctaaccccactaaaacactcaccaagacctcaacccctgacccccatgcctcaggatactcctcaatagccatcgctgtagtatatccaaagacaaccatcattccccctaaataaattaaaaaaactattaaacccatataacctcccccaaaattcagaataataacacacccgaccacaccgctaacaatcaatactaaacccccataaataggagaaggcttagaagaaaaccccacaaaccccattactaaacccacactcaacagaaacaaagcatacatcattattctcgcacggactacaaccacgaccaatgatatgaaaaaccatcgttgtatttcaactacaagaacaccaatgaccccaatacgcaaaattaaccccctaataaaattaattaaccgctcattcatcgacctccccaccccatccaacatctccgcatgatgaaacttcggctcactccttggcgcctgcctgatcctccaaatcaccacaggactattcctagccatgcactactcaccagacgcctcaaccgccttttcatcaatcgcccacatcactcgagacgtaaattatggctgaatcatccgctaccttcacgccaatggcgcctcaatattctttatctgcctcttcctacacatcgggcgaggcctatattacggatcatttctctactcagaaacctgaaacatcggcattatcctcctgcttgcaactatagcaacagccttcataggctatgtcctcccgtgaggccaaatatcattctgaggggccacagtaattacaaacttactatccgccatcccatacattggggcagacctagttcaatgaatctgaggaggctactcagtagacagtcccaccctcacacgattctttacctttcacttcatcttgcccttcattattgcagccctagcagcactccacctcctattcttgcacgaaacgggatcaaacaaccccctaggaatcacctcccattccgataaaatcaccttccacccttactacacaatcaaagacgccctcggcttacttctcttccttctctccttaatgacattaacactattctcaccagacctcctaggcgacccagacaattataccctagccaaccccttaaacacccctccccacatcaagcccgaatgatatttcctattcgcctacacaattctccgatccgtccctaacaaactaggaggcgtccttgccctattactatccatcctcatcctagcaataatccccatcctccatatatccaaacaacaaagcataatatttcgcccactaagccaatcactttattgactcctagccgcagacctcctcattctaacctgaatcggaggacaaccagtaagctacccttttaccatcattggacaagtagcatccgtactatacttcacaacaatcctaatcctaataccaactatctccctaattgaaaacaaaatactcaaatgggcctgtccttgtagtataaactaatacaccagtcttgtaaaccggagatgaaaacctttttccaaggacaaatcagagaaaaagtctttaactccaccattagcacccaaagctaagattctaatttaaactattctctgttctttcatggggaagcagatttgggtaccacccaagtattgactcacccatcaacaaccgctatgtatttcgtacattactgccagccaccatgaatattgtacggtaccataaatacttgaccacctgtagtacataaaaacccaatccacatcaaaaccccctccccatgcttacaagcaagtacagcaatcaaccctcaactatcacacatcaactgcaactccaaagccacccctcacccactaggataccaacaaacctacccacccttaacagtacatagtacataaagccatttaccgtacatagcacattacagtcaaatcccttctcgtccccatggatgacccccctcagataggggtcccttgaccaccatcctccgtgaaatcaatatcccgcacaagagtgctactctcctcgctccgggcccataacacttgggggtagctaaagtgaactgtatccgacatctggttcctacttcagggtcataaagcctaaatagcccacacgttccccttaaataagacatcacgatg

SEQ ID NO: 479 - DNA, 16569 bp, Homo sapiens mitochondrial
  3107: "n" refers to a nucleotide at position 3107 of the Cambridge Reference Sequence (CRS, Anderson et al. 1981 Nature 290:457-465), later determined to be absent from the human mtDNA sequence according to the revised CRS (rCRS, Andrews et al. 1999 Nature Genetics 23:147); "n" therefore represents a single nucleotide deletion at a position corresponding to nucleotide 3107 of SEQ ID NO:1 as provided herein.
gatcacaggtctatcaccctattaaccactcacgggagctctccatgcatttggtattttcgtctggggggtatgcacgcgatagcattgcgagacgctggagccggagcaccctatgtcgcagtatctgtctttgattcctgcctcatcctattatttatcgcacctacgttcaatattacaggcgaacatacttactaaagtgtgttaattaattaatgcttgtaggacataataataacaattgaatgtctgcacagccactttccacacagacatcataacaaaaaatttccaccaaaccccccctcccccgcttctggccacagcacttaaacacatctctgccaaaccccaaaaacaaagaaccctaacaccagcctaaccagatttcaaattttatcttttggcggtatgcacttttaacagtcaccccccaactaacacattattttcccctcccactcccatactactaatctcatcaatacaacccccgcccatcctacccagcacacacacaccgctgctaaccccataccccgaaccaaccaaaccccaaagacaccccccacagtttatgtagcttacctcctcaaagcaatacactgaaaatgtttagacgggctcacatcaccccataaacaaataggtttggtcctagcctttctattagctcttagtaagattacacatgcaagcatccccgttccagtgagttcaccctctaaatcaccacgatcaaaagggacaagcatcaagcacgcagcaatgcagctcaaaacgcttagcctagccacacccccacgggaaacagcagtgattaacctttagcaataaacgaaagtttaactaagctatactaaccccagggttggtcaatttcgtgccagccaccgcggtcacacgattaacccaagtcaatagaagccggcgtaaagagtgttttagatcaccccctccccaataaagctaaaactcacctgagttgtaaaaaactccagttgacacaaaatagactacgaaagtggctttaacatatctgaacacacaatagctaagacccaaactgggattagataccccactatgcttagccctaaacctcaacagttaaatcaacaaaactgctcgccagaacactacgagccacagcttaaaactcaaaggacctggcggtgcttcatatccctctagaggagcctgttctgtaatcgataaaccccgatcaacctcaccacctcttgctcagcctatataccgccatcttcagcaaaccctgatgaaggctacaaagtaagcgcaagtacccacgtaaagacgttaggtcaaggtgtagcccatgaggtggcaagaaatgggctacattttctaccccagaaaactacgatagcccttatgaaacttaagggtcgaaggtggatttagcagtaaactgagagtagagtgcttagttgaacagggccctgaagcgcgtacacaccgcccgtcaccctcctcaagtatacttcaaaggacatttaactaaaacccctacgcatttatatagaggagacaagtcgtaacatggtaagtgtactggaaagtgcacttggacgaaccagagtgtagcttaacacaaagcacccaacttacacttaggagatttcaacttaacttgaccgctctgagctaaacctagccccaaacccactccaccttactaccagacaaccttagccaaaccatttacccaaataaagtataggcgatagaaattgaaacctggcgcaatagatatagtaccgcaagggaaagatgaaaaattataaccaagcataatatagcaaggactaacccctataccttctgcataatgaattaactagaaataactttgcaaggagagccaaagctaagacccccgaaaccagacgagctacctaagaacagctaaaagagcacacccgtctatgtagcaaaatagtgggaagatttataggtagaggcgacaaacctaccgagcctggtgatagctggttgtccaagatagaatcttagttcaactttaaatttgcccacagaaccctctaaatccccttgtaaatttaactgttagtccaaagaggaacagctctttggacactaggaaaaaaccttgtagagagagtaaaaaatttaacacccatagtaggcctaaaagcagccaccaattaagaaagcgttcaagctcaacacccactacctaaaaaatcccaaacatataactgaactcctcacacccaattggaccaatctatcaccctatagaagaactaatgttagtataagtaacatgaaaacattctcctccgcataagcctgcgtcagattaaaacactgaactgacaattaacagcccaatatctacaatcaaccaacaagtcattattaccctcactgtcaacccaacacaggcatgctcataaggaaaggttaaaaaaagtaaaaggaactcggcaaatcttaccccgcctgtttaccaaaaacatcacctctagcatcaccagtattagaggcaccgcctgcccagtgacacatgtttaacggccgcggtaccctaaccgtgcaaaggtagcataatcacttgttccttaaatagggacctgtatgaatggctccacgagggttcagctgtctcttacttttaaccagtgaaattgacctgcccgtgaagaggcgggcatgacacagcaagacgagaagaccctatggagctttaatttattaatgcaaacagtacctaacaaacccacaggtcctaaactaccaaacctgcattaaaaatttcggttggggcgacctcggagcagaacccaacctccgagcagtacatgctaagacttcaccagtcaaagcgaactactatactcaattgatccaataacttgaccaacggaacaagttaccctagggataacagcgcaatcctattctagagtccatatcaacaatagggtttacgacctcgatgttggatcaggacatcccaatggtgcagccgctattaaaggttcgtttgttcaacgattaaagtcctacgtgatctgagttcagaccggagtaatccaggtcggtttctatctacnttcaaattcctccctgtacgaaaggacaagagaaataaggcctacttcacaaagcgccttcccccgtaaatgatatcatctcaacttagtattatacccacacccacccaagaacagggtttgttaagatggcagagcccggtaatcgcataaaacttaaaactttacagtcagaggttcaattcctcttcttaacaacatacccatggccaacctcctactcctcattgtacccattctaatcgcaatggcattcctaatgcttaccgaacgaaaaattctaggctatatacaactacgcaaaggccccaacgttgtaggcccctacgggctactacaacccttcgctgacgccataaaactcttcaccaaagagcccctaaaacccgccacatctaccatcaccctctacatcaccgccccgaccttagctctcaccatcgctcttctactatgaacccccctccccatacccaaccccctggtcaacctcaacctaggcctcctatttattctagccacctctagcctagccgtttactcaatcctctgatcagggtgagcatcaaactcaaactacgccctgatcggcgcactgcgagcagtagcccaaacaatctcatatgaagtcaccctagccatcattctactatcaacattactaataagtggctcctttaacctctccacccttatcacaacacaagaacacctctgattactcctgccatcatgacccttggccataatatgatttatctccacactagcagagaccaaccgaacccccttcgaccttgccgaaggggagtccgaactagtctcaggcttcaacatcgaatacgccgcaggccccttcgccctattcttcatagccgaatacacaaacattattataataaacaccctcaccactacaatcttcctaggaacaacatatgacgcactctcccctgaactctacacaacatattttgtcaccaagaccctacttctaacctccctgttcttatgaattcgaacagcatacccccgattccgctacgaccaactcatacacctcctatgaaaaaacttcctaccactcaccctagcattacttatatgacatgtctccatacccattacaatctccagcattccccctcaaacctaagaaatatgtctgataaaagagttactttgatagagtaaataataggagcttaaacccccttatttctaggactatgagaatcgaacccatccctgagaatccaaaattctccgtgccacctatcacaccccatcctaaagtaaggtcagctaaataagctatcgggcccataccccgaaaatgttggttatacccttcccgtactaattaatcccctggcccaacccgtcatctactctaccatctttgcaggcacactcatcacagcgctaagctcgcactgattttttacctgagtaggcctagaaataaacatgctagcttttattccagttctaaccaaaaaaataaaccctcgttccacagaagctgccatcaagtatttcctcacgcaagcaaccgcatccataatccttctaatagctatcctcttcaacaatatactctccggacaatgaaccataaccaatactaccaatcaatactcatcattaataatcataatggctatagcaataaaactaggaatagccccctttcacttctgagtcccagaggttacccaaggcacccctctgacatccggcctgcttcttctcacatgacaaaaactagcccccatctcaatcatataccaaatctctccctcactaaacgtaagccttctcctcactctctcaatcttatccatcatagcaggcagttgaggtggattaaaccaaacccagctacgcaaaatcttagcatactcctcaattacccacataggatgaataatagcagttctaccgtacaaccctaacataaccattcttaatttaactatttatattatcctaactactaccgcattcctactactcaacttaaactccagcaccacgaccctactactatctcgcacctgaaacaagctaacatgactaacacccttaattccatccaccctcctctccctaggaggcctgcccccgctaaccggctttttgcccaaatgggccattatcgaagaattcacaaaaaacaatagcctcatcatccccaccatcatagccaccatcaccctccttaacctctacttctacctacgcctaatctactccacctcaatcacactactccccatatctaacaacgtaaaaataaaatgacagtttgaacatacaaaacccaccccattcctccccacactcatcgcccttaccacgctactcctacctatctccccttttatactaataatcttatagaaatttaggttaaatacagaccaagagccttcaaagccctcagtaagttgcaatacttaatttctgtaacagctaaggactgcaaaaccccactctgcatcaactgaacgcaaatcagccactttaattaagctaagcccttactagaccaatgggacttaaacccacaaacacttagttaacagctaagcaccctaatcaactggcttcaatctacttctcccgccgccgggaaaaaaggcgggagaagccccggcaggtttgaagctgcttcttcgaatttgcaattcaatatgaaaatcacctcggagctggtaaaaagaggcctaacccctgtctttagatttacagtccaatgcttcactcagccattttacctcacccccactgatgttcgccgaccgttgactattctctacaaaccacaaagacattggaacactatacctattattcggcgcatgagctggagtcctaggcacagctctaagcctccttattcgagccgagctgggccagccaggcaaccttctaggtaacgaccacatctacaacgttatcgtcacagcccatgcatttgtaataatcttcttcatagtaatacccatcataatcggaggctttggcaactgactagttcccctaataatcggtgcccccgatatggcgtttccccgcataaacaacataagcttctgactcttacctccctctctcctactcctgctcgcatctgctatagtggaggccggagcaggaacaggttgaacagtctaccctcccttagcagggaactactcccaccctggagcctccgtagacctaaccatcttctccttacacctagcaggtgtctcctctatcttaggggccatcaatttcatcacaacaattatcaatataaaaccccctgccataacccaataccaaacgcccctcttcgtctgatccgtcctaatcacagcagtcctacttctcctatctctcccagtcctagctgctggcatcactatactactaacagaccgcaacctcaacaccaccttcttcgaccccgccggaggaggagaccccattctataccaacacctattctgatttttcggtcaccctgaagtttatattcttatcctaccaggcttcggaataatctcccatattgtaacttactactccggaaaaaaagaaccatttggatacataggtatggtctgagctatgatatcaattggcttcctagggtttatcgtgtgagcacaccatatatttacagtaggaatagacgtagacacacgagcatatttcacctccgctaccataatcatcgctatccccaccggcgtcaaagtatttagctgactcgccacactccacggaagcaatatgaaatgatctgctgcagtgctctgagccctaggattcatctttcttttcaccgtaggtggcctgactggcattgtattagcaaactcatcactagacatcgtactacacgacacgtactacgttgtagctcacttccactatgtcctatcaataggagctgtatttgccatcataggaggcttcattcactgatttcccctattctcaggctacaccctagaccaaacctacgccaaaatccatttcactatcatattcatcggcgtaaatctaactttcttcccacaacactttctcggcctatccggaatgccccgacgttactcggactaccccgatgcatacaccacatgaaacatcctatcatctgtaggctcattcatttctctaacagcagtaatattaataattttcatgatttgagaagccttcgcttcgaagcgaaaagtcctaatagtagaagaaccctccataaacctggagtgactatatggatgccccccaccctaccacacattcgaagaacccgtatacataaaatctagacaaaaaaggaaggaatcgaaccccccaaagctggtttcaagccaaccccatggcctccatgactttttcaaaaaggtattagaaaaaccatttcataactttgtcaaagttaaattataggctaaatcctatatatcttaatggcacatgcagcgcaaataggtctacaagacgctacttcccctatcatagaagagcttatcacctttcatgatcacgccctcataatcattttccttatctgcttcctagtcctgtatgcccttttcctaacactcacaacaaaactaactaatactaacatctcagacgctcaggaaatagaaaccgtctgaactatcctgcccgccatcatcctagtcctcatcgccctcccatccctacgcatcctttacataacagacgaggtcaacgatccctcccttaccatcaaatcaattggccaccaatggtactgaacctacgagtacaccgactacggcggactaatcttcaactcctacatacttcccccattattcctagaaccaggcgacctgcgactccttgacgttgacaatcgagtagtactcccgattgaagcccccattcgtataataattacatcacaagacgtcttgcactcatgagctgtccccacattaggcttaaaaacagatgcaattcccggacgtctaaaccaaaccactttcaccgctacacgaccgggggtatactacggtcaatgctctgaaatctgtggagcaaaccacagtttcatgcccatcgtcctagaattaattcccctaaaaatctttgaaatagggcccgtatttaccctatagcaccccctctaccccctctagagcccactgtaaagctaacttagcattaaccttttaagttaaagattaagagaaccaacacctctttacagtgaaatgccccaactaaatactaccgtatggcccaccataattacccccatactccttacactattcctcatcacccaactaaaaatattaaacacaaactaccacctacctccctcaccaaagcccataaaaataaaaaattataacaaaccctgagaaccaaaatgaacgaaaatctgttcgcttcattcattgtccccacaatcctaggcctacccgccgcagtactgatcattctatttccccctctattgatccccacctccaaatatctcatcaacaaccgactaatcaccacccaacaatgactaatcaaactaacctcaaaacaaatgataaccatacacaacactaaaggacgaacctgatctcttatactagtatccttaatcatttttattgccacaactaacctcctcggactcctgcctcactcatttacaccaaccacccaactatctataaacctagccatggccatccccttatgagcgggcgcagtgattataggctttcgctctaagattaaaaatgccctagcccacttcttaccacaaggcacacctacaccccttatccccatactagttattatcgaaaccatcagcctactcattcaaccaatagccctggccgtacgcctaaccgctaacattactgcaggccacctactcatgcacctaattggaagcgccaccctagcaatatcaaccattaaccttccctctacacttatcatcttcacaattctaattctactgactatcctagaaatcgctgtcgccttaatccaagcctacgttttcacacttctagtaagcctctacctgcacgacaacacataatgacccaccaatcacatgcctatcatatagtaaaacccagcccatgacccctaacaggggccctctcagccctcctaatgacctccggcctagccatgtgatttcacttccactccataacgctcctcatactaggcctactaaccaacacactaaccatataccaatgatggcgcgatgtaacacgagaaagcacataccaaggccaccacacaccacctgtccaaaaaggccttcgatacgggataatcctatttattacctcagaagtttttttcttcgcaggatttttctgagccttttaccactccagcctagcccctaccccccaattaggagggcactggcccccaacaggcatcaccccgctaaatcccctagaagtcccactcctaaacacatccgtattactcgcatcaggagtatcaatcacctgagctcaccatagtctaatagaaaacagccgaaaccaaataattcaagcactgcttattacaattttactgggtctctattttaccctcctacaagcctcagagtacttcgagtctcccttcaccatttccgacggcatctacggctcaacattttttgtagccacaggcttccacggacttcacgtcattattggctcaactttcctcactatctgcttcatccgccaactaatatttcactttacatccaaacatcactttggcttcgaagccgccgcctgatactggcattttgtagatgtggtctgactatttctgtatgtctccatctattgatgagggtcttactcttttagtataaatagtaccgttaacttccaattaactagttttgacaacattcaaaaaagagtaataaacttcgccttaattttaataatcaacaccctcctagccttactactaataattattacattttgactaccacaactcaacggctacatagaaaaatccaccccttacgagtgcggcttcgaccctatatcccccgcccgcgtccctttctccataaaattcttcttagtagctattaccttcttattatttgatctagaaattgccctccttttacccctaccatgagccctacaaacaactaacctgccactaatagttatgtcatccctcttattaatcatcatcctagccctaagtctggcctatgagtgactacaaaaaggattagactgagccgaattggtatatagtttaaacagaacgaatgatttcgactcattaaattatgataatcatatttaccaaatgcccctcatttacataaatattatactagcatttaccatctcacttctaggaatactagtatatcgctcacacctcatatcctccctactatgcctagaaggaataatactatcgctgttcattatagctactctcataaccctcaacacccactccctcttagccaatattgtgcctattgccatactagtctttgccgcctgcgaagcagcggtgggcctagccctactagtctcaatctccaacacatatggcctagactacgtacataacctaaacctactccaatgctaaaactaatcgtcccaacaattatattactaccactgacatgactttccaaaaaacacataatttgaatcaacacaaccacccacagcctaattattagcatcatccctctactattttttaaccaaatcaacaacaacctatttagctgttccccaaccttttcctccgaccccctaacaacccccctcctaatactaactacctgactcctacccctcacaatcatggcaagccaacgccacttatccagtgaaccactatcacgaaaaaaactctacctctctatactaatctccctacaaatctccttaattataacattcacagccacagaactaatcatattttatatcttcttcgaaaccacacttatccccaccttggctatcatcacccgatgaggcaaccagccagaacgcctgaacgcaggcacatacttcctattctacaccctagtaggctcccttcccctactcatcgcactgatttacactcacaacaccctaggctcactaaacattctactactcactctcactgcccaagaactatcaaactcctgagccaacaacttaatatgactagcttacacaatagcttttatagtaaagatacctctttacggactccacttatgactccctaaagcccatgtcgaagcccccatcgctgggtcaatagtacttgccgcagtactcttaaaactaggcggctatggtataatacgcctcacactcattctcaaccccctgacaaaacacatagcctaccccttccttgtactatccctatgaggcataattataacaagctccatctgcctacgacaaacagacctaaaatcgctcattgcatactcttcaatcagccacatagccctcgtagtaacagccattctcatccaaaccccctgaagcttcaccggcgcagtcattctcataatcgcccacggacttacatcctcattactattctgcctagcaaactcaaactacgaacgcactcacagtcgcatcataatcctctctcaaggacttcaaactctactcccactaatagctttttgatgacttctagcaagcctcgctaacctcgccttaccccccactattaacctactgggagaactctctgtgctagtaaccacgttctcctgatcaaatatcactctcctacttacaggactcaacatactagtcacagccctatactccctctacatatttaccacaacacaatggggctcactcacccaccacattaacaacataaaaccctcattcacacgagaaaacaccctcatgttcatacacctatcccccattctcctcctatccctcaaccccgacatcattaccgggttttcctcttgtaaatatagtttaaccaaaacatcagattgtgaatctgacaacagaggcttacgaccccttatttaccgagaaagctcacaagaactgctaactcatgcccccatgtctaacaacatggctttctcaacttttaaaggataacagctatccattggtcttaggccccaaaaattttggtgcaactccaaataaaagtaataaccatgcacactactataaccaccctaaccctgacttccctaattccccccatccttaccaccctcgttaaccctaacaaaaaaaactcatacccccattatgtaaaatccattgtcgcatccacctttattatcagtctcttccccacaacaatattcatgtgcctagaccaagaagttattatctcgaactgacactgagccacaacccaaacaacccagctctccctaagcttcaaactagactacttctccataatattcatccctgtggcattgttcgttacatggtccatcatagaattctcactgtgatatataaactcagacccaaacattaatcagttcttcaaatatctactcatcttcctaattaccatactaatcttagttaccgctaacaacctattccaactgttcatcggctgagagggcgtaggaattatatccttcttgctcatcagttgatgatacgcccgagcagatgccaacacagcagccattcaagcaatcctatacaaccgtatcggcgatatcggtttcatcctcgccttagcatgatttatcctacactccaactcatgagacccacaacaaatagcccttctaaacgctaatccaagcctcaccccactactaggcctcctcctagcagcagcaggcaaatcagcccaattaggtctccacccctgactcccctcagccatagaaggccccaccccagtctcagccctactccactcaagcactatagttgtagcaggaatcttcttactcatccgcttccaccccctagcagaaaatagcccactaatccaaactctaacactatgcttaggcgctatcaccactctgttcgcagcagtctgcgcccttacacaaaatgacatcaaaaaaatcgtagccttctccacttcaagtcaactaggactcataatagttacaatcggcatcaaccaaccacacctagcattcctgcacatctgtacccacgccttcttcaaagccatactatttatgtgctccgggtccatcatccacaaccttaacaatgaacaagatattcgaaaaataggaggactactcaaaaccatacctctcacttcaacctccctcaccattggcagcctagcattagcaggaatacctttcctcacaggtttctactccaaagaccacatcatcgaaaccgcaaacatatcatacacaaacgcctgagccctatctattactctcatcgctacctccctgacaagcgcctatagcactcgaataattcttctcaccctaacaggtcaacctcgcttccccccccttactaacattaacgaaaataaccccaccctactaaaccccattaaacgcctgacagccggaagcctattcgcaggatttctcattactaacaacatttcccccgcatcccccttccaaacaacaatccccctctacctaaaactcacagccctcgctgtcactttcctaggacttctaacagccctagacctcaactacctaaccaacaaacttaaaataaaatccccactatgcacattttatttctccaacatactcggattctaccctagcatcacacaccgcacaatcccctatctaggccttcttacgagccaaaacctgcccctactcctcctagacctaacctgactagaaaagctattacctaaaacaatttcacagcaccaaatctccacctccatcatcacctcaacccaaaaaggcataattaaactttacttcctctctttcttcttcccactcatcctaaccctactcctaatcacataacctattcccccgagcaatctcaattacaatatatacaccaacaaacaatgttcaaccagtaactactactaatcaacgcccataatcatacaaagcccccgcaccaataggatcctcccgaatcaaccctgacccctctccttcataaattattcagcttcctacactattaaagtttaccacaaccaccaccccatcatactctttcacccacagcaccaatcctacctccatcgctaaccccactaaaacactcaccaagacctcaacccctgacccccatgcctcaggatactcctcaatagccatcgctgtagtatatccaaagacaaccatcattccccctaaataaattaaaaaaactattaaacccatataacctcccccaaaattcagaataataacacacccgaccacaccgctaacaatcaatactaaacccccataaataggagaaggcttagaagaaaaccccacaaaccccattactaaacccacactcaacagaaacaaagcatacatcattattctcgcacggactacaaccacgaccaatgatatgaaaaaccatcgttgtatttcaactacaagaacaccaatgaccccaatacgcaaaattaaccccctaataaaattaattaaccactcactcatcgacctccccaccccatccaacatctccgcatgatgaaacttcggctcactccttggcgcctgcctgatcctccaaatcaccacaggactattcctagccatgcactactcaccagacgcctcaaccgccttttcatcaatcgcccacatcactcgagacgtaaattatggctgaatcatccgctaccttcacgccaatggcgcctcaatattctttatctgcctcttcctacacatcgggcgaggcctatattacggatcatttctctactcagaaacctgaaacatcggcattatcctcctgcttgcaactatagcaacagccttcataggctatgtcctcccgtgaggccaaatatcattctgaggggccacagtaattacaaacttactatccgccatcccatacattgggacagacctagttcaatgaatctgaggaggctactcagtagacagtcccaccctcacacgattctttacctttcacttcatcttgcccttcattattgcagccctagcaacactccacctcctattcttgcacgaaacgggatcaaacaaccccctaggaatcacctcccattccgataaaatcaccttccacccttactacacaatcaaagacgccctcggcttacttctcttcattctctccttaatgacattaacactattctcaccagacctcctaggcgacccagacaattataccctagccaaccccttaaacacccctccccacatcaagcccgaatgatatttcctattcgcctacacaattctccgatccgtccctaacaaactaggaggcgtccttgccctattactatccatcctcatcctagcaataatccccatcctccatatatccaaacaacaaagcataatatttcgcccactaagccaatcactttattgactcctagccgcagacctcctcattctaacctgaatcggaggacaaccagtaagctacccttttaccatcattggacaagtagcatccgtactatacttcacaacaatcctaatcctaataccaactatctccctaattgaaaacaaaatactcaaatgggcctgtccttgtagtataaactaatacaccagtcttgtaaaccggagatgaaaacctttttccaaggacaaatcagagaaaaagtctttaactccaccattagcacccaaagctaagattctaatttaaactattctctgttctttcatggggaagcagatttgggtaccacccaagtattgactcacccatcaacaaccgctatgtatttcgtacattactgccagccaccatgaatattgtacggtaccataaatacttgaccacctgtagtacataaaaacccaatccacatcaaaaccccctccccatgcttacaagcaagtacagcaatcaaccctcaactatcacacatcaactgcaactccaaagccacccctcacccactaggataccaacaaacctacccacccttaacagtacatagtacataaagccatttaccgtacatagcacattacagtcaaatcccttctcgtccccatggatgacccccctcagataggggtcccttgaccaccatcctccgtgaaatcaatatcccgcacaagagtgctactctcctcgctccgggcccataacacttgggggtagctaaagtgaactgtatccgacatctggttcctacttcagggtcataaagcctaaatagcccacacgttccccttaaataagacatcacgatg

SEQ ID NO: 480 - DNA, 16569 bp, Homo sapiens mitochondrial
  3107: "n" refers to a nucleotide at position 3107 of the Cambridge Reference Sequence (CRS, Anderson et al. 1981 Nature 290:457-465), later determined to be absent from the human mtDNA sequence according to the revised CRS (rCRS, Andrews et al. 1999 Nature Genetics 23:147); "n" therefore represents a single nucleotide deletion at a position corresponding to nucleotide 3107 of SEQ ID NO:1 as provided herein.
gatcacaggtctatcaccctattaaccactcacgggagctctccatgcatttggtattttcgtctggggggtatgcacgcgatagcattgcgagacgctggagccggagcaccctatgtcgcagtatctgtctttgattcctgcctcatcctattatttatcgcacctacgttcaatattacaggcgaacatacttactaaagtgtgttaattaattaatgcttgtaggacataataataacaattgaatgtctgcacagccactttccacacagacatcataacaaaaaatttccaccaaaccccccctcccccgcttctggccacagcacttaaacacatctctgccaaaccccaaaaacaaagaaccctaacaccagcctaaccagatttcaaattttatcttttggcggtatgcacttttaacagtcaccccccaactaacacattattttcccctcccactcccatactactaatctcatcaatacaacccccgcccatcctacccagcacacacacaccgctgctaaccccataccccgaaccaaccaaaccccaaagacaccccccacagtttatgtagcttacctcctcaaagcaatacactgaaaatgtttagacgggctcacatcaccccataaacaaataggtttggtcctagcctttctattagctcttagtaagattacacatgcaagcatccccgttccagtgagttcaccctctaaatcaccacgatcaaaagggacaagcatcaagcacgcagcaatgcagctcaaaacgcttagcctagccacacccccacgggaaacagcagtgattaacctttagcaataaacgaaagtttaactaagctatactaaccccagggttggtcaatttcgtgccagccaccgcggtcacacgattaacccaagtcaatagaagccggcgtaaagagtgttttagatcaccccctccccaataaagctaaaactcacctgagttgtaaaaaactccagttgacacaaaatagactacgaaagtggctttaacatatctgaacacacaatagctaagacccaaactgggattagataccccactatgcttagccctaaacctcaacagttaaatcaacaaaactgctcgccagaacactacgagccacagcttaaaactcaaaggacctggcggtgcttcatatccctctagaggagcctgttctgtaatcgataaaccccgatcaacctcaccacctcttgctcagcctatataccgccatcttcagcaaaccctgatgaaggctacaaagtaagcgcaagtacccacgtaaagacgttaggtcaaggtgtagcccatgaggtggcaagaaatgggctacattttctaccccagaaaactacgatagcccttatgaaacttaagggtcgaaggtggatttagcagtaaactgagagtagagtgcttagttgaacagggccctgaagcgcgtacacaccgcccgtcaccctcctcaagtatacttcaaaggacatttaactaaaacccctacgcatttatatagaggagacaagtcgtaacatggtaagtgtactggaaagtgcacttggacgaaccagagtgtagcttaacacaaagcacccaacttacacttaggagatttcaacttaacttgaccgctctgagctaaacctagccccaaacccactccaccttactaccagacaaccttagccaaaccatttacccaaataaagtataggcgatagaaattgaaacctggcgcaatagatatagtaccgcaagggaaagatgaaaaattataaccaagcataatatagcaaggactaacccctataccttctgcataatgaattaactagaaataactttgcaaggagagccaaagctaagacccccgaaaccagacgagctacctaagaacagctaaaagagcacacccgtctatgtagcaaaatagtgggaagatttataggtagaggcgacaaacctaccgagcctggtgatagctggttgtccaagatagaatcttagttcaactttaaatttgcccacagaaccctctaaatccccttgtaaatttaactgttagtccaaagaggaacagctctttggacactaggaaaaaaccttgtagagagagtaaaaaatttaacacccatagtaggcctaaaagcagccaccaattaagaaagcgttcaagctcaacacccactacctaaaaaatcccaaacatataactgaactcctcacacccaattggaccaatctatcaccctatagaagaactaatgttagtataagtaacatgaaaacattctcctccgcataagcctgcgtcagattaaaacactgaactgacaattaacagcccaatatctacaatcaaccaacaagtcattattaccctcactgtcaacccaacacaggcatgctcataaggaaaggttaaaaaaagtaaaaggaactcggcaaatcttaccccgcctgtttaccaaaaacatcacctctagcatcaccagtattagaggcaccgcctgcccagtgacacatgtttaacggccgcggtaccctaaccgtgcaaaggtagcataatcacttgttccttaaatagggacctgtatgaatggctccacgagggttcagctgtctcttacttttaaccagtgaaattgacctgcccgtgaagaggcgggcatgacacagcaagacgagaagaccctatggagctttaatttattaatgcaaacagtacctaacaaacccacaggtcctaaactaccaaacctgcattaaaaatttcggttggggcgacctcggagcagaacccaacctccgagcagtacatgctaagacttcaccagtcaaagcgaactactatactcaattgatccaataacttgaccaacggaacaagttaccctagggataacagcgcaatcctattctagagtccatatcaacaatagggtttacgacctcgatgttggatcaggacatcccaatggtgcagccgctattaaaggttcgtttgttcaacgattaaagtcctacgtgatctgagttcagaccggagtaatccaggtcggtttctatctacnttcaaattcctccctgtacgaaaggacaagagaaataaggcctacttcacaaagcgccttcccccgtaaatgatatcatctcaacttagtattatacccacacccacccaagaacagggtttgttaagatggcagagcccggtaatcgcataaaacttaaaactttacagtcagaggttcaattcctcttcttaacaacatacccatggccaacctcctactcctcattgtacccattctaatcgcaatggcattcctaatgcttaccgaacgaaaaattctaggctatatacaactacgcaaaggccccaacgttgtaggcccctacgggctactacaacccttcgctgacgccataaaactcttcaccaaagagcccctaaaacccgccacatctaccatcaccctctacatcaccgccccgaccttagctctcaccatcgctcttctactatgaacccccctccccatacccaaccccctggtcaacctcaacctaggcctcctatttattctagccacctctagcctagccgtttactcaatcctctgatcagggtgagcatcaaactcaaactacgccctgatcggcgcactgcgagcagtagcccaaacaatctcatatgaagtcaccctagccatcattctactatcaacattactaataagtggctcctttaacctctccacccttatcacaacacaagaacacctctgattactcctgccatcatgacccttggccataatatgatttatctccacactagcagagaccaaccgaacccccttcgaccttgccgaaggggagtccgaactagtctcaggcttcaacatcgaatacgccgcaggccccttcgccctattcttcatagccgaatacacaaacattattataataaacaccctcaccactacaatcttcctaggaacaacatatgacgcactctcccctgaactctacacaacatattttgtcaccaagaccctacttctaacctccctgttcttatgaattcgaacagcatacccccgattccgctacgaccaactcatacacctcctatgaaaaaacttcctaccactcaccctagcattacttatatgacatgtctccatacccattacaatctccagcattccccctcaaacctaagaaatatgtctgataaaagagttactttgatagagtaaataataggagcttaaacccccttatttctaggactatgagaatcgaacccatccctgagaatccaaaattctccgtgccacctatcacaccccatcctaaagtaaggtcagctaaataagctatcgggcccataccccgaaaatgttggttatacccttcccgtactaattaatcccctggcccaacccgtcatctactctaccatctttgcaggcacactcatcacagcgctaagctcgcactgattttttacctgagtaggcctagaaataaacatgctagcttttattccagttctaaccaaaaaaataaaccctcgttccacagaagctgccatcaagtatttcctcacgcaagcaaccgcatccataatccttctaatagctatcctcttcaacaatatactctccggacaatgaaccataaccaatactaccaatcaatactcatcattaataatcataatggctatagcaataaaactaggaatagccccctttcacttctgagtcccagaggttacccaaggcacccctctgacatccggcctgcttcttctcacatgacaaaaactagcccccatctcaatcatataccaaatctctccctcactaaacgtaagccttctcctcactctctcaatcttatccatcatagcaggcagttgaggtggattaaaccaaacccagctacgcaaaatcttagcatactcctcaattacccacataggatgaataatagcagttctaccgtacaaccctaacataaccattcttaatttaactatttatattatcctaactactaccgcattcctactactcaacttaaactccagcaccacgaccctactactatctcgcacctgaaacaagctaacatgactaacacccttaattccatccaccctcctctccctaggaggcctgcccccgctaaccggctttttgcccaaatgggccattatcgaagaattcacaaaaaacaatagcctcatcatccccaccatcatagccaccatcaccctccttaacctctacttctacctacgcctaatctactccacctcaatcacactactccccatatctaacaacgtaaaaataaaatgacagtttgaacatacaaaacccaccccattcctccccacactcatcgcccttaccacgctactcctacctatctccccttttatactaataatcttatagaaatttaggttaaatacagaccaagagccttcaaagccctcagtaagttgcaatacttaatttctgtaacagctaaggactgcaaaaccccactctgcatcaactgaacgcaaatcagccactttaattaagctaagcccttactagaccaatgggacttaaacccacaaacacttagttaacagctaagcaccctaatcaactggcttcaatctacttctcccgccgccgggaaaaaaggcgggagaagccccggcaggtttgaagctgcttcttcgaatttgcaattcaatatgaaaatcacctcggagctggtaaaaagaggcctaacccctgtctttagatttacagtccaatgcttcactcagccattttacctcacccccactgatgttcgccgaccgttgactattctctacaaaccacaaagacattggaacactatacctattattcggcgcatgagctggagtcctaggcacagctctaagcctccttattcgagccgagctgggccagccaggcaaccttctaggtaacgaccacatctacaacgttatcgtcacagcccatgcatttgtaataatcttcttcatagtaatacccatcataatcggaggctttggcaactgactagttcccctaataatcggtgcccccgatatggcgtttccccgcataaacaacataagcttctgactcttacctccctctctcctactcctgctcgcatctgctatagtggaggccggagcaggaacaggttgaacagtctaccctcccttagcagggaactactcccaccctggagcctccgtagacctaaccatcttctccttacacctagcaggtgtctcctctatcttaggggccatcaatttcatcacaacaattatcaatataaaaccccctgccataacccaataccaaacgcccctcttcgtctgatccgtcctaatcacagcagtcctacttctcctatctctcccagtcctagctgctggcatcactatactactaacagaccgcaacctcaacaccaccttcttcgaccccgccggaggaggagaccccattctataccaacacctattctgatttttcggtcaccctgaagtttatattcttatcctaccaggcttcggaataatctcccatattgtaacttactactccggaaaaaaagaaccatttggatacataggtatggtctgagctatgatatcaattggcttcctagggtttatcgtgtgagcacaccatatatttacagtaggaatagacgtagacacacgagcatatttcacctccgctaccataatcatcgctatccccaccggcgtcaaagtatttagctgactcgccacactccacggaagcaatatgaaatgatctgctgcagtgctctgagccctaggattcatctttcttttcaccgtaggtggcctgactggcattgtattagcaaactcatcactagacatcgtactacacgacacgtactacgttgtagctcacttccactatgtcctatcaataggagctgtatttgccatcataggaggcttcattcactgatttcccctattctcaggctacaccctagaccaaacctacgccaaaatccatttcactatcatattcatcggcgtaaatctaactttcttcccacaacactttctcggcctatccggaatgccccgacgttactcggactaccccgatgcatacaccacatgaaacatcctatcatctgtaggctcattcatttctctaacagcagtaatattaataattttcatgatttgagaagccttcgcttcgaagcgaaaagtcctaatagtagaagaaccctccataaacctggagtgactatatggatgccccccaccctaccacacattcgaagaacccgtatacataaaatctagacaaaaaaggaaggaatcgaaccccccaaagctggtttcaagccaaccccatggcctccatgactttttcaaaaaggtattagaaaaaccatttcataactttgtcaaagttaaattataggctaaatcctatatatcttaatggcacatgcagcgcaagtaggtctacaagacgctacttcccctatcatagaagagcttatcacctttcatgatcacgccctcataatcattttccttatctgcttcctagtcctgtatgcccttttcctaacactcacaacaaaactaactaatactaacatctcagacgctcaggaaatagaagccgtctgaactatcctgcccgccatcatcctagtcctcatcgccctcccatccctacgcatcctttacataacagacgaggtcaacgatccctcccttaccatcaaatcaattggccaccaatggtactgaacctacgagtacaccgactacggcggactaatcttcaactcctacatacttcccccattattcctagaaccaggcgacctgcgactccttgacgttgacaatcgagtagtactcccgattgaagcccccattcgtataataattacatcacaagacgtcttgcactcatgagctgtccccacattaggcttaaaaacagatgcaattcccggacgtctaaaccaaaccactttcaccgctacacgaccgggggtatactacggtcaatgctctgaaatctgtggagcaaaccacagtttcatgcccatcgtcctagaattaattcccctaaaaatctttgaaatagggcccgtatttaccctatagcaccccctctaccccctctagagcccactgtaaagctaacttagcattaaccttttaagttaaagattaagagaaccaacacctctttacagtgaaatgccccaactaaatactaccgtatggcccaccataattacccccatactccttacactattcctcatcacccaactaaaaatattaaacacaaactaccacctacctccctcaccaaagcccataaaaataaaaaattataacaaaccctgagaaccaaaatgaacgaaaatctgttcgcttcattcattgcccccacaatcctaggcctacccgccgcagtactgatcattctatttccccctctattgatccccacctccaaatatctcatcaacaaccgactaatcaccacccaacaatgactaatcaaactaacctcaaaacaaatgataaccatacacaacactaaaggacgaacctgatctcttatactagtatccttaatcatttttattgccacaactaacctcctcggactcctgcctcactcatttacaccaaccacccaactatctataaacctagccatggccatccccttatgagcgggcgcagtgattataggctttcgctctaagattaaaaatgccctagcccacttcttaccacaaggcacacctacaccccttatccccatactagttattatcgaaaccatcagcctactcattcaaccaatagccctggccgtacgcctaaccgctaacattactgcaggccacctactcatgcacctaattggaagcgccaccctagcaatatcaaccattaaccttccctctacacttatcatcttcacaattctaattctactgactatcctagaaatcgctgtcgccttaatccaagcctacgttttcacacttctagtaagcctctacctgcacgacaacacataatgacccaccaatcacatgcctatcatatagtaaaacccagcccatgacccctaacaggggccctctcagccctcctaatgacctccggcctagccatgtgatttcacttccactccataacgctcctcatactaggcctactaaccaacacactaaccatataccaatgatggcgcgatgtaacacgagaaagcacataccaaggccaccacacaccacctgtccaaaaaggccttcgatacgggataatcctatttattacctcagaagtttttttcttcgcaggatttttctgagccttttaccactccagcctagcccctaccccccaattaggagggcactggcccccaacaggcatcaccccgctaaatcccctagaagtcccactcctaaacacatccgtattactcgcatcaggagtatcaatcacctgagctcaccatagtctaatagaaaacaaccgaaaccaaataattcaagcactgcttattacaattttactgggtctctattttaccctcctacaagcctcagagtacttcgagtctcccttcaccatttccgacggcatctacggctcaacattttttgtagccacaggcttccacggacttcacgtcattattggctcaactttcctcactatctgcttcatccgccaactaatatttcactttacatccaaacatcactttggcttcgaagccgccgcctgatactggcattttgtagatgtggtttgactatttctgtatgtctccatctattgatgagggtcttactcttttagtataaatagtaccgttaacttccaattaactagttttgacaacattcaaaaaagagtaataaacttcgccttaattttaataatcaacaccctcctagccttactactaataattattacattttgactaccacaactcaacggctacatagaaaaatccaccccttacgagtgcggcttcgaccctatatcccccgcccgcgtccctttctccataaaattcttcttagtagctattaccttcttattatttgatctagaaattgccctccttttacccctaccatgagccctacaaacaactaacctgccactaatagttatgtcatccctcttattaatcatcatcctagccctaagtctggcctatgagtgactacaaaaaggattagactgagccgaattggtatatagtttaaacaaaacgaatgatttcgactcattaaattatgataatcatatttaccaaatgcccctcatttacataaatattatactagcatttaccatctcacttctaggaatactagtatatcgctcacacctcatatcctccctactatgcctagaaggaataatactatcgctgttcattatagctactctcataaccctcaacacccactccctcttagccaatattgtgcctattgccatactagtctttgccgcctgcgaagcagcggtgggcctagccctactagtctcaatctccaacacatatggcctagactacgtacataacctaaacctactccaatgctaaaactaatcgtcccaacaattatattactaccactgacatgactttccaaaaaacacataatttgaatcaacacaaccacccacagcctaattattagcatcatccctctactattttttaaccaaatcaacaacaacctatttagctgttccccaaccttttcctccgaccccctaacaacccccctcctaatactaactacctgactcctacccctcacaatcatggcaagccaacgccacttatccagtgaaccactatcacgaaaaaaactctacctctctatactaatctccctacaaatctccttaattataacattcacagccacagaactaatcatattttatatcttcttcgaaaccacacttatccccaccttggctatcatcacccgatgaggcaaccagccagaacgcctgaacgcaggcacatacctcctattctacaccctagtaggctcccttcccctactcatcgcactgatttacactcacaacaccctaggctcactaaacattctactactcactctcactgcccaagaactatcaaactcctgagccaacaacttaatatgactagcttacacaatagcttttatagtaaagatacctctttacggactccacttatgactccctaaagcccatgtcgaagcccccatcgctgggtcaatagtacttgccgcagtactcttaaaactaggcggctatggtataatacgcctcacactcattctcaaccccctgacaaaacacatagcctaccccttccttgtactatccctatgaggcataattataacaagctccatctgcctacgacaaacagacctaaaatcgctcattgcatactcttcaatcagccacatagccctcgtagtaacagccattctcatccaaaccccctgaagcttcaccggcgcagtcattctcataatcgcccacggacttacatcctcattactattctgcctagcaaactcaaactacgaacgcactcacagtcgcatcataatcctctctcaaggacttcaaactctactcccactaatagctttttgatgacttctagcaagcctcgctaacctcgccttaccccccactattaacctactgggagaactctctgtgctagtaaccacgttctcctgatcaaatatcactctcctacttacaggactcaacatactagtcacagccctatactccctctacatatttaccacaacacaatggggctcactcacccaccacattaacaacataaaaccctcattcacacgagaaaacaccctcatgttcatacacctatcccccattctcctcctatccctcaaccccgacatcattaccgggttttcctcttgtaaatatagtttaaccaaaacatcagattgtgaatctgacaacagaggcttacgaccccttatttaccgagaaagctcacaagaactgctaactcatgcccccatgtctaacaacatggctttctcaacttttaaaggataacagctatccattggtcttaggccccaaaaattttggtgcaactccaaataaaagtaataaccatgcacactactataaccaccctaaccctgacttccctaattccccccatccttaccaccctcgttaaccctaacaaaaaaaactcatacccccattatgtaaaatccattgtcgcatccacctttattatcagtctcttccccacaacaatattcatgtgcctagaccaagaagttattatctcgaactgacactgagccacaacccaaacaacccagctctccctaagcttcaaactagactacttctccataatattcatccctgtggcattgttcgttacatggtccatcatagaattctcactgtgatatataaactcagacccaaacattaatcagttcttcaaatatctactcatcttcctaattaccatactaatcttagttaccgctaacaacctattccaactgttcatcggctgagagggcgtaggaattatatccttcttgctcatcagttgatgatacgcccgagcagatgccaacacagcagccattcaagcaatcctatacaaccgtatcggcgatatcggtttcatcctcgccttagcatgatttatcctacactccaactcatgagacccacaacaaatagcccttctaaacgctaatccaagcctcaccccactactaggcctcctcctagcagcagcaggcaaatcagcccaattaggtctccacccctgactcccctcagccatagaaggccccaccccagtctcagccctactccactcaagcactatagttgtagcaggaatcttcttactcatccgcttccaccccctagcagaaaatagcccactaatccaaactctaacactatgcttaggcgctatcaccactctgttcgcagcagtctgcgcccttacacaaaatgacatcaaaaaaatcgtagccttctccacttcaagtcaactaggactcataatagttacaatcggcatcaaccaaccacacctagcattcctgcacatctgtacccacgccttcttcaaagccatactatttatgtgctccgggtccatcatccacaaccttaacaatgaacaagatattcgaaaaataggaggactactcaaaaccatacctctcacttcaacctccctcaccattggcagcctagcattagcaggaatacctttcctcacaggtttctactccaaagaccacatcatcgaaaccgcaaacatatcatacacaaacgcctgagccctatctattactctcatcgctacctccctgacaagcgcctatagcactcgaataattcttctcaccctaacaggtcaacctcgcttccccacccttactaacattaacgaaaataaccccaccctactaaaccccattaaacgcctgacagccggaagcctattcgcaggatttctcattactaacaacatttcccccgcatcccccttccaaacaacaatccccctctacctaaaactcacagccctcgctgtcactttcctaggacttctaacagccctagacctcaactacctaaccaacaaacttaaaataaaatccccactatgcacattttatttctccaacatactcggattctaccctagcatcacacaccgcacaatcccctatctaggccttcttacgagccaaaacctgcccctactcctcctagacctaacctgactagaaaagctattacctaaaacaatttcacagcaccaaatctccacctccatcatcacctcaacccaaaaaggcataattaaactttacttcctctctttcttcttcccactcatcctaaccctactcctaatcacataacctattcccccgagcaatctcaattacaatatatacaccaacaaacaatgttcaaccagtaactactactaatcaacgcccataatcatacaaagcccccgcaccaataggatcctcccgaatcaaccctgacccctctccttcataaattattcagcttcctacactattaaagtttaccacaaccaccaccccatcatactctttcacccacagcaccaatcctacctccatcgctaaccccactaaaacactcaccaagacctcaacccctgacccccatgcctcaggatactcctcaatagccatcgctgtagtatatccaaagacaaccatcattccccctaaataaattaaaaaaactattaaacccatataacctcccccaaaattcagaataataacacacccgaccacaccgctaacaatcaatactaaacccccataaataggagaaggcttagaagaaaaccccacaaaccccattactaaacccacactcaacagaaacaaagcatacatcattattctcgcacggactacaaccacgaccaatgatatgaaaaaccatcgttgtatttcaactacaagaacaccaatgaccccaatacgcaaaattaaccccctaataaaattaattaaccactcactcatcgacctccccaccccatccaacatctccgcatgatgaaacttcggctcactccttggcgcctgcctgatcctccaaatcaccacaggactattcctagccatgcactactcaccagacgcctcaaccgccttttcatcaatcgcccacatcactcgagacgtaaattatggctgaatcatccgctaccttcacgccaatggcgcctcaatattctttatctgcctcttcctacacatcgggcgaggcctatattacggatcatttctctactcagaaacctgaaacatcggcattatcctcctgcttgcaactatagcaacagccttcataggctatgtcctcccgtgaggccaaatatcattctgaggggccacagtaattacaaacttactatccgccatcccatacattgggacagacctagttcaatgaatctgaggaggctactcagtagacagtcccaccctcacacgattctttacctttcacttcatcttgcccttcattattgcagccctagcagcactccacctcctattcttgcacgaaacgggatcaaacaaccccctaggaatcacctcccattccgataaaatcaccttccacccttactacacaatcaaagacgccctcggcttacttctcttcattctctccttaatgacattaacactattctcaccagacctcctaggcgacccagacaattataccctagccaaccccttaaacacccctccccacatcaagcccgaatgatatttcctattcgcctacacaattctccgatccgtccctaacaaactaggaggcgtccttgccctattactatccatcctcatcctagcaataatccccatcctccatatatccaaacaacaaagcataatatttcgcccactaagccaatcactttattgactcctagccgcagacctcctcattctaacctgaatcggaggacaaccagtaagctacccttttaccatcattggacaagtagcatccgtactatacttcacaacaatcctaatcctaataccaactatctccctaattgaaaacaaaatactcaaatgggcctgtccttgtagtataaactaatacaccagtcttgtaaaccggagatgaaaacctttttccaaggacaaatcagagaaaaagtctttaactccaccattagcacccaaagctaagattctaatttaaactattctctgttctttcatggggaagcagatttgggtaccacccaagtattgactcacccatcaacaaccgctatgtatttcgtacattactgccagccaccatgaatattgtacggtaccataaatacttgaccacctgtagtacataaaaacccaatccacatcaaaaccccctccccatgcttacaagcaagtacagcaatcaaccctcaactatcacacatcaactgcaactccaaagccacccctcacccactaggataccaacaaacctacccacccttaacagtacatagtacataaagccatttaccgtacatagcacattacagtcaaatcccttctcgtccccatggatgacccccctcagataggggtcccttgaccaccatcctccgtgaaatcaatatcccgcacaagagtgctactctcctcgctccgggcccataacacttgggggtagctaaagtgaactgtatccgacatctggttcctacttcagggtcataaagcctaaatagcccacacgttccccttaaataagacatcacgatg

SEQ ID NO: 481 - DNA, 16569 bp, Homo sapiens mitochondrial
  3107: "n" refers to a nucleotide at position 3107 of the Cambridge Reference Sequence (CRS, Anderson et al. 1981 Nature 290:457-465), later determined to be absent from the human mtDNA sequence according to the revised CRS (rCRS, Andrews et al. 1999 Nature Genetics 23:147); "n" therefore represents a single nucleotide deletion at a position corresponding to nucleotide 3107 of SEQ ID NO:1 as provided herein.
gatcacaggtctatcaccctattaaccactcacgggagctctccatgcatttggtattttcgtctggggggtatgcacgcgatagcattgcgagacgctggagccggagcaccctatgtcgcagtatctgtctttgattcctgcctcatcctattatttatcgcacctacgttcaatattacaggcgaacatacttactaaagtgtgttaattaattaatgcttgtaggacataataataacaattgaatgtctgcacagccactttccacacagacatcataacaaaaaatttccaccaaaccccccctcccccgcttctggccacagcacttaaacacatctctgccaaaccccaaaaacaaagaaccctaacaccagcctaaccagatttcaaattttatcttttggcggtatgcacttttaacagtcaccccccaactaacacattattttcccctcccactcccatactactaatctcatcaatacaacccccgcccatcctacccagcacacacacaccgctgctaaccccataccccgaaccaaccaaaccccaaagacaccccccacagtttatgtagcttacctcctcaaagcaatacactgaaaatgtttagacgggctcacatcaccccataaacaaataggtttggtcctagcctttctattagctcttagtaagattacacatgcaagcatccccgttccagtgagttcaccctctaaatcaccacgatcaaaagggacaagcatcaagcacgcagcaatgcagctcaaaacgcttagcctagccacacccccacgggaaacagcagtgattaacctttagcaataaacgaaagtttaactaagctatactaaccccagggttggtcaatttcgtgccagccaccgcggtcacacgattaacccaagtcaatagaagccggcgtaaagagtgttttagatcaccccctccccaataaagctaaaactcacctgagttgtaaaaaactccagttgacacaaaatagactacgaaagtggctttaacatatctgaacacacaatagctaagacccaaactgggattagataccccactatgcttagccctaaacctcaacagttaaatcaacaaaactgctcgccagaacactacgagccacagcttaaaactcaaaggacctggcggtgcttcatatccctctagaggagcctgttctgtaatcgataaaccccgatcaacctcaccacctcttgctcagcctatataccgccatcttcagcaaaccctgatgaaggctacaaagtaagcgcaagtacccacgtaaagacgttaggtcaaggtgtagcccatgaggtggcaagaaatgggctacattttctaccccagaaaactacgatagcccttatgaaacttaagggtcgaaggtggatttagcagtaaactgagagtagagtgcttagttgaacagggccctgaagcgcgtacacaccgcccgtcaccctcctcaagtatacttcaaaggacatttaactaaaacccctacgcatttatatagaggagacaagtcgtaacatggtaagtgtactggaaagtgcacttggacgaaccagagtgtagcttaacacaaagcacccaacttacacttaggagatttcaacttaacttgaccgctctgagctaaacctagccccaaacccactccaccttactaccagacaaccttagccaaaccatttacccaaataaagtataggcgatagaaattgaaacctggcgcaatagatatagtaccgcaagggaaagatgaaaaattataaccaagcataatatagcaaggactaacccctataccttctgcataatgaattaactagaaataactttgcaaggagagccaaagctaagacccccgaaaccagacgagctacctaagaacagctaaaagagcacacccgtctatgtagcaaaatagtgggaagatttataggtagaggcgacaaacctaccgagcctggtgatagctggttgtccaagatagaatcttagttcaactttaaatttgcccacagaaccctctaaatccccttgtaaatttaactgttagtccaaagaggaacagctctttggacactaggaaaaaaccttgtagagagagtaaaaaatttaacacccatagtaggcctaaaagcagccaccaattaagaaagcgttcaagctcaacacccactacctaaaaaatcccaaacatataactgaactcctcacacccaattggaccaatctatcaccctatagaagaactaatgttagtataagtaacatgaaaacattctcctccgcataagcctgcgtcagattaaaacactgaactgacaattaacagcccaatatctacaatcaaccaacaagtcattattaccctcactgtcaacccaacacaggcatgctcataaggaaaggttaaaaaaagtaaaaggaactcggcaaatcttaccccgcctgtttaccaaaaacatcacctctagcatcaccagtattagaggcaccgcctgcccagtgacacatgtttaacggccgcggtaccctaaccgtgcaaaggtagcataatcacttgttccttaaatagggacctgtatgaatggctccacgagggttcagctgtctcttacttttaaccagtgaaattgacctgcccgtgaagaggcgggcataacacagcaagacgagaagaccctatggagctttaatttattaatgcaaacagtacctaacaaacccacaggtcctaaactaccaaacctgcattaaaaatttcggttggggcgacctcggagcagaacccaacctccgagcagtacatgctaagacttcaccagtcaaagcgaactactatactcaattgatccaataacttgaccaacggaacaagttaccctagggataacagcgcaatcctattctagagtccatatcaacaatagggtttacgacctcgatgttggatcaggacatcccaatggtgcagccgctattaaaggttcgtttgttcaacgattaaagtcctacgtgatctgagttcagaccggagtaatccaggtcggtttctatctacnttcaaattcctccctgtacgaaaggacaagagaaataaggcctacttcacaaagcgccttcccccgtaaatgatatcatctcaacttagtattatacccacacccacccaagaacagggtttgttaagatggcagagcccggtaatcgcataaaacttaaaactttacagtcagaggttcaattcctcttcttaacaacatacccatggccaacctcctactcctcattgtacccattctaatcgcaatggcattcctaatgcttaccgaacgaaaaattctaggctatatacaactacgcaaaggccccaacgttgtaggcccctacgggctactacaacccttcgctgacgccataaaactcttcaccaaagagcccctaaaacccgccacatctaccatcaccctctacatcaccgccccgaccttagctctcaccatcgctcttctactatgaacccccctccccatacccaaccccctggtcaacctcaacctaggcctcctatttattctagccacctctagcctagccgtttactcaatcctctgatcagggtgagcatcaaactcaaactacgccctgatcggcgcactgcgagcagtagcccaaacaatctcatatgaagtcaccctagccatcattctactatcaacattactaataagtggctcctttaacctctccacccttatcacaacacaagaacacctctgattactcctgccatcatgacccttggccataatatgatttatctccacactagcagagaccaaccgaacccccttcgaccttgccgaaggggagtccgaactagtctcaggcttcaacatcgaatacgccgcaggccccttcgccctattcttcatagccgaatacacaaacattattataataaacaccctcaccactacaatcttcctaggaacaacatatgacgcactctcccctgaactctacacaacatattttgtcaccaagaccctacttctaacctccctgttcttatgaattcgaacagcatacccccgattccgctacgaccaactcatacacctcctatgaaaaaacttcctaccactcaccctagcattacttatatgatatgtctccatacccattacaatctccagcattccccctcaaacctaagaaatatgtctgataaaagagttactttgatagagtaaataataggagcttaaacccccttatttctaggactatgagaatcgaacccatccctgagaatccaaaattctccgtgccacctatcacaccccatcctaaagtaaggtcagctaaataagctatcgggcccataccccgaaaatgttggttatacccttcccgtactaattaatcccctggcccaacccgtcatctactctaccatctttgcaggcacactcatcacagcgctaagctcgcactgattttttacctgagtaggcctagaaataaacatgctagcttttattccagttctaaccaaaaaaataaaccctcgttccacagaagctgccatcaagtatttcctcacgcaagcaaccgcatccataatccttctaatagctatcctcttcaacaatatactctccggacaatgaaccataaccaatactaccaatcaatactcatcattaataatcataatggctatagcaataaaactaggaatagccccctttcacttctgagtcccagaggttacccaaggcacccctctgacatccggcctgcttcttctcacatgacaaaaactagcccccatctcaatcatataccaaatctctccctcactaaacgtaagccttctcctcactctctcaatcttatccatcatagcaggcagttgaggtggattaaaccaaacccagctacgcaaaatcttagcatactcctcaattacccacataggatgaataatagcagttctaccgtacaaccctaacataaccattcttaatttaactatttatattatcctaactactaccgcattcctactactcaacttaaactccagcaccacgaccctactactatctcgcacctgaaacaagctaacatgactaacacccttaattccatccaccctcctctccctaggaggcctgcccccgctaaccggctttttgcccaaatgggccattatcgaagaattcacaaaaaacaatagcctcatcatccccaccatcatagccaccatcaccctccttaacctctacttctacctacgcctaatctactccacctcaatcacactactccccatatctaacaacgtaaaaataaaatgacagtttgaacatacaaaacccaccccattcctccccacactcatcgcccttaccacgctactcctacctatctccccttttatactaataatcttatagaaatttaggttaaatacagaccaagagccttcaaagccctcagtaagttgcaatacttaatttctgtaacagctaaggactgcaaaaccccactctgcatcaactgaacgcaaatcagccactttaattaagctaagcccttactagaccaatgggacttaaacccacaaacacttagttaacagctaagcaccctaatcaactggcttcaatctacttctcccgccgccgggaaaaaaggcgggagaagccccggcaggtttgaagctgcttcttcgaatttgcaattcaatatgaaaatcacctcggagctggtaaaaagaggcctaacccctgtctttagatttacagtccaatgcttcactcagccattttacctcacccccactgatgttcgccgaccgttgactattctctacaaaccacaaagacattggaacactatacctattattcggcgcatgagctggagtcctaggcacagctctaagcctccttattcgagccgagctgggccagccaggcaaccttctaggtaacgaccacatctacaacgttatcgtcacagcccatgcatttgtaataatcttcttcatagtaatacccatcataatcggaggctttggcaactgactagttcccctaataatcggtgcccccgatatggcgtttccccgcataaacaacataagcttctgactcttacctccctctctcctactcctgctcgcatctgctatagtggaggccggagcaggaacaggttgaacagtctaccctcccttagcagggaactactcccaccctggagcctccgtagacctaaccatcttctccttacacctagcaggtgtctcctctatcttaggggccatcaatttcatcacaacaattatcaatataaaaccccctgccataacccaataccaaacgcccctcttcgtctgatccgtcctaatcacagcagtcctacttctcctatctctcccagtcctagctgctggcatcactatactactaacagaccgcaacctcaacaccaccttcttcgaccccgccggaggaggagaccccattctataccaacacctattctgatttttcggtcaccctgaagtttatattcttatcctaccaggcttcggaataatctcccatattgtaacttactactccggaaaaaaagaaccatttggatacataggtatggtctgagctatgatatcaattggcttcctagggtttatcgtgtgagcacaccatatatttacagtaggaatagacgtagacacacgagcatatttcacctccgctaccataatcatcgctatccccaccggcgtcaaagtatttagctgactcgccacactccacggaagcaatatgaaatgatctgctgcagtgctctgagccctaggattcatctttcttttcaccgtaggtggcctgactggcattgtattagcaaactcatcactagacatcgtactacacgacacgtactacgttgtagcccacttccactatgtcctatcaataggagctgtatttgccatcataggaggcttcattcactgatttcccctattctcaggctacaccctagaccaaacctacgccaaaatccatttcactatcatattcatcggcgtaaatctaactttcttcccacaacactttctcggcctatccggaatgccccgacgttactcggactaccccgatgcatacaccacatgaaacatcctatcatctgtaggctcattcatttctctaacagcagtaatattaataattttcatgatttgagaagccttcgcttcgaagcgaaaagtcctaatagtagaagaaccctccataaacctggagtgactatatggatgccccccaccctaccacacattcgaagaacccgtatacataaaatctagacaaaaaaggaaggaatcgaaccccccaaagctggtttcaagccaaccccatggcctccatgactttttcaaaaaggtattagaaaaaccatttcataactttgtcaaagttaaattataggctaaatcctatatatcttaatggcacatgcagcgcaagtaggtctacaagacgctacttcccctatcatagaagagcttatcacctttcatgatcacgccctcataatcattttccttatctgcttcctagtcctgtatgcccttttcctaacactcacaacaaaactaactaatactaacatctcagacgctcaggaaatagaaaccgtctgaactatcctgcccgccatcatcctagtcctcatcgccctcccatccctacgcatcctttacataacagacgaggtcaacgatccctcccttaccatcaaatcaattggccaccaatggtactgaacctacgagtacaccgactacggcggactaatcttcaactcctacatacttcccccattattcctagaaccaggcgacctgcgactccttgacgttgacaatcgagtagtactcccgattgaagcccccattcgtataataattacatcacaagacgtcttgcactcatgagctgtccccacattaggcttaaaaacagatgcaattcccggacgtctaaaccaaaccactttcaccgctacacgaccgggggtatactacggtcaatgctctgaaatctgtggagcaaaccacagtttcatgcccatcgtcctagaattaattcccctaaaaatctttgaaatagggcccgtatttaccctatagcaccccctctaccccctctagagcccactgtaaagctaacttagcattaaccttttaagttaaagattaagagaaccaacacctctttacagtgaaatgccccaactaaatactaccgtatggcccaccataattacccccatactccttacactattcctcatcacccaactaaaaatattaaacacaaactaccacctacctccctcaccaaagcccataaaaataaaaaattataacaaaccctgagaaccaaaatgaacgaaaatctgttcgcttcattcattgcccccacaatcctaggcctacccgccgcagtactgatcattctatttccccctctattgatccccacctccaaatatctcatcaacaaccgactaatcaccacccaacaatgactaatcaaactaacctcaaaacaaatgataaccatacacaacactaaaggacgaacctgatctcttatactagtatccttaatcatttttattgccacaactaacctcctcggactcctgcctcactcatttacaccaaccacccaactatctataaacctagccatggccatccccttatgagcgggcgcagtgattataggctttcgctctaagattaaaaatgccctagcccacttcttaccacaaggcacacctacaccccttatccccatactagttattatcgaaaccatcagcctactcattcaaccaatagccctggccgtacgcctaaccgctaacattactgcaggccacctactcatgcacctaattggaagcgccaccctagcaatatcaaccattaaccttccctctacacttatcatcttcacaattctaattctactgactatcctagaaatcgctgtcgccttgatccaagcctacgttttcacacttctagtaagcctctacctgcacgacaacacataatgacccaccaatcacatgcctatcatatagtaaaacccagcccatgacccctaacaggggccctctcagccctcctaatgacctccggcctagccatgtgatttcacttccactccataacgctcctcatactaggcctactaaccaacacactaaccatataccaatgatggcgcgatgtaacacgagaaagcacataccaaggccaccacacaccacctgtccaaaaaggccttcgatacgggataatcctatttattacctcagaagtttttttcttcgcaggatttttctgagccttttaccactccagcctagcccctaccccccaattaggagggcactggcccccaacaggcatcaccccgctaaatcccctagaagtcccactcctaaacacatccgtattactcgcatcaggagtatcaatcacctgagctcaccatagtctaatagaaaacaaccgaaaccaaataattcaagcactgcttattacaattttactgggtctctattttaccctcctacaagcctcagagtacttcgagtctcccttcaccatttccgacggcatctacggctcaacattttttgtagccacaggcttccacggacttcacgtcattattggctcaactttcctcactatctgcttcatccgccaactaatatttcactttacatccaaacatcactttggcttcgaagccgccgcctgatactggcattttgtagatgtggtttgactatttctgtatgtctccatctattgatgagggtcttactcttttagtataaatagtaccgttaacttccaattaactagttttgacaacattcaaaaaagagtaataaacttcgccttaattttaataatcaacaccctcctagccttactactaataattattacattttgactaccacaactcaacggctacatagaaaaatccaccccttacgagtgcggcttcgaccctatatcccccgcccgcgtccctttctccataaaattcttcttagtagctattaccttcttattatttgatctagaaattgccctccttttacccctaccatgagccctacaaacaactaacctgccactaatagttatgtcatccctcttattaatcatcatcctagccctaagtctggcctatgagtgactacaaaaaggattagactgaaccgaattggtatatagtttaaacaaaacgaatgatttcgactcattaaattatgataatcatatttaccaaatgcccctcatttacataaatattatactagcatttaccatctcacttctaggaatactagtatatcgctcacacctcatatcctccctactatgcctagaaggaataatactatcgctgttcattatagctactctcataaccctcaacacccactccctcttagccaatattgtgcctattgccatactagtctttgccgcctgcgaagcagcggtgggcctagccctactagtctcaatctccaacacatatggcctagactacgtacataacctaaacctactccaatgctaaaactaatcgtcccaacaattatattactaccactgacatgactttccaaaaaacacataatttgaatcaacacaaccacccacagcctaattattagcatcatccctctactattttttaaccaaatcaacaacaacctatttagctgttccccaaccttttcctccgaccccctaacaacccccctcctaatactaactacctgactcctacccctcacaatcatggcaagccaacgccacttatccagtgaaccactatcacgaaaaaaactctacctctctatactaatctccctacaaatctccttaattataacattcacagccacagaactaatcatattttatatcttcttcgaaaccacacttatccccaccttggctatcatcacccgatgaggcaaccagccagaacgcctgaacgcaggcacatacttcctattctacaccctagtaggctcccttcccctactcatcgcactaatttacactcacaacaccctaggctcactaaacattctactactcactctcactgcccaagaactatcaaactcctgagccaacaacttaatatgactagcttacacaatagcttttatagtaaagatacctctttacggactccacttatgactccctaaagcccatgtcgaagcccccatcgctgggtcaatagtacttgccgcagtactcttaaaactaggcggctatggtataatacgcctcacactcattctcaaccccctgacaaaacacatagcctaccccttccttgtactatccctatgaggcataattataacaagctccatctgcctacgacaaacagacctaaaatcgctcattgcatactcttcaatcagccacatagccctcgtagtaacagccattctcatccaaaccccctgaagcttcaccggcgcagtcattctcataatcgcccacgggcttacatcctcattactattctgcctagcaaactcaaactacgaacgcactcacagtcgcatcataatcctctctcaaggacttcaaactctactcccactaatagctttttgatgacttctagcaagcctcgctaacctcgccttaccccccactattaacctactgggagaactctctgtgctagtaaccacgttctcctgatcaaatatcactctcctacttacaggactcaacatactagtcacagccctatactccctctacatatttaccacaacacaatggggctcactcacccaccacattaacaacataaaaccctcattcacacgagaaaacaccctcatgttcatacacctatcccccattctcctcctatccctcaaccccgacatcattaccgggttttcctcttgtaaatatagtttaaccaaaacatcagattgtgaatctgacaacagaggcttacgaccccttatttaccgagaaagctcacaagaactgctaactcatgcccccatgtctaacaacatggctttctcaacttttaaaggataacagctatccattggtcttaggccccaaaaattttggtgcaactccaaataaaagtaataaccatgcacactactataaccaccctaaccctgacttccctaattccccccatccttaccaccctcgttaaccctaacaaaaaaaactcatacccccattatgtaaaatccattgtcgcatccacctttattatcagtctcttccccacaacaatattcatgtgcctagaccaagaagttattatctcgaactgacactgagccacaacccaaacaacccagctctccctaagcttcaaactagactacttctccataatattcatccctgtagcattgttcgttacatggtccatcatagaattctcactgtgatatataaactcagacccaaacattaatcagttcttcaaatatctactcatcttcctaattaccatactaatcttagttaccgctaacaacctattccaactgttcatcggctgagagggcgtaggaattatatccttcttgctcatcagttgatgatacgcccgagcagatgccaacacagcagccattcaagcaatcctatacaaccgtatcggcgatatcggtttcatcctcgccttagcatgatttatcctacactccaactcatgagacccacaacaaatagcccttctaaacgctaatccaagcctcaccccactactaggcctcctcctagcagcagcaggcaaatcagcccaattaggtctccacccctgactcccctcagccatagaaggccccaccccagtctcagccctactccactcaagcactatagttgtagcaggaatcttcttactcatccgcttccaccccctagcagaaaatagcccactaatccaaactctaacactatgcttaggcgctatcaccactctgttcgcagcagtctgcgcccttacacaaaatgacatcaaaaaaatcgtagccttctccacttcaagtcaactaggactcataatagttacaatcggcatcaaccaaccacacctagcattcctgcacatctgtacccacgccttcttcaaagccatactatttatgtgctccgggtccatcatccacaaccttaacaatgaacaagatattcgaaaaataggaggactactcaaaaccatacctctcacttcaacctccctcaccattggcagcctagcattagcaggaatacctttcctcacaggtttctactccaaagaccacatcatcgaaaccgcaaacatatcatacacaaacgcctgagccctatctattactctcatcgctacctccctgacaagcgcctatagcactcgaataattcttctcaccctaacaggtcaacctcgcttccccacccttactaacattaacgaaaataaccccaccctactaaaccccattaaacgcctggcagccggaagcctattcgcaggatttctcattactaacaacatttcccccgcatcccccttccaaacaacaatccccctctacctaaaactcacagccctcgctgtcactttcctaggacttctaacagccctagacctcaactacctaaccaacaaacttaaaataaaatccccactatgcacattttatttctccaacatactcggattctaccctagcatcacacaccgcacaatcccctatctaggccttcttacgagccaaaacctgcccctactcctcctagacctaacctgactagaaaagctattacctaaaacaatttcacagcaccaaatctccacctccatcatcacctcaacccaaaaaggcataattaaactttacttcctctctttcttcttcccactcatcctaaccctactcctaatcacataacctattcccccgagcaatctcaattacaatatatacaccaacaaacaatgttcaaccagtaactactactaatcaacgcccataatcatacaaagcccccgcaccaataggatcctcccgaatcaaccctgacccctctccttcataaattattcagcttcctacactattaaagtttaccacaaccaccaccccatcatactctttcacccacagcaccaatcctacctccatcgctaaccccactaaaacactcaccaagacctcaacccctgacccccatgcctcaggatactcctcaatagccatcgctgtagtatatccaaagacaaccatcattccccctaaataaattaaaaaaactattaaacccatataacctcccccaaaattcagaataataacacacccgaccacaccgctaacaatcaatactaaacccccataaataggagaaggcttagaagaaaaccccacaaaccccattactaaacccacactcaacagaaacaaagcatacatcattattctcgcacggactacaaccacgaccaatgatatgaaaaaccatcgttgtatttcaactacaagaacaccaatgaccccaatacgcaaaactaaccccctaataaaattaattaaccactcattcatcgacctccccaccccatccaacatctccgcatgatgaaacttcggctcactccttggcgcctgcctgatcctccaaatcaccacaggactattcctagccatgcactactcaccagacgcctcaaccgccttttcatcaatcgcccacatcactcgagacgtaaattatggctgaatcatccgctaccttcacgccaatggcgcctcaatattctttatctgcctcttcctacacatcgggcgaggcctatattacggatcatttctctactcagaaacctgaaacatcggcattatcctcctgcttgcaactatagcaacagccttcataggctatgtcctcccgtgaggccaaatatcattctgaggggccacagtaattacaaacttactatccgccatcccatacattgggacagacctagttcaatgaatctgaggaggctactcagtagacagtcccaccctcacacgattctttacctttcacttcatcttgcccttcattattgcagccctagcagcactccacctcctattcttgcacgaaacgggatcaaacaaccccctaggaatcacctcccattccgataaaatcaccttccacccttactacacaatcaaagacgccctcggcttacttctcttccttctctccttaatgacattaacactattctcaccagacctcctaggcgacccagacaattataccctagccaaccccttaaacacccctccccacatcaagcccgaatgatatttcctattcgcctacacaattctccgatccgtccctaacaaactaggaggcgtccttgccctattactatccatcctcatcctagcaataatccccatcctccatatatccaaacaacaaagcataatatttcgcccactaagccaatcactttattgactcctagccgcagacctcctcattctaacctgaatcggaggacaaccagtaagctacccttttaccatcattggacaagtagcatccgtactatacttcacaacaatcctaatcctaataccaactatctccctaattgaaaacaaaatactcaaatgggcctgtccttgtagtataaactaatacaccagtcttgtaaaccggagatgaaaacctttttccaaggacaaatcagagaaaaagtctttaactccaccattagcacccaaagctaagattctaatttaaactattctctgttctttcatggggaagcagatttgggtaccacccaagtattgactcacccatcaacaaccgctatgtatttcgtacattactgccagccaccatgaatattgtacggtaccataaatacttgaccacctgtagtacataaaaacccaatccacatcaaaaccccctccccatgcttacaagcaagtacagcaatcaaccctcaactatcacacatcaactgcaactccaaagccacccctcacccactaggataccaacaaacctacccacccttaacagtacatagtacataaagccatttaccgtacatagcacattacagtcaaatcccttctcgtccccatggatgacccccctcagataggggtcccttgaccaccatcctccgtgaaatcaatatcccgcacaagagtgctactctcctcgctccgggcccataacacttgggggtagctaaagtgaactgtatccgacatctggttcctacttcagggtcataaagcctaaatagcccacacgttccccttaaataagacatcacgatg

SEQ ID NO: 482 - DNA, 16569 bp, Homo sapiens mitochondrial
  3107: "n" refers to a nucleotide at position 3107 of the Cambridge Reference Sequence (CRS, Anderson et al. 1981 Nature 290:457-465), later determined to be absent from the human mtDNA sequence according to the revised CRS (rCRS, Andrews et al. 1999 Nature Genetics 23:147); "n" therefore represents a single nucleotide deletion at a position corresponding to nucleotide 3107 of SEQ ID NO:1 as provided herein.
gatcacaggtctatcaccctattaaccactcacgggagctctccatgcatttggtattttcgtctggggggtatgcacgcgatagcattgcgagacgctggagccggagcaccctatgtcgcagtatctgtctttgattcctgcctcatcctattatttatcgcacctacgttcaatattacaggcgaacatacttactaaagtgtgttaattaattaatgcttgtaggacataataataacaattgaatgtctgcacagccactttccacacagacatcataacaaaaaatttccaccaaaccccccctcccccgcttctggccacagcacttaaacacatctctgccaaaccccaaaaacaaagaaccctaacaccagcctaaccagatttcaaattttatcttttggcggtatgcacttttaacagtcaccccccaactaacacattattttcccctcccactcccatactactaatctcatcaatacaacccccgcccatcctacccagcacacacacaccgctgctaaccccataccccgaaccaaccaaaccccaaagacaccccccacagtttatgtagcttacctcctcaaagcaatacactgaaaatgtttagacgggctcacatcaccccataaacaaataggtttggtcctagcctttctattagctcttagtaagattacacatgcaagcatccccgttccagtgagttcaccctctaaatcaccacgatcaaaagggacaagcatcaagcacgcagcaatgcagctcaaaacgcttagcctagccacacccccacgggaaacagcagtgattaacctttagcaataaacgaaagtttaactaagctatactaaccccagggttggtcaatttcgtgccagccaccgcggtcacacgattaacccaagtcaatagaagccggcgtaaagagtgttttagatcaccccctccccaataaagctaaaactcacctgagttgtaaaaaactccagttgacacaaaatagactacgaaagtggctttaacatatctgaacacacaatagctaagacccaaactgggattagataccccactatgcttagccctaaacctcaacagttaaatcaacaaaactgctcgccagaacactacgagccacagcttaaaactcaaaggacctggcggtgcttcatatccctctagaggagcctgttctgtaatcgataaaccccgatcaacctcaccacctcttgctcagcctatataccgccatcttcagcaaaccctgatgaaggctacaaagtaagcgcaagtacccacgtaaagacgttaggtcaaggtgtagcccatgaggtggcaagaaatgggctacattttctaccccagaaaactacgatagcccttatgaaacttaagggtcgaaggtggatttagcagtaaactgagagtagagtgcttagttgaacagggccctgaagcgcgtacacaccgcccgtcaccctcctcaagtatacttcaaaggacatttaactaaaacccctacgcatttatatagaggagacaagtcgtaacatggtaagtgtactggaaagtgcacttggacgaaccagagtgtagcttaacacaaagcacccaacttacacttaggagatttcaacttaacttgaccgctctgagctaaacctagccccaaacccactccaccttactaccagacaaccttagccaaaccatttacccaaataaagtataggcgatagaaattgaaacctggcgcaatagatatagtaccgcaagggaaagatgaaaaattataaccaagcataatatagcaaggactaacccctataccttctgcataatgaattaactagaaataactttgcaaggagagccaaagctaagacccccgaaaccagacgagctacctaagaacagctaaaagagcacacccgtctatgtagcaaaatagtgggaagatttataggtagaggcgacaaacctaccgagcctggtgatagctggttgtccaagatagaatcttagttcaactttaaatttgcccacagaaccctctaaatccccttgtaaatttaactgttagtccaaagaggaacagctctttggacactaggaaaaaaccttgtagagagagtaaaaaatttaacacccatagtaggcctaaaagcagccaccaattaagaaagcgttcaagctcaacacccactacctaaaaaatcccaaacatataactgaactcctcacacccaattggaccaatctatcaccctatagaagaactaatgttagtataagtaacatgaaaacattctcctccgcataagcctgcgtcagattaaaacactgaactgacaattaacagcccaatatctacaatcaaccaacaagtcattattaccctcactgtcaacccaacacaggcatgctcataaggaaaggttaaaaaaagtaaaaggaactcggcaaatcttaccccgcctgtttaccaaaaacatcacctctagcatcaccagtattagaggcaccgcctgcccagtgacacatgtttaacggccgcggtaccctaaccgtgcaaaggtagcataatcacttgttccttaaatagggacctgtatgaatggctccacgagggttcagctgtctcttacttttaaccagtgaaattgacctgcccgtgaagaggcgggcataacacagcaagacgagaagaccctatggagctttaatttattaatgcaaacagtacctaacaaacccacaggtcctaaactaccaaacctgcattaaaaatttcggttggggcgacctcggagcagaacccaacctccgagcagtacatgctaagacttcaccagtcaaagcgaactactatactcaattgatccaataacttgaccaacggaacaagttaccctagggataacagcgcaatcctattctagagtccatatcaacaatagggtttacgacctcgatgttggatcaggacatcccgatggtgcagccgctattaaaggttcgtttgttcaacgattaaagtcctacgtgatctgagttcagaccggagtaatccaggtcggtttctatctacnttcaaattcctccctgtacgaaaggacaagagaaataaggcctacttcacaaagcgccttcccccgtaaatgatatcatctcaacttagtattatacccacacccacccaagaacagggtttgttaagatggcagagcccggtaatcgcataaaacttaaaactttacagtcagaggttcaattcctcttcttaacaacatacccatggccaacctcctactcctcattgtacccattctaatcgcaatggcattcctaatgcttaccgaacgaaaaattctaggctatatacaactacgcaaaggccccaacgttgtaggcccctacgggctactacaacccttcgctgacgccataaaactcttcaccaaagagcccctaaaacccgccacatctaccatcaccctctacatcaccgccccgaccttagctctcaccatcgctcttctactatgaacccccctccccatacccaaccccctggtcaacctcaacctaggcctcctatttattctagccacctctagcctagccgtttactcaatcctctgatcagggtgagcatcaaactcaaactacgccctgatcggcgcactgcgagcagtagcccaaacaatctcatatgaagtcaccctagccatcattctactatcaacattactaataagtggctcctttaacctctccacccttatcacaacacaagaacacctctgattactcctgccatcatgacccttggccataatatgatttatctccacactagcagagaccaaccgaacccccttcgaccttgccgaaggggagtccgaactagtctcaggcttcaacatcgaatacgccgcaggccccttcgccctattcttcatagccgaatacacaaacattattataataaacaccctcaccactacaatcttcctaggaacaacatatgacgcactctcccctgaactctacacaacatattttgtcaccaagaccctacttctaacctccctgttcttatgaattcgaacagcatacccccgattccgctacgaccaactcatacacctcctatgaaaaaacttcctaccactcaccctagcattacttatatgatatgtctccatacccattacaatctccagcattccccctcaaacctaagaaatatgtctgataaaagagttactttgatagagtaaataataggagcttaaacccccttatttctaggactatgagaatcgaacccatccctgagaatccaaaattctccgtgccacctatcacaccccatcctaaagtaaggtcagctaaataagctatcgggcccataccccgaaaatgttggttatacccttcccgtactaattaatcccctggcccaacccgtcatctactctaccatctttgcaggcacactcatcacagcgctaagctcgcactgattttttacctgagtaggcctagaaataaacatgctagcttttattccagttctaaccaaaaaaataaaccctcgttccacagaagctgccatcaagtatttcctcacgcaagcaaccgcatccataatccttctaatagctatcctcttcaacaatatactctccggacaatgaaccataaccaatactaccaatcaatactcatcattaataatcataatggctatagcaataaaactaggaatagccccctttcacttctgagtcccagaggttacccaaggcacccctctgacatccggcctgcttcttctcacatgacaaaaactagcccccatctcaatcatataccaaatctctccctcactaaacgtaagccttctcctcactctctcaatcttatccatcatagcaggcagttgaggtggattaaaccaaacccagctacgcaaaatcttagcatactcctcaattacccacataggatgaataatagcagttctaccgtacaaccctaacataaccattcttaatttaactatttatattatcctaactactaccgcattcctactactcaacttaaactccagcaccacgaccctactactatctcgcacctgaaacaagctaacatgactaacacccttaattccatccaccctcctctccctaggaggcctgcccccgctaaccggctttttgcccaaatgggccattatcgaagaattcacaaaaaacaatagcctcatcatccccaccatcatagccaccatcaccctccttaacctctacttctacctacgcctaatctactccacctcaatcacactactccccatatctaacaacgtaaaaataaaatgacagtttgaacatacaaaacccaccccattcctccccacactcatcgcccttaccacgctactcctacctatctccccttttatactaataatcttatagaaatttaggttaaatacagaccaagagccttcaaagccctcagtaagttgcaatacttaatttctgtaacagctaaggactgcaaaaccccactctgcatcaactgaacgcaaatcagccactttaattaagctaagcccttactagaccaatgggacttaaacccacaaacacttagttaacagctaagcaccctaatcaactggcttcaatctacttctcccgccgccgggaaaaaaggcgggagaagccccggcaggtttgaagctgcttcttcgaatttgcaattcaatatgaaaatcacctcggagctggtaaaaagaggcctaacccctgtctttagatttacagtccaatgcttcactcagccattttacctcacccccactgatgttcgccgaccgttgactattctctacaaaccacaaagacattggaacactatacctattattcggcgcatgagctggagtcctaggcacagctctaagcctccttattcgagccgagctgggccagccaggcaaccttctaggtaacgaccacatctacaacgttatcgtcacagcccatgcatttgtaataatcttcttcatagtaatacccatcataatcggaggctttggcaactgactagttcccctaataatcggtgcccccgatatggcgtttccccgcataaacaacataagcttctgactcttacctccctctctcctactcctgctcgcatctgctatagtggaggccggagcaggaacaggttgaacagtctaccctcccttagcagggaactactcccaccctggagcctccgtagacctaaccatcttctccttacacctagcaggtgtctcctctatcttaggggccatcaatttcatcacaacaattatcaatataaaaccccctgccataacccaataccaaacgcccctcttcgtctgatccgtcctaatcacagcagtcctacttctcctatctctcccagtcctagctgctggcatcactatactactaacagaccgcaacctcaacaccaccttcttcgaccccgccggaggaggagaccccattctataccaacacctattctgatttttcggtcaccctgaagtttatattcttatcctaccaggcttcggaataatctcccatattgtaacttactactccggaaaaaaagaaccatttggatacataggtatggtctgagctatgatatcaattggcttcctagggtttatcgtgtgagcacaccatatatttacagtaggaatagacgtagacacacgagcatatttcacctccgctaccataatcatcgctatccccaccggcgtcaaagtatttagctgactcgccacactccacggaagcaatatgaaatgatctgctgcagtgctctgagccctaggattcatctttcttttcaccgtaggtggcctgactggcattgtattagcaaactcatcactagacatcgtactacacgacacgtactacgttgtagcccacttccactatgtcctatcaataggagctgtatttgccatcataggaggcttcattcactgatttcccctattctcaggctacaccctagaccaaacctacgccaaaatccatttcactatcatattcatcggcgtaaatctaactttcttcccacaacactttctcggcctatccggaatgccccgacgttactcggactaccccgatgcatacaccacatgaaacatcctatcatctgtaggctcattcatttctctaacagcagtaatattaataattttcatgatttgagaagccttcgcttcgaagcgaaaagtcctaatagtagaagaaccctccataaacctggagtgactatatggatgccccccaccctaccacacattcgaagaacccgtatacataaaatctagacaaaaaaggaaggaatcgaaccccccaaagctggtttcaagccaaccccatggcctccatgactttttcaaaaaggtattagaaaaaccatttcataactttgtcaaagttaaattataggctaaatcctatatatcttaatggcacatgcagcgcaagtaggtctacaagacgctacttcccctatcatagaagagcttatcacctttcatgatcacgccctcataatcattttccttatctgcttcctagtcctgtatgcccttttcctaacactcacaacaaaactaactaatactaacatctcagacgctcaggaaatagaaaccgtctgaactatcctgcccgccatcatcctagtcctcatcgccctcccatccctacgcatcctttacataacagacgaggtcaacgatccctcccttaccatcaaatcaattggccaccaatggtactgaacctacgagtacaccgactacggcggactaatcttcaactcctacatacttcccccattattcctagaaccaggcgacctgcgactccttgacgttgacaatcgagtagtactcccgattgaagcccccattcgtataataattacatcacaagacgtcttgcactcatgagctgtccccacattaggcttaaaaacagatgcaattcccggacgtctaaaccaaaccactttcaccgctacacgaccgggggtatactacggtcaatgctctgaaatctgtggagcaaaccacagtttcatgcccatcgtcctagaattaattcccctaaaaatctttgaaatagggcccgtatttaccctatagcaccccctctaccccctctagagcccactgtaaagctaacttagcattaaccttttaagttaaagattaagagaaccaacacctctttacagtgaaatgccccaactaaatactaccgtatggcccaccataattacccccatactccttacactattcctcatcacccaactaaaaatattaaacacaaactaccacctacctccctcaccaaagcccataaaaataaaaaattataacaaaccctgagaaccaaaatgaacgaaaatctgttcgcttcattcattgcccccacaatcctaggcctacccgccgcagtactgatcattctatttccccctctattgatccccacctccaaatatctcatcaacaaccgactaatcaccacccaacaatgactaatcaaactaacctcaaaacaaatgataaccatacacaacaccaaaggacgaacctgatctcttatactagtatccttaatcatttttattgccacaactaacctcctcggactcctgcctcactcatttacaccaaccacccaactatctataaacctagccatggccatccccttatgagcgggcgcagtgattataggctttcgctctaagattaaaaatgccctagcccacttcttaccacaaggcacacctacaccccttatccccatactagttattatcgaaaccatcagcctactcattcaaccaatagccctggccgtacgcctaaccgctaacattactgcaggccacctactcatgcacctaattggaagcgccaccctagcaatatcaaccattaaccttccctctacacttatcatcttcacaattctaattctactgactatcctagaaatcgctgtcgccttaatccaagcctacgttttcacacttctagtaagcctctacctgcacgacaacacataatgacccaccaatcacatgcctatcatatagtaaaacccagcccatgacccctaacaggggccctctcagccctcctaatgacctccggcctagccatgtgatttcacttccactccataacgctcctcatactaggcctactaaccaacacactaaccatataccaatgatggcgcgatgtaacacgagaaagcacataccaaggccaccacacaccacctgtccaaaaaggccttcgatacgggataatcctatttattacctcagaagtttttttcttcgcaggatttttctgagccttttaccactccagcctagcccctaccccccaattaggagggcactggcccccaacaggcatcaccccgctaaatcccctagaagtcccactcctaaacacatccgtattactcgcatcaggagtatcaatcacctgagctcaccatagtctaatagaaaacaaccgaaaccaaataattcaagcactgcttattacaattttactgggtctctattttaccctcctacaagcctcagagtacttcgagtctcccttcaccatttccgacggcatctacggctcaacattttttgtagccacaggcttccacggacttcacgtcattattggctcaactttcctcactatctgcttcatccgccaactaatatttcactttacatccaaacatcactttggcttcgaagccgccgcctgatactggcattttgtagatgtggtttgactatttctgtatgtctccatctattgatgagggtcttactcttttagtataaatagtaccgttaacttccaattaactagttttgacaacattcaaaaaagagtaataaacttcgccttaattttaataatcaacaccctcctagccttactactaataattattacattttgactaccacaactcaacggctacatagaaaaatccaccccttacgagtgcggcttcgaccctatatcccccgcccgcgtccctttctccataaaattcttcttagtagctattaccttcttattatttgatctagaaattgccctccttttacccctaccatgagccctacaaacaactaacctgccactaatagttatgtcatccctcttattaatcatcatcctagccctaagtctggcctatgagtgactacaaaaaggattagactgaaccgaattggtatatagtttaaacaaaacgaatgatttcgactcattaaattatgataatcatatttaccaaatgcccctcatttacataaatattatactagcatttaccatctcacttctaggaatactagtatatcgctcacacctcatatcctccctactatgcctagaaggaataatactatcgctgttcattatagctactctcataaccctcaacacccactccctcttagccaatattgtgcctattgccatactagtctttgccgcctgcgaagcagcggtgggcctagccctactagtctcaatctccaacacatatggcctagactacgtacataacctaaacctactccaatgctaaaactaatcgtcccaacaattatattactaccactgacatgactttccaaaaaacacataatttgaatcaacacaaccacccacagcctaattattagcatcatccctctactattttttaaccaaatcaacaacaacctatttagctgttccccaaccttttcctccgaccccctaacaacccccctcctaatactaactacctgactcctacccctcacaatcatggcaagccaacgccacttatccagtgaaccactatcacgaaaaaaactctacctctctatactaatctccctacaaatctccttaattataacattcacagccacagaactaatcatattttatatcttcttcgaaaccacacttatccccaccttggctatcatcacccgatgaggcaaccagccagaacgcctgaacgcaggcacatacttcctattctacaccctagtaggctcccttcccctactcatcgcactaatttacactcacaacaccctaggctcactaaacattctactactcactctcactgcccaagaactatcaaactcctgagccaacaacttaatatgactagcttacacaatagcttttatagtaaagatacctctttacggactccacttatgactccctaaagcccatgtcgaagcccccatcgctgggtcaatagtacttgccgcagtactcttaaaactaggcggctatggtataatacgcctcacactcattctcaaccccctgacaaaacacatagcctaccccttccttgtactatccctatgaggcataattataacaagctccatctgcctacgacaaacagacctaaaatcgctcattgcatactcttcaatcagccacatagccctcgtagtaacagccattctcatccaaaccccctgaagcttcaccggcgcagtcattctcataatcgcccacgggcttacatcctcattactattctgcctagcaaactcaaactacgaacgcactcacagtcgcatcataatcctctctcaaggacttcaaactctactcccactaatagctttttgatgacttctagcaagcctcgctaacctcgccttaccccccactattaacctactgggagaactctctgtgctagtaaccacgttctcctgatcaaatatcactctcctacttacaggactcaacatactagtcacagccctatactccctctacatatttaccacaacacaatggggctcactcacccaccacattaacaacataaaaccctcattcacacgagaaaacaccctcatgttcatacacctatcccccattctcctcctatccctcaaccccgacatcattaccgggttttcctcttgtaaatatagtttaaccaaaacatcagattgtgaatctgacaacagaggcttacgaccccttatttaccgagaaagctcacaagaactgctaactcatgcccccatgtctaacaacatggctttctcaacttttaaaggataacagctatccattggtcttaggccccaaaaattttggtgcaactccaaataaaagtaataaccatgcacactactataaccaccctaaccctgacttccctaattccccccatccttaccaccctcgttaaccctaacaaaaaaaactcatacccccattatgtaaaatccattgtcgcatccacctttattatcagtctcttccccacaacaatattcatgtgcctagaccaagaagttattatctcgaactgacactgagccacaacccaaacaacccagctctccctaagcttcaaactagactacttctccataatattcatccctgtagcattgttcgttacatggtccatcatagaattctcactgtgatatataaactcagacccaaacattaatcagttcttcaaatatctactcatcttcctaattaccatactaatcttagttaccgctaacaacctattccaactgttcatcggctgagagggcgtaggaattatatccttcttgctcatcagttgatgatacgcccgagcagatgccaacacagcagccattcaagcaatcctatacaaccgtatcggcgatatcggtttcatcctcgccttagcatgatttatcctacactccaactcatgagacccacaacaaatagcccttctaaacgctaatccaagcctcaccccactactaggcctcctcctagcagcagcaggcaaatcagcccaattaggtctccacccctgactcccctcagccatagaaggccccaccccagtctcagccctactccactcaagcactatagttgtagcaggaatcttcttactcatccgcttccaccccctagcagaaaatagcccactaatccaaactctaacactatgcttaggcgctatcaccactctgttcgcagcagtctgcgcccttacacaaaatgacatcaaaaaaatcgtagccttctccacttcaagtcaactaggactcataatagttacaatcggcatcaaccaaccacacctagcattcctgcacatctgtacccacgccttcttcaaagccatactatttatgtgctccgggtccatcatccacaaccttaacaatgaacaagatattcgaaaaataggaggactactcaaaaccatacctctcacttcaacctccctcaccattggcagcctagcattagcaggaatacctttcctcacaggtttctactccaaagaccacatcatcgaaaccgcaaacatatcatacacaaacgcctgagccctatctattactctcatcgctacctccctgacaagcgcctatagcactcgaataattcttctcaccctaacaggtcaacctcgcttccccacccttactaacattaacgaaaataaccccaccctactaaaccccattaaacgcctggcagccggaagcctattcgcaggatttctcattactaacaacatttcccccgcatcccccttccaaacaacaatccccctctacctaaaactcacagccctcgctgtcactttcctaggacttctaacagccctagacctcaactacctaaccaacaaacttaaaataaaatccccactatgcacattttatttctccaacatactcggattctaccctagcatcacacaccgcacaatcccctatctaggccttcttacgagccaaaacctgcccctactcctcctagacctaacctgactagaaaagctattacctaaaacaatttcacagcaccaaatctccacctccatcatcacctcaacccaaaaaggcataattaaactttacttcctctctttcttcttcccactcatcctaaccctactcctaatcacataacctattcccccgagcaatctcaattacaatatatacaccaacaaacaatgttcaaccagtaactactactaatcaacgcccataatcatacaaagcccccgcaccaataggatcctcccgaatcaaccctgacccctctccttcataaattattcagcttcctacactattaaagtttaccacaaccaccaccccatcatactctttcacccacagcaccaatcctacctccatcgctaaccccactaaaacactcaccaagacctcaacccctgacccccatgcctcaggatactcctcaatagccatcgctgtagtatatccaaagacaaccatcattccccctaaataaattaaaaaaactattaaacccatataacctcccccaaaattcagaataataacacacccgaccacaccgctaacaatcaatactaaacccccataaataggagaaggcttagaagaaaaccccacaaaccccattactaaacccacactcaacagaaacaaagcatacatcattattctcgcacggactacaaccacgaccaatgatatgaaaaaccatcgttgtatttcaactacaagaacaccaatgaccccaatacgcaaaactaaccccctaataaaattaattaaccactcattcatcgacctccccaccccatccaacatctccgcatgatgaaacttcggctcactccttggcgcctgcctgatcctccaaatcaccacaggactattcctagccatgcactactcaccagacgcctcaaccgccttttcatcaatcgcccacatcactcgagacgtaaattatggctgaatcatccgctaccttcacgccaatggcgcctcaatattctttatctgcctcttcctacacatcgggcgaggcctatattacggatcatttctctactcagaaacctgaaacatcggcattatcctcctgcttgcaactatagcaacagccttcataggctatgtcctcccgtgaggccaaatatcattctgaggggccacagtaattacaaacttactatccgccatcccatacattgggacagacctagttcaatgaatctgaggaggctactcagtagacagtcccaccctcacacgattctttacctttcacttcatcttgcccttcattattgcagccctagcagcactccacctcctattcttgcacgaaacgggatcaaacaaccccctaggaatcacctcccattccgataaaatcaccttccacccttactacacaatcaaagacgccctcggcttacttctcttccttctctccttaatgacattaacactattctcaccagacctcctaggcgacccagacaattataccctagccaaccccttaaacacccctccccacatcaagcccgaatgatatttcctattcgcctacacaattctccgatccgtccctaacaaactaggaggcgtccttgccctattactatccatcctcatcctagcaataatccccatcctccatatatccaaacaacaaagcataatatttcgcccactaagccaatcactttattgactcctagccgcagacctcctcattctaacctgaatcggaggacaaccagtaagctacccttttaccatcattggacaagtagcatccgtactatacttcacaacaatcttaatcctaataccaactatctccctaattgaaaacaaaatactcaaatgggcctgtccttgtagtataaactaatacaccagtcttgtaaaccggagatgaaaacctttttccaaggacaaatcagagaaaaagtctttaactccaccattagcacccaaagctaagattctaatttaaactattctctgttctttcatggggaagcagatttgggtaccacccaagtattgactcacccatcaacaaccgctatgtatttcgtacattactgccagccaccatgaatattgtacggtaccataaatacttgaccacctgtagtacataaaaacccaatccacatcaaaaccccctccccatgcttacaagcaagtacagcaatcaaccctcaactatcacacatcaactgcaactccaaagccacccctcacccactaggataccaacaaacctacccacccttaacagtacatagtacataaagccatttaccgtacatagcacattacagtcaaatcccttctcgtccccatggatgacccccctcagataggggtcccttgaccaccatcctccgtgaaatcaatatcccgcacaagagtgctactctcctcgctccgggcccataacacttgggggtagctaaagtgaactgtatccgacatctggttcctacttcagggtcataaagcctaaatagcccacacgttccccttaaataagacatcacgatg

SEQ ID NO: 483 - DNA, 16569 bp, Homo sapiens mitochondrial
  3107: "n" refers to a nucleotide at position 3107 of the Cambridge Reference Sequence (CRS, Anderson et al. 1981 Nature 290:457-465), later determined to be absent from the human mtDNA sequence according to the revised CRS (rCRS, Andrews et al. 1999 Nature Genetics 23:147); "n" therefore represents a single nucleotide deletion at a position corresponding to nucleotide 3107 of SEQ ID NO:1 as provided herein.
gatcacaggtctatcaccctattaaccactcacgggagctctccatgcatttggtattttcgtctggggggtatgcacgcgatagcattgcgagacgctggagccggagcaccctatgtcgcagtatctgtctttgattcctgcctcatcctattatttatcgcacctacgttcaatattacaggcgaacatacttactaaagtgtgttaattaattaatgcttgtaggacataataataacaattgaatgtctgcacagccactttccacacagacatcataacaaaaaatttccaccaaaccccccctcccccgcttctggccacagcacttaaacacatctctgccaaaccccaaaaacaaagaaccctaacaccagcctaaccagatttcaaattttatcttttggcggtatgcacttttaacagtcaccccccaactaacacattattttcccctcccactcccatactactaatctcatcaatacaacccccgcccatcctacccagcacacacacaccgctgctaaccccataccccgaaccaaccaaaccccaaagacaccccccacagtttatgtagcttacctcctcaaagcaatacactgaaaatgtttagacgggctcacatcaccccataaacaaataggtttggtcctagcctttctattagctcttagtaagattacacatgcaagcatccccgttccagtgagttcaccctctaaatcaccacgatcaaaagggacaagcatcaagcacgcagcaatgcagctcaaaacgcttagcctagccacacccccacgggaaacagcagtgattaacctttagcaataaacgaaagtttaactaagctatactaaccccagggttggtcaatttcgtgccagccaccgcggtcacacgattaacccaagtcaatagaagccggcgtaaagagtgttttagatcaccccctccccaataaagctaaaactcacctgagttgtaaaaaactccagttgacacaaaatagactacgaaagtggctttaacatatctgaacacacaatagctaagacccaaactgggattagataccccactatgcttagccctaaacctcaacagttaaatcaacaaaactgctcgccagaacactacgagccacagcttaaaactcaaaggacctggcggtgcttcatatccctctagaggagcctgttctgtaatcgataaaccccgatcaacctcaccacctcttgctcagcctatataccgccatcttcagcaaaccctgatgaaggctacaaagtaagcgcaagtacccacgtaaagacgttaggtcaaggtgtagcccatgaggtggcaagaaatgggctacattttctaccccagaaaactacgatagcccttatgaaacttaagggtcgaaggtggatttagcagtaaactgagagtagagtgcttagttgaacagggccctgaagcgcgtacacaccgcccgtcaccctcctcaagtatacttcaaaggacatttaactaaaacccctacgcatttatatagaggagacaagtcgtaacatggtaagtgtactggaaagtgcacttggacgaaccagagtgtagcttaacacaaagcacccaacttacacttaggagatttcaacttaacttgaccgctctgagctaaacctagccccaaacccactccaccttactaccagacaaccttagccaaaccatttacccaaataaagtataggcgatagaaattgaaacctggcgcaatagatatagtaccgcaagggaaagatgaaaaattataaccaagcataatatagcaaggactaacccctataccttctgcataatgaattaactagaaataactttgcaaggagagccaaagctaagacccccgaaaccagacgagctacctaagaacagctaaaagagcacacccgtctatgtagcaaaatagtgggaagatttataggtagaggcgacaaacctaccgagcctggtgatagctggttgtccaagatagaatcttagttcaactttaaatttgcccacagaaccctctaaatccccttgtaaatttaactgttagtccaaagaggaacagctctttggacactaggaaaaaaccttgtagagagagtaaaaaatttaacacccatagtaggcctaaaagcagccaccaattaagaaagcgttcaagctcaacacccactacctaaaaaatcccaaacatataactgaactcctcacacccaattggaccaatctatcaccctatagaagaactaatgttagtataagtaacatgaaaacattctcctccgcataagcctgcgtcagattaaaacactgaactgacaattaacagcccaatatctacaatcaaccaacaagtcattattaccctcactgtcaacccaacacaggcatgctcataaggaaaggttaaaaaaagtaaaaggaactcggcaaatcttaccccgcctgtttaccaaaaacatcacctctagcatcaccagtattagaggcaccgcctgcccagtgacacatgtttaacggccgcggtaccctaaccgtgcaaaggtagcataatcacttgttccttaaatagggacctgtatgaatggctccacgagggttcagctgtctcttacttttaaccagtgaaattgacctgcccgtgaagaggcgggcataacacagcaagacgagaagaccctatggagctttaatttattaatgcaaacagtacctaacaaacccacaggtcctaaactaccaaacctgcattaaaaatttcggttggggcgacctcggagcagaacccaacctccgagcagtacatgctaagacttcaccagtcaaagcgaactactatactcaattgatccaataacttgaccaacggaacaagttaccctagggataacagcgcaatcctattctagagtccatatcaacaatagggtttacgacctcgatgttggatcaggacatcccaatggtgcagccgctattaaaggttcgtttgttcaacgattaaagtcctacgtgatctgagttcagaccggagtaatccaggtcggtttctatctacnttcaaattcctccctgtacgaaaggacaagagaaataaggcctacttcacaaagcgccttcccccgtaaatgatatcatctcaacttagtattatacccacacccacccaagaacagggtttgttaagatggcagagcccggtaatcgcataaaacttaaaactttacagtcagaggttcaattcctcttcttaacaacatacccatggccaacctcctactcctcattgtacccattctaatcgcaatggcattcctaatgcttaccgaacgaaaaattctaggctatatacaactacgcaaaggccccaacgttgtaggcccctacgggctactacaacccttcgctgacgccataaaactcttcaccaaagagcccctaaaacccgccacatctaccatcaccctctacatcaccgccccgaccttagctctcaccatcgctcttctactatgaacccccctccccatacccaaccccctggtcaacctcaacctaggcctcctatttattctagccacctctagcctagccgtttactcaatcctctgatcagggtgagcatcaaactcaaactacgccctgatcggcgcactgcgagcagtagcccaaacaatctcatatgaagtcaccctagccatcattctactatcaacattactaataagtggctcctttaacctctccacccttatcacaacacaagaacacctctgattactcctgccatcatgacccttggccataatatgatttatctccacactagcagagaccaaccgaacccccttcgaccttgccgaaggggagtccgaactagtctcaggcttcaacatcgaatacgccgcaggccccttcgccctattcttcatagccgaatacacaaacattattataataaacaccctcaccactacaatcttcctaggaacaacatatgacgcactctcccctgaactctacacaacatattttgtcaccaagaccctacttctaacctccctgttcttatgaattcgaacagcatacccccgattccgctacgaccaactcatacacctcctatgaaaaaacttcctaccactcaccctagcattacttatatgatatgtctccatacccattacaatctccagcattccccctcaaacctaagaaatatgtctgataaaagagttactttgatagagtaaataataggagcttaaacccccttatttctaggactatgagaatcgaacccatccctgagaatccaaaattctccgtgccacctatcacaccccatcctaaagtaaggtcagctaaataagctatcgggcccataccccgaaaatgttggttatacccttcccgtactaattaatcccctggcccaacccgtcatctactctaccatctttgcaggcacactcatcacagcgctaagctcgcactgattttttacctgagtaggcctagaaataaacatgctagcttttattccagttctaaccaaaaaaataaaccctcgttccacagaagctgccatcaagtatttcctcacgcaagcaaccgcatccataatccttctaatagctatcctcttcaacaatatactctccggacaatgaaccataaccaatactaccaatcaatactcatcattaataatcataatggctatagcaataaaactaggaatagccccctttcacttctgagtcccagaggttacccaaggcacccctctgacatccggcctgcttcttctcacatgacaaaaactagcccccatctcaatcatataccaaatctctccctcactaaacgtaagccttctcctcactctctcaatcttatccatcatagcaggcagttgaggtggattaaaccaaacccagctacgcaaaatcttagcatactcctcaattacccacataggatgaataatagcagttctaccgtacaaccctaacataaccattcttaatttaactatttatattatcctaactactaccgcattcctactactcaacttaaactccagcaccacgaccctactactatctcgcacctgaaacaagctaacatgactaacacccttaattccatccaccctcctctccctaggaggcctgcccccgctaaccggctttttgcccaaatgggccattatcgaagaattcacaaaaaacaatagcctcatcatccccaccatcatagccaccatcaccctccttaacctctacttctacctacgcctaatctactccacctcaatcacactactccccatatctaacaacgtaaaaataaaatgacagtttgaacatacaaaacccaccccattcctccccacactcatcgcccttaccacgctactcctacctatctccccttttatactaataatcttatagaaatttaggttaaatacagaccaagagccttcaaagccctcagtaagttgcaatacttaatttctgtaacagctaaggactgcaaaaccccactctgcatcaactgaacgcaaatcagccactttaattaagctaagcccttactagaccaatgggacttaaacccacaaacacttagttaacagctaagcaccctaatcaactggcttcaatctacttctcccgccgccgggaaaaaaggcgggagaagccccggcaggtttgaagctgcttcttcgaatttgcaattcaatatgaaaatcacctcggagctggtaaaaagaggcctaacccctgtctttagatttacagtccaatgcttcactcagccattttacctcacccccactgatgttcgccgaccgttgactattctctacaaaccacaaagacattggaacactatacctattattcggcgcatgagctggagtcctaggcacagctctaagcctccttattcgagccgagctgggccagccaggcaaccttctaggtaacgaccacatctacaacgttatcgtcacagcccatgcatttgtaataatcttcttcatagtaatacccatcataatcggaggctttggcaactgactagttcccctaataatcggtgcccccgatatggcgtttccccgcataaacaacataagcttctgactcttacctccctctctcctactcctgctcgcatctgctatagtggaggccggagcaggaacaggttgaacagtctaccctcccttagcagggaactactcccaccctggagcctccgtagacctaaccatcttctccttacacctagcaggcgtctcctctatcttaggggccatcaatttcatcacaacaattatcaatataaaaccccctgccataacccaataccaaacgcccctcttcgtctgatccgtcctaatcacagcagtcctacttctcctatctctcccagtcctagctgctggcatcactatactactaacagaccgcaacctcaacaccaccttcttcgaccccgccggaggaggagaccccattctataccaacacctattctgatttttcggtcaccctgaagtttatattcttatcctaccaggcttcggaataatctcccatattgtaacttactactccggaaaaaaagaaccatttggatacataggtatggtctgagctatgatatcaattggcttcctagggtttatcgtgtgagcacaccatatatttacagtaggaatagacgtagacacacgagcatatttcacctccgctaccataatcatcgctatccccaccggcgtcaaagtatttagctgactcgccacactccacggaagcaatatgaaatgatctgctgcagtgctctgagccctaggattcatctttcttttcaccgtaggtggcctgactggcattgtattagcaaactcatcactagacatcgtactacacgacacgtactacgttgtagcccacttccactatgtcctatcaataggagctgtatttgccatcataggaggcttcattcactgatttcccctattctcaggctacaccctagaccaaacctacgccaaaatccatttcactatcatattcatcggcgtaaatctaactttcttcccacaacactttctcggcctatccggaatgccccgacgttactcggactaccccgatgcatacaccacatgaaacatcctatcatctgtaggctcattcatttctctaacagcagtaatattaataattttcatgatttgagaagccttcgcttcgaagcgaaaagtcctaatagtagaagaaccctccataaacctggagtgactatatggatgccccccaccctaccacacattcgaagaacccgtatacataaaatctagacaaaaaaggaaggaatcgaaccccccaaagctggtttcaagccaaccccatggcctccatgactttttcaaaaaggtattagaaaaaccatttcataactttgtcaaagttaaattataggctaaatcctatatatcttaatggcacatgcagcgcaagtaggtctacaagacgctacttcccctatcatagaagagcttatcacctttcatgatcacgccctcataatcattttccttatctgcttcctagtcctgtatgcccttttcctaacactcacaacaaaactaactaatactaacatctcagacgctcaggaaatagaaaccgtctgaactatcctgcccgccatcatcctagtcctcatcgccctcccatccctacgcatcctttacataacagacgaggtcaacgatccctcccttaccatcaaatcaattggccaccaatggtactgaacctacgagtacaccgactacggcggactaatcttcaactcctacatacttcccccattattcctagaaccaggcgacctgcgactccttgacgttgacaatcgagtagtactcccgattgaagcccccattcgtataataattacatcacaagacgtcttgcactcatgagctgtccccacattaggcttaaaaacagatgcaattcccggacgtctaaaccaaaccactttcaccgctacacgaccgggggtatactacggtcaatgctctgaaatctgtggagcaaaccacagtttcatgcccatcgtcctagaattaattcccctaaaaatctttgaaatagggcccgtatttaccctatagcaccccctctaccccctctagagcccactgtaaagctaacttagcattaaccttttaagttaaagattaagagaaccaacacctctttacagtgaaatgccccaactaaatactaccgtatggcccaccataattacccccatactccttacactattcctcatcacccaactaaaaatattaaacacaaactaccacctacctccctcaccaaagcccataaaaataaaaaattataacaaaccctgagaaccaaaatgaacgaaaatctgttcgcttcattcattgcccccacaatcctaggcctacccgccgcagtactgatcattctatttccccctctattgatccccacctccaaatatctcatcaacaaccgactaatcaccacccaacaatgactaatcaaactaacctcaaaacaaatgataaccatacacaacactaaaggacgaacctgatctcttatactagtatccttaatcatttttattgccacaactaacctcctcggactcctgcctcactcatttacaccaaccacccaactatctataaacctagccatggccatccccttatgagcgggcgcagtgattataggctttcgctctaagattaaaaatgccctagcccacttcttaccacaaggcacacctacaccccttatccccatactagttattatcgaaaccatcagcctactcattcaaccaatagccctggccgtacgcctaaccgctaacattactgcaggccacctactcatgcacctaattggaagcgccaccctagcaatatcaaccattaaccttccctctacacttatcatcttcacaattctaattctactgactatcctagaaatcgctgtcgccttaatccaagcctacgttttcacacttctagtaagcctctacctgcacgacaacacataatgacccaccaatcacatgcctatcatatagtaaaacccagcccatgacccctaacaggggccctctcagccctcctaatgacctccggcctagccatgtgatttcacttccactccataacgctcctcatactaggcctactaaccaacacactaaccatataccaatgatggcgcgatgtaacacgagaaagcacataccaaggccaccacacaccacctgtccaaaaaggccttcgatacgggataatcctatttattacctcagaagtttttttcttcgcaggatttttctgagccttttaccactccagcctagcccctaccccccaattaggagggcactggcccccaacaggcatcaccccgctaaatcccctagaagtcccactcctaaacacatccgtattactcgcatcaggagtatcaatcacctgagctcaccatagtctaatagaaaacaaccgaaaccaaataattcaagcactgcttattacaattttactgggtctctattttaccctcctacaagcctcagagtacttcgagtctcccttcaccatttccgacggcatctacggctcaacattttttgtagccacaggcttccacggacttcacgtcattattggctcaactttcctcactatctgcttcatccgccaactaatatttcactttacatccaaacatcactttggcttcgaagccgccgcctgatactggcattttgtagatgtggtttgactatttctgtatgtctccatctattgatgagggtcttactcttttagtataaatagtaccgttaacttccaattaactagttttgacaacattcaaaaaagagtaataaacttcgccttaattttaataatcaacaccctcctagccttactactaataattattacattttgactaccacaactcaacggctacatagaaaaatccaccccttacgagtgcggcttcgaccctatatcccccgcccgcgtccctttctccataaaattcttcttagtagctattaccttcttattatttgatctagaaattgccctccttttacccctaccatgagccctacaaacaactaacctgccactaatagttatgtcatccctcttattaatcatcatcctagccctaagtctggcctatgagtgactacaaaaaggattagactgaaccgaattggtatatagtttaaacaaaacgaatgatttcgactcattaaattatgataatcatatttaccaaatgcccctcatttacataaatattatactagcatttaccatctcacttctaggaatactagtatatcgctcacacctcatatcctccctactatgcctagaaggaataatactatcgctgttcattatagctactctcataaccctcaacacccactccctcttagccaatattgtgcctattgccatactagtctttgccgcctgcgaagcagcggtgggcctagccctactagtctcaatctccaacacatatggcctagactacgtacataacctaaacctactccaatgctaaaactaatcgtcccaacaattatattactaccactgacatgactttccaaaaaacacataatttgaatcaacacaaccacccacagcctaattattagcatcatccctctactattttttaaccaaatcaacaacaacctatttagctgttccccaaccttttcctccgaccccctaacaacccccctcctaatactaactacctgactcctacccctcacaatcatggcaagccaacgccacttatccagtgaaccactatcacgaaaaaaactctacctctctatactaatctccctacaaatctccttaattataacattcacagccacagaactaatcatattttatatcttcttcgaaaccacacttatccccaccttggctatcatcacccgatgaggcaaccagccagaacgcctgaacgcaggcacatacttcctattctacaccctagtaggctcccttcccctactcatcgcactaatttacactcacaacaccctaggctcactaaacattctactactcactctcactgcccaagaactatcaaactcctgagccaacaacttaatatgactagcttacacaatagcttttatagtaaagatacctctttacggactccacttatgactccctaaagcccatgtcgaagcccccatcgctgggtcaatagtacttgccgcagtactcttaaaactaggcggctatggtataatacgcctcacactcattctcaaccccctgacaaaacacatagcctaccccttccttgtactatccctatgaggcataattataacaagctccatctgcctacgacaaacagacctaaaatcgctcattgcatactcttcaatcagccacatagccctcgtagtaacagccattctcatccaaaccccctgaagcttcaccggcgcagtcattctcataatcgcccacgggcttacatcctcattactattctgcctagcaaactcaaactacgaacgcactcacagtcgcatcataatcctctctcaaggacttcaaactctactcccactaatagctttttgatgacttctagcaagcctcgctaacctcgccttaccccccactattaacctactgggagaactctctgtgctagtaaccacgttctcctgatcaaatatcactctcctacttacaggactcaacatactagtcacagccctatactccctctacatatttaccacaacacaatggggctcactcacccaccacattaacaacataaaaccctcattcacacgagaaaacaccctcatgttcatacacctatcccccattctcctcctatccctcaaccccgacatcattaccgggttttcctcttgtaaatatagtttaaccaaaacatcagattgtgaatctgacaacagaggcttacgaccccttatttaccgagaaagctcacaagaactgctaactcatgcccccatgtctaacaacatggctttctcaacttttaaaggataacagctatccattggtcttaggccccaaaaattttggtgcaactccaaataaaagtaataaccatgcacactactataaccaccctaaccctgacttccctaattccccccatccttaccaccctcgttaaccctaacaaaaaaaactcatacccccattatgtaaaatccattgtcgcatccacctttattatcagtctcttccccacaacaatattcatgtgcctagaccaagaagttattatctcgaactgacactgagccacaacccaaacaacccagctctccctaagcttcaaactagactacttctccataatattcatccctgtagcattgttcgttacatggtccatcatagaattctcactgtgatatataaactcagacccaaacattaatcagttcttcaaatatctactcatcttcctaattaccatactaatcttagttaccgctaacaacctattccaactgttcatcggctgagagggcgtaggaattatatccttcttgctcatcagttgatgatacgcccgagcagatgccaacacagcagccattcaagcaatcctatacaaccgtatcggcgatatcggtttcatcctcgccttagcatgatttatcctacactccaactcatgagacccacaacaaatagcccttctaaacgctaatccaagcctcaccccactactaggcctcctcctagcagcagcaggcaaatcagcccaattaggtctccacccctgactcccctcagccatagaaggccccaccccagtctcagccctactccactcaagcactatagttgtagcaggaatcttcttactcatccgcttccaccccctagcagaaaatagcccactaatccaaactctaacactatgcttaggcgctatcaccactctgttcgcagcagtctgcgcccttacacaaaatgacatcaaaaaaatcgtagccttctccacttcaagtcaactaggactcataatagttacaatcggcatcaaccaaccacacctagcattcctgcacatctgtacccacgccttcttcaaagccatactatttatgtgctccgggtccatcatccacaaccttaacaatgaacaagatattcgaaaaataggaggactactcaaaaccatacctctcacttcaacctccctcaccattggcagcctagcattagcaggaatacctttcctcacaggtttctactccaaagaccacatcatcgaaaccgcaaacatatcatacacaaacgcctgagccctatctattactctcatcgctacctccctgacaagcgcctatagcactcgaataattcttctcaccctaacaggtcaacctcgcttccccacccttactaacattaacgaaaataaccccaccctactaaaccccattaaacgcctggcagccggaagcctattcgcaggatttctcattactaacaacatttcccccgcatcccccttccaaacaacaatccccctctacctaaaactcacagccctcgctgtcactttcctaggacttctaacagccctagacctcaactacctaaccaacaaacttaaaataaaatccccactatgcacattttatttctccaacatactcggattctaccctagcatcacacaccgcacaatcccctatctaggccttcttacgagccaaaacctgcccctactcctcctagacctaacctgactagaaaagctattacctaaaacaatttcacagcaccaaatctccacctccatcatcacctcaacccaaaaaggcataattaaactttacttcctctctttcttcttcccactcatcctaaccctactcctaatcacataacctattcccccgagcaatctcaattacaatatatacaccaacaaacaatgttcaaccagtaactactactaatcaacgcccataatcatacaaagcccccgcaccaataggatcctcccgaatcaaccctgacccctctccttcataaattattcagcttcctacactattaaagtttaccacaaccaccaccccatcatactctttcacccacagcaccaatcctacctccatcgctaaccccactaaaacactcaccaagacctcaacccctgacccccatgcctcaggatactcctcaatagccatcgctgtagtatatccaaagacaaccatcattccccctaaataaattaaaaaaactattaaacccatataacctcccccaaaattcagaataataacacacccgaccacaccgctaacaatcaatactaaacccccataaataggagaaggcttagaagaaaaccccacaaaccccattactaaacccacactcaacagaaacaaagcatacatcattattctcgcacggactacaaccacgaccaatgatatgaaaaaccatcgttgtatttcaactacaagaacaccaatgaccccaatacgcaaaactaaccccctaataaaattaattaaccactcattcatcgacctccccaccccatccaacatctccgcatgatgaaacttcggctcactccttggcgcctgcctgatcctccaaatcaccacaggactattcctagccatgcactactcaccagacgcctcaaccgccttttcatcaatcgcccacatcactcgagacgtaaattatggctgaatcatccgctaccttcacgccaatggcgcctcaatattctttatctgcctcttcctacacatcgggcgaggcctatattacggatcatttctctactcagaaacctgaaacatcggcattatcctcctgcttgcaactatagcaacagccttcataggctatgtcctcccgtgaggccaaatatcattctgaggggccacagtaattacaaacttactatccgccatcccatacattgggacagacctagttcaatgaatctgaggaggctactcagtagacagtcccaccctcacacgattctttacctttcacttcatcttgcccttcattattgcagccctagcagcactccacctcctattcttgcacgaaacgggatcaaacaaccccctaggaatcacctcccattccgataaaatcaccttccacccttactacacaatcaaagacgccctcggcttacttctcttccttctctccttaatgacattaacactattctcaccagacctcctaggcgacccagacaattataccctagccaaccccttaaacacccctccccacatcaagcccgaatgatatttcctattcgcctacacaattctccgatccgtccctaacaaactaggaggcgtccttgccctattactatccatcctcatcctagcaataatccccatcctccatatatccaaacaacaaagcataatatttcgcccactaagccaatcactttattgactcctagccgcagacctcctcattctaacctgaatcggaggacaaccagtaagctacccttttaccatcattggacaagtagcatccgtactatacttcacaacaatcctaatcctaataccaactatctccctaattgaaaacaaaatactcaaatgggcctgtccttgtagtataaactaatacaccagtcttgtaaaccggagatgaaaacctttttccaaggacaaatcagagaaaaagtctttaactccaccattagcacccaaagctaagattctaatttaaactattctctgttctttcatggggaagcagatttgggtaccacccaagtattgactcacccatcaacaaccgctatgtatttcgtacattactgccagccaccatgaatattgtacggtaccataaatacttgaccacctgtagtacataaaaacccaatccacatcaaaaccccctccccatgcttacaagcaagtacagcaatcaaccctcaactatcacacatcaactgcaactccaaagccacccctcacccactaggataccaacaaacctacccacccttaacagtacatagtacataaagccatttaccgtacatagcacattacagtcaaatcccttctcgtccccatggatgacccccctcagataggggtcccttgaccaccatcctccgtgaaatcaatatcccgcacaagagtgctactctcctcgctccgggcccataacacttgggggtagctaaagtgaactgtatccgacatctggttcctacttcagggtcataaagcctaaatagcccacacgttccccttaaataagacatcacgatg

SEQ ID NO: 484 - DNA, 16569 bp, Homo sapiens mitochondrial
  3107: "n" refers to a nucleotide at position 3107 of the Cambridge Reference Sequence (CRS, Anderson et al. 1981 Nature 290:457-465), later determined to be absent from the human mtDNA sequence according to the revised CRS (rCRS, Andrews et al. 1999 Nature Genetics 23:147); "n" therefore represents a single nucleotide deletion at a position corresponding to nucleotide 3107 of SEQ ID NO:1 as provided herein.
gatcacaggtctatcaccctattaaccactcacgggagctctccatgcatttggtattttcgtctggggggtatgcacgcgatagcattgcgagacgctggagccggagcaccctatgtcgcagtatctgtctttgattcctgcctcatcctattatttatcgcacctacgttcaatattacaggcgaacatacttactaaagtgtgttaattaattaatgcttgtaggacataataataacaattgaatgtctgcacagccactttccacacagacatcataacaaaaaatttccaccaaaccccccctcccccgcttctggccacagcacttaaacacatctctgccaaaccccaaaaacaaagaaccctaacaccagcctaaccagatttcaaattttatcttttggcggtatgcacttttaacagtcaccccccaactaacacattattttcccctcccactcccatactactaatctcatcaatacaacccccgcccatcctacccagcacacacacaccgctgctaaccccataccccgaaccaaccaaaccccaaagacaccccccacagtttatgtagcttacctcctcaaagcaatacactgaaaatgtttagacgggctcacatcaccccataaacaaataggtttggtcctagcctttctattagctcttagtaagattacacatgcaagcatccccgttccagtgagttcaccctctaaatcaccacgatcaaaagggacaagcatcaagcacgcagcaatgcagctcaaaacgcttagcctagccacacccccacgggaaacagcagtgattaacctttagcaataaacgaaagtttaactaagctatactaaccccagggttggtcaatttcgtgccagccaccgcggtcacacgattaacccaagtcaatagaagccggcgtaaagagtgttttagatcaccccctccccaataaagctaaaactcacctgagttgtaaaaaactccagttgacacaaaatagactacgaaagtggctttaacatatctgaacacacaatagctaagacccaaactgggattagataccccactatgcttagccctaaacctcaacagttaaatcaacaaaactgctcgccagaacactacgagccacagcttaaaactcaaaggacctggcggtgcttcatatccctctagaggagcctgttctgtaatcgataaaccccgatcaacctcaccacctcttgctcagcctatataccgccatcttcagcaaaccctgatgaaggctacaaagtaagcgcaagtacccacgtaaagacgttaggtcaaggtgtagcccatgaggtggcaagaaatgggctacattttctaccccagaaaactacgatagcccttatgaaacttaagggtcgaaggtggatttagcagtaaactgagagtagagtgcttagttgaacagggccctgaagcgcgtacacaccgcccgtcaccctcctcaagtatacttcaaaggacatttaactaaaacccctacgcatttatatagaggagacaagtcgtaacatggtaagtgtactggaaagtgcacttggacgaaccagagtgtagcttaacacaaagcacccaacttacacttaggagatttcaacttaacttgaccgctctgagctaaacctagccccaaacccactccaccctactaccagacaaccttagccaaaccatttacccaaataaagtataggcgatagaaattgaaacctggcgcaatagatatagtaccgcaagggaaagatgaaaaattataaccaagcataatatagcaaggactaacccctataccttctgcataatgaattaactagaaataactttgcaaggagagccaaagctaagacccccgaaaccagacgagctacctaagaacagctaaaagagcacacccgtctatgtagcaaaatagtgggaagatttataggtagaggcgacaaacctaccgagcctggtgatagctggttgtccaagatagaatcttagttcaactttaaatttgcccacagaaccctctaaatccccttgtaaatttaactgttagtccaaagaggaacagctctttggacactaggaaaaaaccttgtagagagagtaaaaaatttaacacccatagtaggcctaaaagcagccaccaattaagaaagcgttcaagctcaacacccactacctaaaaaatcccaaacatataactgaactcctcacacccaattggaccaatctatcaccctatagaagaactaatgttagtataagtaacatgaaaacattctcctccgcataagcctgcgtcagattaaaacactgaactgacaattaacagcccaatatctacaatcaaccaacaagtcattattaccctcactgtcaacccaacacaggcatgctcataaggaaaggttaaaaaaagtaaaaggaactcggcaaatcttaccccgcctgtttaccaaaaacatcacctctagcatcaccagtattagaggcaccgcctgcccagtgacacatgtttaacggccgcggtaccctaaccgtgcaaaggtagcataatcacttgttccttaaatagggacctgtatgaatggctccacgagggttcagctgtctcttacttttaaccagtgaaattgacctgcccgtgaagaggcgggcatgacacagcaagacgagaagaccctatggagctttaatttattaatgcaaacagtacctaacaaacccacaggtcctaaactaccaaacctgcattaaaaatttcggttggggcgacctcggagcagaacccaacctccgagcagtacatgctaagacttcaccagtcaaagcgaactactatactcaattgatccaataacttgaccaacggaacaagttaccctagggataacagcgcaatcctattctagagtccatatcaacaatagggtttacgacctcgatgttggatcaggacatcccgatggtgcagccgctattaaaggttcgtttgttcaacgattaaagtcctacgtgatctgagttcagaccggagtaatccaggtcggtttctatctacnttcaaattcctccctgtacgaaaggacaagagaaataaggcctacttcacaaagcgccttcccccgtaaatgatatcatctcaacttagcattatacccacacccacccaagaacagggtttgttaagatggcagagcccggtaatcgcataaaacttaaaactttacagtcagaggttcaattcctcttcttaacaacatacccatggccaacctcctactcctcattgtacccattctaatcgcaatggcattcctaatgcttaccgaacgaaaaattctaggctatatacaactacgcaaaggccccaacgttgtaggcccctacgggctactacaacccttcgctgacgccataaaactcttcaccaaagagcccctaaaacccgccacatctaccatcaccctctacatcaccgccccgaccttagctctcaccatcgctcttctactatgaacccccctccccatacccaaccccctggtcaacctcaacctaggcctcctatttattctagccacctctagcctagccgtttactcaatcctctgatcagggtgagcatcaaactcaaactacgccctgatcggcgcactgcgagcagtagcccaaacaatctcatatgaagtcaccctagccatcattctactatcaacattactaataagtggctcctttaacctctccacccttatcacaacacaagaacacctctgattactcctgccatcatgacccttggccataatatgatttatctccacactagcagagaccaaccgaacccccttcgaccttgccgaaggggagtccgaactagtctcaggcttcaacatcgaatacgccgcaggccccttcgccctattcttcatagccgaatacacaaacattattataataaacaccctcaccactacaatcttcctaggaacaacatatgacgcactctcccctgaactctacacaacatattttgtcaccaagaccctacttctaacctccctgttcttatgaattcgaacagcatacccccgattccgctacgaccaactcatacacctcctatgaaaaaacttcctaccactcaccctagcattacttatatgatatgtctccatacccattacaatctccagcattccccctcaaacctaagaaatatgtctgataaaagagttactttgatagagtaaataataggagcttaaacccccttatttctaggactatgagaatcgaacccatccctgagaatccaaaattctccgtgccacctatcacaccccatcctaaagtaaggtcagctaaataagctatcgggcccataccccgaaaatgttggttatacccttcccgtactaattaatcccctggcccaacccgtcatctactctaccatctttgcaggcacactcatcacagcgctaagctcgcactgattttttacctgagtaggcctagaaataaacatgctagcttttattccagttctaaccaaaaaaataaaccctcgttccacagaagctgccatcaagtatttcctcacgcaagcaaccgcatccataatccttctaatagctatcctcttcaacaatatactctccggacaatgaaccataaccaatactaccaatcaatactcatcattaataatcataatggctatagcaataaaactaggaatagccccctttcacttctgagtcccagaggttacccaaggcacccctctgacatccggcctgcttcttctcacatgacaaaaactagcccccatctcaatcatataccaaatctctccctcactaaacgtaagccttctcctcactctctcaatcttatccatcatagcaggcagttgaggtggattaaaccaaacccagctacgcaaaatcttagcatactcctcaattacccacataggatgaataatagcagttctaccgtacaaccctaacataaccattcttaatttaactatttatattatcctaactactaccgcattcctactactcaacttaaactccagcaccacgaccctactactatctcgcacctgaaacaagctaacatgactaacacccttaattccatccaccctcctctccctaggaggcctgcccccgctaaccggctttttgcccaaatgggccattatcgaagaattcacaaaaaacaatagcctcatcatccccaccatcatagccaccatcaccctccttaacctctacttctacctacgcctaatctactccacctcaatcacactactccccatatctaacaacgtaaaaataaaatgacagtttgaacatacaaaacccaccccattcctccccacactcatcgcccttaccacgctactcctacctatctcccctttcatactaataatcttatagaaatttaggttaaatacagaccaagagccttcaaagccctcagtaagttgcaatacttaatttctgtaacagctaaggactgcaaaaccccactctgcatcaactgaacgcaaatcagccactttaattaagctaagcccttactagaccaatgggacttaaacccacaaacacttagttaacagctaagcaccctaatcaactggcttcaatctacttctcccgccgccgggaaaaaaggcgggagaagccccggcaggtttgaagctgcttcttcgaatttgcaattcaatatgaaaatcacctcggagctggtaaaaagaggcctaacccctgtctttagatttacagtccaatgcttcactcagccattttacctcacccccactgatgttcgccgaccgttgactattctctacaaaccacaaagacattggaacactatacctattattcggcgcatgagctggagtcctaggcacagctctaagcctccttattcgagccgagctgggccagccaggcaaccttctaggtaacgaccacatctacaacgttatcgtcacagcccatgcatttgtaataatcttcttcatagtaatacccatcataatcggaggctttggcaactgactagttcccctaataatcggtgcccccgatatggcgtttccccgcataaacaacataagcttctgactcttacctccctctctcctactcctgctcgcatctgctatagtggaggccggagcaggaacaggttgaacagtctaccctcccttagcagggaactactcccaccctggagcctccgtagacctaaccatcttctccttacacctagcaggtgtctcctctatcttaggggccatcaatttcatcacaacaattatcaatataaaaccccctgccataacccaataccaaacgcccctcttcgtctgatccgtcctaatcacagcagtcctacttctcctatctctcccagtcctagctgctggcatcactatactactaacagaccgcaacctcaacaccaccttcttcgaccccgccggaggaggagaccccattctataccaacacctattctgatttttcggtcaccctgaagtttatattcttatcctaccaggcttcggaataatctcccatattgtaacttactactccggaaaaaaagaaccatttggatacataggtatggtctgagctatgatatcaattggcttcctagggtttatcgtgtgagcacaccatatatttacagtaggaatagacgtagacacacgagcatatttcacctccgctaccataatcatcgctatccccaccggcgtcaaagtatttagctgactcgccacactccacggaagcaatatgaaatgatctgctgcagtgctctgagccctaggattcatctttcttttcaccgtaggtggcctgactggcattgtattagcaaactcatcactagacatcgtactacacgacacgtactacgttgtagctcacttccactatgtcctatcaataggagctgtatttgccatcataggaggcttcattcactgatttcccctattctcaggctacaccctagaccaaacctacgccaaaatccatttcactatcatattcatcggcgtaaatctaactttcttcccacaacactttctcggcctatccggaatgccccgacgttactcggactaccccgatgcatacaccacatgaaacatcctatcatctgtaggctcattcatttctctaacagcagtaatattaataattttcatgatttgagaagccttcgcttcgaagcgaaaagtcctaatagtagaagaaccctccataaacctggagtgactatatggatgccccccaccctaccacacattcgaagaacccgtatacataaaatctagacaaaaaaggaaggaatcgaaccccccaaagctggtttcaagccaaccccatggcctccatgactttttcaaaaaggtattagaaaaaccatttcataactttgtcaaagttaaattataggctaaatcctatatatcttaatggcacatgcagcgcaagtaggtctacaagacgctacttcccctatcatagaagagcttatcacctttcatgatcacgccctcataatcattttccttatctgcttcctagtcctgtatgcccttttcctaacactcacaacaaaactaactaatactaacatctcagacgctcaggaaatagaaaccgtctgaactatcctgcccgccatcatcctagtcctcatcgccctcccatccctacgcatcctttacataacagacgaggtcaacgatccctcccttaccatcaaatcaattggccaccaatggtactgaacctacgagtacaccgactacggcggactaatcttcaactcctacatacttcccccattattcctagaaccaggcgacctgcgactccttgacgttgacaatcgagtagtactcccgattgaagcccccattcgtataataattacatcacaagacgtcttgcactcatgagctgtccccacattaggcttaaaaacagatgcaattcccggacgtctaaaccaaaccactttcaccgctacacgaccgggggtatactacggtcaatgctctgaaatctgtggagcaaaccacagtttcatgcccatcgtcctagaattaattcccctaaaaatctttgaaatagggcccgtatttaccctatagcaccccctctaccccctctagagcccactgtaaagctaacttagcattaaccttttaagttaaagattaagagaaccaacacctctttacagtgaaatgccccaactaaatactaccgtatggcccaccataattacccccatactccttacactattcctcatcacccaactaaaaatattaaacacaaactaccacctacctccctcaccaaagcccataaaaataaaaaattataacaaaccctgagaaccaaaatgaacgaaaatctgttcgcttcattcattgcccccacaatcctaggcctacccgccgcagtactgatcattctatttccccctctattgatccccacctccaaatatctcatcaacaaccgactaatcaccacccaacaatgactaatcaaactaacctcaaaacaaatgataaccatacacaacactaaaggacgaacctgatctcttatactagtatccttaatcatttttattgccacaactaacctcctcggactcctgcctcactcatttacaccaaccacccaactatctataaacctagccatggccatccccttatgagcgggcgcagtgattataggctttcgctctaagattaaaaatgccctagcccacttcttaccacaaggcacacctacaccccttatccccatactagttattatcgaaaccatcagcctactcattcaaccaatagccctggccgtacgcctaaccgctaacattactgcaggccacctactcatgcacctaattggaagcgccaccctagcaatatcaaccattaaccttccctctacacttatcatcttcacaattctaattctactgactatcctagaaatcgctgtcgccttaatccaagcctacgttttcacacttctagtaagcctctacctgcacgacaacacataatgacccaccaatcacatgcctatcatatagtaaaacccagcccatgacccctaacaggggccctctcagccctcctaatgacctccggcctagccatgtgatttcacttccactccataacgctcctcatactaggcctactaaccaacacactaaccatataccaatgatggcgcgatgtaacacgagaaagcacataccaaggccaccacacaccacctgtccaaaaaggccttcgatacgggataatcctatttattacctcagaaatttttttcttcgcaggatttttctgagccttttaccactccagcctagcccctaccccccaattaggagggcactggcccccaacaggcatcaccccgctaaatcccctagaagtcccactcctaaacacatccgtattactcgcatcaggagtatcaatcacctgagctcaccatagtctaatagaaaacaaccgaaaccaaataattcaagcactgcttattacaattttactgggtctctattttaccctcctacaagcctcagagtacttcgagtctcccttcaccatttccgacggcatctacggctcaacattttttgtagccacaggcttccacggacttcacgtcattattggctcaactttcctcactatctgcttcatccgccaactaatatttcactttacatccaaacatcactttggcttcgaagccgccgcctgatactggcattttgtagatgtggtttgactatttctgtatgtctccatctattgatgagggtcttactcttttagtataaatagtaccgttaacttccaattaactagttttgacaacattcaaaaaagagtaataaacttcgccttaattttaataatcaacaccctcctagccttactactaataattattacattttgactaccacaactcaacggctacatagaaaaatccaccccttacgagtgcggcttcgaccctatatcccccgcccgcgtccctttctccataaaattcttcttagtagctattaccttcttattatttgatctagaaattgccctccttttacccctaccatgagccctacaaacaactaacctgccactaatagttatgtcatccctcttattaatcatcatcctagccctaagtctggcctatgagtgactacaaaaaggattagactgaaccgaattggtatatagtttaaacaaaacgaatgatttcgactcattaaattatgataatcatatttaccaaatgcccctcatttacataaatattatactagcatttaccatctcacttctaggaatactagtatatcgctcacacctcatatcctccctactatgcctagaaggaataatactatcgctgttcattatagctactctcataaccctcaacacccactccctcttagccaatattgtgcctattgccatactagtctttgccgcctgcgaagcagcggtgggcctagccctactagtctcaatctccaacacatatggcctagactacgtacataacctaaacctactccaatgctaaaactaatcgtcccaacaattatattactaccactgacatgactttccaaaaaacacataatttgaatcaacacaaccacccacagcctaattattagcatcatccctctactattttttaaccaaatcaacaacaacctatttagctgttccccaaccttttcctccgaccccctaacaacccccctcctaatactaactacctgactcctacccctcacaatcatggcaagccaacgccacttatccagtgaaccactatcacgaaaaaaactctacctctctatactaatctccctacaaatctccttaattataacattcacagccacagaactaatcatattttatatcttcttcgaaaccacacttatccccaccttggctatcatcacccgatgaggcaaccagccagaacgcctgaacgcaggcacatacttcctattctacaccctagtaggctcccttcccctactcatcgcactaatttacactcacaacaccctaggctcactaaacattctactactcactctcactgcccaagaactatcaaactcctgagccaacaacttaatatgactagcttacacaatagcttttatagtaaagatacctctttacggactccacttatgactccctaaagcccatgtcgaagcccccatcgctgggtcaatagtacttgccgcagtactcttgaaactaggcggctatggtataatacgcctcacactcattctcaaccccctgacaaaacacatagcctaccccttccttgtactatccctatgaggcataattataacaagctccatctgcctacgacaaacagacctaaaatcgctcattgcatactcttcaatcagccacatagccctcgtagtaacagccattctcatccaaaccccctgaagcttcaccggcgcagtcattctcataatcgcccacggacttacatcctcattactattctgcctagcaaactcaaactacgaacgcactcacagtcgcatcataatcctctctcaaggacttcaaactctactcccactaatagctttttgatgacttctagcaagcctcgctaacctcgccttaccccccactattaacctactgggagaactctctgtgctagtaaccacgttctcctgatcaaatatcactctcctacttacaggactcaacatactagtcacagccctatactccctctacatatttaccacaacacaatggggctcactcacccaccacattaacaacataaaaccctcattcacacgagaaaacaccctcatgttcatacacctatcccccattctcctcctatccctcaaccccgacatcattaccgggttttcctcttgtaaatatagtttaaccaaaacatcagattgtgaatctgacaacagaggcttacgaccccttatttaccgagaaagctcacaagaactgctaactcatgcccccatgtctaacaacatggctttctcaacttttaaaggataacagctatccattggtcttaggccccaagaattttggtgcaactccaaataaaagtaataaccatgcacactactataaccaccctaaccctaacttccctaattccccccatccttaccaccctcgttaaccctaacaaaaaaaactcatacccccattatgtaaaatccattgtcgcatccacctttattatcagtctcttccccacaacaatattcatgtgcctagaccaagaagttattatctcgaactgacactgagccacaacccaaacaacccagctctccctaagcttcaaactagactacttctccataatattcatccctgtagcattgttcgttacatggtccatcatagaattctcactgtgatatataaactcagacccaaacattaatcagttcttcaaatatctactcatcttcctaattaccatactaatcttagttaccgctaacaacctattccaactgttcatcggctgagagggcgtaggaattatatccttcttgctcatcagttgatgatacgcccgagcagatgccaacacagcagccattcaagcaatcctatacaaccgtatcggcgatatcggtttcatcctcgccttagcatgatttatcctacactccaactcatgagacccacaacaaatagcccttctaaacgctaatccaagcctcaccccactactaggcctcctcctagcagcagcaggcaaatcagcccaattaggtctccacccctgactcccctcagccatagaaggccccaccccagtctcagccctactccactcaagcactatagttgtagcaggaatcttcttactcatccgcttccaccccctagcagaaaatagcccactaatccaaactctaacactatgcttaggcgctatcaccactctgttcgcagcagtctgcgcccttacacaaaatgacatcaaaaaaatcgtagccttctccacttcaagtcaactaggactcataatagttacaatcggcatcaaccaaccacacctagcattcctgcacatctgtacccacgccttcttcaaagccatactgtttatgtgctccgggtccatcatccacaaccttaacaatgaacaagatattcgaaaaataggaggactactcaaaaccatacctctcacttcaacctccctcaccattggcagcctagcattagcaggaatacctttcctcacaggtttctactccaaagaccacatcatcgaaaccgcaaacatatcatacacaaacgcctgagccctatctattactctcatcgctacctccctgacaagcgcctatagcactcgaataatccttctcaccctaacaggtcaacctcgcttccccacccttactaacattaacgaaaataaccccaccctactaaaccccattaaacgcctggcagccggaagcctattcgcaggatttctcattactaacaacatttcccccgcatcccccttccaaacaacaatccccctctacctaaaactcacagccctcgctgtcactttcctaggacttctaacagccctagacctcaactacctaaccaacaaacttaaaataaaatccccactatgcacattttatttctccaacatactcggattctaccctagcatcacacaccgcacaatcccctatctaggccttcttacgagccaaaacctgcccctactcctcctagacctaacctgactagaaaagctattacctaaaacaatttcacagcaccaaatctccacctccatcatcacctcaacccaaaaaggcataattaaactttacttcctctctttcttcttcccactcatcctaaccctactcctaatcacataacctattcccccgagcaatctcaattacaatatatacaccaacaaacaatgttcaaccagtaactactactaatcaacgcccataatcatacaaagcccccgcaccaataggatcctcccgaatcaaccctgacccctctccttcataaattattcagcttcctacactattaaagtttaccacaaccaccaccccatcatactctttcacccacagcaccaatcctacctccatcgctaaccccactaaaacactcaccaagacctcaacccctgacccccatgcctcaggatactcctcaatagccatcgctgtagtatatccaaagacaaccatcattccccctaaataaattaaaaaaactattaaacccatataacctcccccaaaattcagaataataacacacccgaccacaccgctaacaatcaatactaaacccccataaataggagaaggcttagaagaaaaccccacaaaccccattactaaacccacactcaacagaaacaaagcatacatcattattctcgcacggactacaaccacgaccaatgatatgaaaaaccatcgttgtatttcaactacaagaacaccaatgaccccaatacgcaaaattaaccccctaataaaattaattaaccgctcattcatcgacctccccaccccatccaacatctccgcatgatgaaacttcggctcactccttggcgcctgcctgatcctccaaatcaccacaggactattcctagccatgcactactcaccagacgcctcaaccgccttttcatcaatcgcccacatcactcgagacgtaaattatggctgaatcatccgctaccttcacgccaatggcgcctcaatattctttatctgcctcttcctacacatcgggcgaggcctatattacggatcatttctctactcagaaacctgaaacatcggcattatcctcctgcttgcaactatagcaacagccttcataggctatgtcctcccgtgaggccaaatatcattctgaggggccacagtaattacaaacttactatccgccatcccatacattggggcagacctagttcaatgaatctgaggaggctactcagtagacagtcccaccctcacacgattctttacctttcacttcatcttgcccttcattattgcagccctagcagcactccacctcctattcttgcacgaaacgggatcaaacaaccccctaggaatcacctcccattccgataaaatcaccttccacccttactacacaatcaaagacgccctcggcttacttctcttccttctctccttaatgacattaacactattctcaccagacctcctaggcgacccagacaattataccctagccaaccccttaaacacccctccccacatcaagcccgaatgatatttcctattcgcctacacaattctccgatccgtccctaacaaactaggaggcgtccttgccctattactatccatcctcatcctagcaataatccccatcctccatatatccaaacaacaaagcataatatttcgcccactaagccaatcactttattgactcctagccgcagacctcctcattctaacctgaatcggaggacaaccagtaagctacccttttaccatcattggacaagtagcatccgtactatacttcacaacaatcctaatcctaataccaactatctccctaattgaaaacaaaatactcaaatgggcctgtccttgtagtataaactaatacaccagtcttgtaagccggagatgaaaacctttttccaaggacaaatcagagaaaaagtctttaactccaccattagcacccaaagctaagattctaatttaaactattctctgttctttcatggggaagcagatttgggtaccacccaagtattgactcacccatcaacaaccgctatgtatttcgtacattactgccagccaccatgaatattgtacggtaccataaatacttgaccacctgtagtacataaaaacccaatccacatcaaaaccccctccccatgcttacaagcaagtacagcaatcaaccctcaactatcacacatcaactgcaactccaaagccacccctcacccactaggataccaacaaacctacccacccttaacagtacatagtacataaagccatttaccgtacatagcacattacagtcaaatcccttctcgtccccatggatgacccccctcagataggggtcccttgaccaccatcctccgtgaaatcaatatcccgcacaagagtgctactctcctcgctccgggcccataacacttgggggtagctaaagtgaactgtatccgacatctggttcctacttcagggtcataaagcctaaatagcccacacgttccccttaaataagacatcacgatg

SEQ ID NO: 485 - DNA, 16569 bp, Homo sapiens mitochondrial
  3107: "n" refers to a nucleotide at position 3107 of the Cambridge Reference Sequence (CRS, Anderson et al. 1981 Nature 290:457-465), later determined to be absent from the human mtDNA sequence according to the revised CRS (rCRS, Andrews et al. 1999 Nature Genetics 23:147); "n" therefore represents a single nucleotide deletion at a position corresponding to nucleotide 3107 of SEQ ID NO:1 as provided herein.
gatcacaggtctatcaccctattaaccactcacgggagctctccatgcatttggtattttcgtctggggggtatgcacgcgatagcattgcgagacgctggagccggagcaccctatgtcgcagtatctgtctttgattcctgcctcatcctattatttatcgcacctacgttcaatattacaggcgaacatacttactaaagtgtgttaattaattaatgcttgtaggacataataataacaattgaatgtctgcacagccactttccacacagacatcataacaaaaaatttccaccaaaccccccctcccccgcttctggccacagcacttaaacacatctctgccaaaccccaaaaacaaagaaccctaacaccagcctaaccagatttcaaattttatcttttggcggtatgcacttttaacagtcaccccccaactaacacattattttcccctcccactcccatactactaatctcatcaatacaacccccgcccatcctacccagcacacacacaccgctgctaaccccataccccgaaccaaccaaaccccaaagacaccccccacagtttatgtagcttacctcctcaaagcaatacactgaaaatgtttagacgggctcacatcaccccataaacaaataggtttggtcctagcctttctattagctcttagtaagattacacatgcaagcatccccattccagtgagttcaccctctaaatcaccacgatcaaaagggacaagcatcaagcacgcagcaatgcagctcaaaacgcttagcctagccacacccccacgggaaacagcagtgattaacctttagcaataaacgaaagtttaactaagctatactaaccccagggttggtcaatttcgtgccagccaccgcggtcacacgattaacccaagtcaatagaaaccggcgtaaagagtgttttagatcaccccctccccaataaagctaaaactcacctgagttgtaaaaaactccagttgacacaaaatagactacgaaagtggctttaacatatctgaacacacaatagctaagacccaaactgggattagataccccactatgcttagccctaaacctcaacagttaaatcaacaaaactgctcgccagaacactacgagccacagcttaaaactcaaaggacctggcggtgcttcatatccctctagaggagcctgttctgtaatcgataaaccccgatcaacctcaccacctcttgctcagcctatataccgccatcttcagcaaaccctgatgaaggctacaaagtaagcgcaagtacccacgtaaagacgttaggtcaaggtgtagcccatgaggtggcaagaaatgggctacattttctaccccagaaaactacgatagcccttatgaaacttaagggtcgaaggtggatttagcagtaaactgagagtagagtgcttagttgaacagggccctgaagcgcgtacacaccgcccgtcaccctcctcaagtatacttcaaaggacatttaactaaaacccctacgcatttatatagaggagacaagtcgtaacatggtaagtgtactggaaagtgcacttggacgaaccagagtgtagcttaacacaaagcacccaacttacacttaggagatttcaacttaacttgaccgctctgagctaaacctagccccaaacccactccaccttactaccagacaaccttagccaaaccatttacccaaataaagtataggcgatagaaattgaaacctggcgcaatagatatagtaccgcaagggaaagatgaaaaattataaccaagcataatatagcaaggactaacccctataccttctgcataatgaattaactagaaataactttgcaaggagaaccaaagctaagacccccgaaaccagacgagctacctaagaacagctaaaagagcacacccgtctatgtagcaaaatagtgggaagatttataggtagaggcgacaaacctaccgagcctggtgatagctggttgtccaagatagaatcttagttcaactttaaatttgcccacagaaccctctaaatccccttgtaaatttaactgttagtccaaagaggaacagctctttggacactaggaaaaaaccttgtagagagagtaaaaaatttaacacccatagtaggcctaaaagcagccaccaattaagaaagcgttcaagctcaacacccactacctaaaaaatcccaaacatataactgaactcctcacacccaattggaccaatctatcaccctatagaagaactaatgttagtataagtaacatgaaaacattctcctccgcataagcctgcgtcagattaaaacactgaactgacaattaacagcccaatatctacaatcaaccaacaagtcattattaccctcactgtcaacccaacacaggcatgctcataaggaaaggttaaaaaaagtaaaaggaactcggcaaatcttaccccgcctgtttaccaaaaacatcacctctagcatcaccagtattagaggcaccgcctgcccagtgacacatgtttaacggccgcggtaccctaaccgtgcaaaggtagcataatcacttgttccttaaatagggacctgtatgaatggctccacgagggttcagctgtctcttacttttaaccagtgaaattgacctgcccgtgaagaggcgggcatgacacagcaagacgagaagaccctatggagctttaatttattaatgcaaacagtacctaacaaacccacaggtcctaaactaccaaacctgcattaaaaatttcggttggggcgacctcggagcagaacccaacctccgagcagtacatgctaagacttcaccagtcaaagcgaactactatactcaattgatccaataacttgaccaacggaacaagttaccctagggataacagcgcaatcctattctagagtccatatcaacaatagggtttacgacctcgatgttggatcaggacatcccgatggtgcagccgctattaaaggttcgtttgttcaacgattaaagtcctacgtgatctgagttcagaccggagtaatccaggtcggtttctatctacnttcaaattcctccctgtacgaaaggacaagagaaataaggcctacttcacaaagcgccttcccccgtaaatgatatcatctcaacttagtattatacccacacccacccaagaacagggtttgttaagatggcagagcccggtaatcgcataaaacttaaaactttacagtcagaggttcaattcctcttcttaacaacatacccatggccaacctcctactcctcattgtacccattctaatcgcaatggcattcctaatgcttaccgaacgaaaaattctaggctatatacaactacgcaaaggccccaacgttgtaggcccctacgggctactacaacccttcgctgacgccataaaactcttcaccaaagagcccctaaaacccgccacgtctaccatcaccctctacatcaccgccccgaccttagctctcaccatcgctcttctactatgaacccccctccccatacccaaccccctggtcaacctcaacctaggcctcctatttattctagccacctctagcctagccgtttactcaatcctctgatcagggtgagcatcaaactcaaactacgccctgatcggcgcactgcgagcagtagcccaaacaatctcatatgaagtcaccctagccatcattctactatcaacattactaataagtggctcctttaacctctccacccttatcacaacacaagaacacctctgattactcctgccatcatgacccttggccataatatgatttatctccacactagcagagaccaaccgaacccccttcgaccttgccgaaggggagtccgaactagtctcaggcttcaacatcgaatacgccgcaggccccttcgccctattcttcatagccgaatacacaaacattattataataaacaccctcaccactacaatcttcctaggaacaacatatgacgcactctcccctgaactctacacaacatattttgtcaccaagaccctacttctaacctccctgttcttatgaattcgaacagcatacccccgattccgctacgaccaactcatacacctcctatgaaaaaacttcctaccactcaccctagcattacttatatgacatgtctccatacccattacaatctccagcattccccctcaaacctaagaaatatgtctgataaaagagttactttgatagagtaaataataggagcttaaacccccttatttctaggactatgagaatcgaacccatccctgagaatccaaaattctccgtgccacctatcacaccccatcctaaagtaaggtcagctaaataagctatcgggcccataccccgaaaatgttggttatacccttcccgtactaattaatcccctggcccaacccgtcatctactctaccatctttgcaggcacactcatcacagcgctaagctcgcactgattttttacctgagtaggcctagaaataaacatgctagcttttattccagttctaaccaaaaaaataaaccctcgttccacagaagctgccatcaagtatttcctcacgcaagcaaccgcatccataatccttctaatagctatcctcttcaacaatatactctccggacaatgaaccataaccaatactaccaatcaatactcatcattaataatcataatggctatagcaataaaactaggaatagccccctttcacttctgagtcccagaggttacccaaggcacccctctgacatccggcctgcttcttctcacatgacaaaaactagcccccatctcaatcatataccaaatctctccctcactagacgtaagccttctcctcactctctcaatcttatccatcatagcaggcagttgaggtggattaaaccaaacccagctacgcaaaatcttagcatactcctcaattacccacataggatgaataatagcagttctaccgtacaaccctaacataaccattcttaatttaactatttatattatcctaactactaccgcattcctactactcaacttaaactccagcaccacaaccctactactatctcgcacctgaaacaagctaacatgactaacacccttaattccatccaccctcctctccctaggaggcctgcccccgctaaccggctttttgcccaaatgggccattatcgaagaattcacaaaaaacaatagcctcatcatccccaccatcatagccaccatcaccctccttaacctctacttctacctacgcctaatctactccacctcaatcacactactccccatatctaacaacgtaaaaataaaatgacagtttgaacatacaaaacccaccccattcctccccacactcatcgcccttaccacgctactcctacctatctccccttttatactaataatcttatagaaatttaggttaaatacagaccaagagccttcaaagccctcagtaagttgcaatacttaatttctgtaacagctaaggactgcaaaaccccactctgcatcaactgaacgcaaatcagccactttaattaagctaagcccttactagaccaatgggacttaaacccacaaacacttagttaacagctaagcaccctaatcaactggcttcaatctacttctcccgccgccgggaaaaaaggcgggagaagccccggcaggtttgaagctgcttcttcgaatttgcaattcaatatgaaaatcacctcggagctggtaaaaagaggcctaacccctgtctttagatttacagtccaatgcttcactcagccattttacctcacccccactgatgttcgccgaccgttgactattctctacaaaccacaaagacattggaacactatacctattattcggcgcatgagctggagtcctaggcacagctctaagcctccttattcgagccgagctgggccagccaggcaaccttctaggtaacgaccacatctacaacgttatcgtcacagcccatgcatttgtaataatcttcttcatagtaatacccatcataatcggaggctttggcaactgactagttcccctaataatcggtgcccccgatatggcgtttccccgcataaacaacataagcttctgactcttacctccctctctcctactcctgctcgcatctgctatagtggaggccggagcaggaacaggttgaacagtctaccctcccttagcagggaactactcccaccctggagcctccgtagacctaaccatcttctccttacacctagcaggtgtctcctctatcttaggggccatcaatttcatcacaacaattatcaatataaaaccccctgccataacccaataccaaacgcccctcttcgtctgatccgtcctaatcacagcagtcctacttctcctatctctcccagtcctagctgctggcatcactatactactaacagaccgcaacctcaacaccaccttcttcgaccccgccggaggaggagaccccattctataccaacacctattctgatttttcggtcaccctgaagtttatattcttatcctaccaggcttcggaataatctcccatattgtaacttactactccggaaaaaaagaaccatttggatacataggtatggtctgagctatgatatcaattggcttcctagggtttatcgtgtgagcacaccatatatttacagtaggaatagacgtagacacacgagcatatttcacctccgctaccataatcatcgctatccccaccggcgtcaaagtatttagctgactcgccacactccacggaagcaatatgaaatgatctgctgcagtgctctgagccctaggattcatctttcttttcaccgtaggtggcctgactggcattgtattagcaaactcatcactagacatcgtactacacgacacgtactacgttgtagctcacttccactatgtcctatcaataggagctgtatttgccatcataggaggcttcattcactgatttcccctattctcaggctacaccctagaccaaacctacgccaaaatccatttcactatcatattcatcggcgtaaatctaactttcttcccacaacactttctcggcctatccggaatgccccgacgttactcggactaccccgatgcatacaccacatgaaacatcctatcatctgtaggctcattcatttctctaacagcagtaatattaataattttcatgatttgagaagccttcgcttcgaagcgaaaagtcctaatagtagaagaaccctccataaacctggagtgactatatggatgccccccaccctaccacacattcgaagaacccgtatacataaaatctagacaaaaaaggaaggaatcgaaccccccaaagctggtttcaagccaaccccatggcctccatgactttttcaaaaaggtattagaaaaaccatttcataactttgtcaaagttaaattataggctaaatcctatatatcttaatggcacatgcagcgcaagtaggtctacaagacgctacttcccctatcatagaagagcttatcacctttcatgatcacgccctcataatcattttccttatctgcttcctagtcctgtatgcccttttcctaacactcacaacaaaactaactaatactaacatctcagacgctcaggaaatagaaaccgtctgaactatcctgcccgccatcatcctagtcctcatcgccctcccatccctacgcatcctttacataacagacgaggtcaacgatccctcccttaccatcaaatcaattggccaccaatggtactgaacctacgagtacaccgactacggcggactaatcttcaactcctacatacttcccccattattcctagaaccaggcgacctgcgactccttgacgttgacaatcgagtagtactcccgattgaagcccccattcgtataataattacatcacaagacgtcttgcactcatgagctgtccccacattaggcttaaaaacagatgcaattcccggacgtctaaaccaaaccactttcaccgctacacgaccgggggtgtactacggtcaatgctctgaaatctgtggagcaaaccacagtttcatgcccatcgtcctagaattaattcccctaaaaatctttgaaatagggcccgtatttaccctatagcaccccctctaccccctctagagcccactgtaaagctaacttagcattaaccttttaagttaaagattaagagaaccaacacctctttacagtgaaatgccccaactaaatactaccgtatggcccaccataattacccccatactccttacactattcctcatcacccaactaaaaatattaaacacaaactaccacctacctccctcaccaaagcccataaaaataaaaaattataacaaaccctgagaaccaaaatgaacgaaaatctgttcgcttcattcattgcccccacaatcctaggcctacccgccgcagtactgatcattctatttccccctctattgatccccacctccaaatatctcatcaacaaccgactaatcaccacccaacaatgactaatcaaactaacctcaaaacaaataataaccatacacaacactaaaggacgaacctgatctcttatactagtatccttaatcatttttattgccacaactaacctcctcggactcctgcctcactcatttacaccaaccacccaactatctataaacctagccatggccatccccttatgagcgggcgcagtgattataggctttcgctctaagattaaaaatgccctagcccacttcttaccacaaggcacacctacaccccttatccccatactagttattatcgaaaccatcagcctactcattcaaccaatagccctggccgtacgcctaaccgctaacattactgcaggccacctactcatgcacctaattggaagcgccaccctagcaatatcaaccattaaccttccctctacacttatcatcttcacaattctaattctactgactatcctagaaatcgctgtcgccttaatccaagcctacgttttcacacttctagtaagcctctacctgcacgacaacacataatgacccaccaatcacatgcctatcatatagtaaaacccagcccatgacccctaacaggggccctctcagccctcctaatgacctccggcctagccatgtgatttcacttccactccataacgctcctcatactaggcctactaaccaacacactaaccatataccaatgatggcgcgatgtaacacgagaaagcacataccaaggccaccacacaccacctgtccaaaaaggccttcgatacgggataatcctatttattacctcagaagtttttttcttcgcaggatttttctgagccttttaccactccagcctagcccctaccccccaattaggagggcactggcccccaacaggcatcaccccgctaaatcccctagaagtcccactcctaaacacatccgtattactcgcatcaggagtatcaatcacctgagctcaccatagtctaatagaaaacaaccgaaaccaaataattcaagcactgcttattacaattttactgggtctctattttaccctcctacaagcctcagagtacttcgagtctcccttcaccatttccgacggcatctacggctcaacattttttgtagccacaggcttccacggacttcacgtcattattggctcaactttcctcactatctgcttcatccgccaactaatatttcactttacatccaaacatcactttggcttcgaagccgccgcctgatactggcattttgtagatgtagtttgactatttctgtatgtctccatctattgatgagggtcttactcttttagtataaatagtaccgttaacttccaattaactagttttgacaacattcaaaaaagagtaataaacttcgccttaattttaataatcaacaccctcctagccttactactaataattattacattttgactaccacaactcaacggctacatagaaaaatccaccccttacgagtgcggcttcgaccctatatcccccgcccgcgtccctttctccataaaattcttcttagtagctattaccttcttattatttgatctagaaattgccctccttttacccctaccatgagccctacaaacaactaacctgccactaatagttatgtcatccctcttattaatcatcatcctagccctaagtctggcctatgagtgactacaaaaaggattagactgaaccgaattggtatatagtttaaacaaaacgaatgatttcgactcattaaattatgataatcatatctaccaaatgcccctcatttacataaatattatactagcatttaccatctcacttctaggaatactagtatatcgctcacacctcatatcctccctactatgcctagaaggaataatactatcgctgttcattatagctactctcataaccctcaacacccactccctcttagccaatattgtgcctattgccatactagtctttgccgcctgcgaagcagcggtgggcctagccctactagtctcaatctccaacacatatggcctagactacgtacataacctaaacctactccaatgctaaaactaatcgtcccaacaattatattactaccactgacatgactttccaaaaaacacataatttgaatcaacacaaccacccacagcctaattattagcatcatccctctactattttttaaccaaatcaacaacaacctatttagctgttccccaaccttttcctccgaccccctaacaacccccctcctaatactaactacctgactcctacccctcacaatcatggcaagccaacgccacttatccagtgaaccactatcacgaaaaaaactctacctctctatactaatctccctacaaatctccttaattataacattcacagccacagaactaatcatattttatatcttcttcgaaaccacacttatccccaccttggctatcatcacccgatgaggcaaccagccagaacgcctgaacgcaggcacatacttcctattctacaccctagtaggctcccttcccctactcatcgcactgatttacactcacaacaccctaggctcactaaacattctactactcactctcactgcccaagaactatcaaactcctgagccaacaacttaatatgactagcttacacaatagcttttatagtaaagatacctctttacggactccacttatgactccctaaagcccatgtcgaagcccccatcgctgggtcaatagtacttgccgcagtactcttaaaactaggcggctatggtataatacgcctcacactcattctcaaccccctgacaaaacacatagcctaccccttccttgtactatccctatgaggcataattataacaagctccatctgcctacgacaaacagacctaaaatcgctcattgcatactcttcaatcagccacatagccctcgtagtaacagccattctcatccaaaccccctgaagcttcaccggcgcagtcattctcataatcgcccacggacttacatcctcattactattctgcctagcaaactcaaactacgaacgcactcacagtcgcatcataatcctctctcaaggacttcaaactctgctcccactaatagctttttgatgacttctagcaagcctcgctaacctcgccttaccccccactattaacctactgggagaactctctgtgctagtaaccacgttctcctgatcaaatatcactctcctacttacaggactcaacatactagtcacagccctatactccctctacatatttaccacaacacaatggggctcactcacccaccacattaacaacataaaaccctcattcacacgagaaaacaccctcatgttcatacacctatcccccattctcctcctatccctcaaccccgacatcattaccgggttttcctcttgtaaatatagtttaaccaaaacatcagattgtgaatctgacaacagaggcttacgaccccttatttaccgagaaagctcacaagaactgctaactcatgcccccatgtctaacaacatggctttctcaacttttaaaggataacagctatccattggtcttaggccccaaaaattttggtgcaactccaaataaaagtaataaccatgcacactactatagccaccctaaccctgacttccctaattccccccatccttaccaccctcgttaaccctaacaaaaaaaactcatacccccattacgtaaaatccattgtcgcatccacctttattatcagtctcttccccacaacaatattcatgtgcctagaccaagaagttattatctcgaactgacactgagccacaacccaaacaacccagctctccctaagcttcaaactagactacttctccataatattcatccctgtagcattgttcgttacatggtccatcatagaattctcactgtgatatataaactcagacccaaacattaatcagttcttcaaatatctactcatcttcctaattaccatactaatcttagttaccgctaacaacctattccaactgttcatcggctgagagggcgtaggaattatatccttcttgctcatcagttgatgatacgcccgagcagatgccaacacagcagccattcaagcaatcctatacaaccgtatcggcgatatcggtttcatcctcgccttagcatgatttatcctacactccaactcatgagacccacaacaaatagcccttctaaacgctaatccaagcctcaccccactactaggcctcctcctagcagcagcaggcaaatcagcccaattaggtctccacccctgactcccctcagccatagaaggccccaccccagtctcagccctactccactcaagcactatagttgtagcaggaatcttcttactcatccgcttccaccccctagcagaaaatagcccactaatccaaactctaacactatgcttaggcgctatcaccactctgttcgcagcagtctgcgcccttacacaaaatgacatcaaaaaaatcgtagccttctccacttcaagtcaactaggactcataatagttacaatcggcatcaaccaaccacacctagcattcctgcacatctgtacccacgccttcttcaaagccatactatttatgtgctccggatccatcatccacaaccttaacaatgaacaagatattcgaaaaataggaggactactcaaaaccatacctctcacttcaacctccctcaccattggcagcctagcattagcaggaatacctttcctcacaggtttctactccaaagaccacatcatcgaaaccgcaaacatatcatacacaaacgcctgagccctgtctattactctcatcgctacctccctgacaagcgcctatagcactcgaataattcttctcaccctaacaggtcaacctcgcttccccacccttactaacattaacgaaaataaccccaccctactaaaccccattaaacgcctggcagccggaagcctattcgcaggatttctcattaccaacaacatttcccccgcatcccccttccaaacaacaatccccctctacctaaaactcacagccctcgctgtcactttcctaggacttctaacagccctagacctcaactacctaaccaacaaacttaaaataaaatccccactatgcacattttatttctccaacatactcggattctaccctagcatcacacaccgcacaatcccctatctaggccttcttacgagccaaaacctgcccctactcctcctagacctaacctgactagaaaagctattacctaaaacaatttcacagcaccaaatctccacctccatcatcacctcaacccaaaaaggcataattaaactttacttcctctctttcttcttcccactcatcctaaccctactcctaatcacataacctattcccccgagcaatctcaattacaatatatacaccaacaaacaatgttcaaccagtaactactactaatcaacgcccatagtcatacaaagcccccgcaccaataggatcctcccgaatcaaccctgacccctctccttcataaattattcagcttcctacactattaaagtttaccacaaccaccaccccatcatactctttcacccacagcaccaatcctacctccatcgctaaccccactaaaacactcaccaagacctcaacccctgacccccatgcctcaggatactcctcaatagccatcgctgtagtatatccaaagacaaccatcattccccctaaataaattaaaaaaactattaaacccatataacctcccccaaaattcagaataataacacacccgaccacaccgctaacaatcaatactaaacccccataaataggagaaggcttagaagaaaaccccacaaaccccattactaaacccacactcaacagaaacaaagcatacatcattattctcgcacggactacaaccacgaccaatgatatgaaaaaccatcgttgtatttcaactacaagaacaccaatgaccccaatacgcaaaattaaccccctaataaaattaattaaccactcattcatcgacctccccaccccatccaacatctccgcatgatgaaacttcggctcactccttggcgcctgcctgatcctccaaatcaccacaggactattcctagccatacactactcaccagacgcctcaaccgccttttcatcaatcgcccacatcactcgagacgtaaattatggctgaatcatccgctaccttcacgccaatggcgcctcaatattctttatctgcctcttcctacacatcgggcgaggcctatattacggatcatttctctactcagaaacctgaaacatcggcattatcctcctgcttgcaactatagcaacagccttcataggctatgtcctcccgtgaggccaaatatcattctgaggggccacagtaattacaaacttactatccgccatcccatacattgggacagacctagttcaatgaatctgaggaggctactcagtagacagtcccaccctcacacgattctttacctttcacttcatcttgcccttcattattgcagccctagcagcactccacctcctattcttgcacgaaacgggatcaaacaaccccctaggaatcacctcccattccgataaaatcaccttccacccttactacacaatcaaagacgccctcggcttacttctcttcattctctccttaatgacattaacactattctcaccagacctcctaggcgacccagacaattataccctagccaaccccttaaacacccctccccacatcaagcccgaatgatatttcctattcgcctacacaattctccgatccgtccctaacaagctaggaggcgtccttgccctattactatccatcctcatcctagcaataatccccatcctccatatatccaaacaacaaagcataatatttcgcccactaagccaatcactttattgactcctagccgcagacctcctcattctaacctgaatcggaggacaaccagtaagctacccttttaccatcattggacaagtagcatccgtactatacttcacaacaatcctaatcctaataccaactatctccctaattgaaaacaaaatactcaaatgggcctgtccttgtagtataaactaatacaccagtcttgtaaaccgaagatgaaaacctttttccaaggacaaatcagagaaaaagtctttaactccaccattagcacccaaagctaagattctaatttaaactattctctgttctttcatggggaagcagatttgggtaccacccaagtattgactcacccatcaacaaccgctatgtatttcgtacattactgccagccaccatgaatattgtacggtaccataaatacttgaccacctgtagtacataaaaacccaatccacatcaaaaccccctccccatgcttacaagcaagtacagcaatcaaccctcaactatcacacatcaactgcaactccaaagccacccctcacccactaggataccaacaaacctacccacccttaacagtacatagtacataaagccatttaccgtacatagcacattacagtcaaatcccttctcgtccccatggatgacccccctcagataggggtcccttgaccaccatcctccgtgaaatcaatatcccgcacaagagtgctactctcctcgctccgggcccataacacttgggggtagctaaagtgaactgtatccgacatctggttcctacttcagggtcataaagcctaaatagcccacacgttccccttaaataagacatcacgatg

SEQ ID NO: 486 - DNA, 16569 bp, Homo sapiens mitochondrial
  3107: "n" refers to a nucleotide at position 3107 of the Cambridge Reference Sequence (CRS, Anderson et al. 1981 Nature 290:457-465), later determined to be absent from the human mtDNA sequence according to the revised CRS (rCRS, Andrews et al. 1999 Nature Genetics 23:147); "n" therefore represents a single nucleotide deletion at a position corresponding to nucleotide 3107 of SEQ ID NO:1 as provided herein.
gatcacaggtctatcaccctattaaccactcacgggagctctccatgcatttggtattttcgtctggggggtatgcacgcgatagcattgcgagacgctggagccggagcaccctatgtcgcagtatctgtctttgattcctgcctcatcctattatttatcgcacctacgttcaatattacaggcgaacatacttactaaagtgtgttaattaattaatgcttgtaggacataataataacaattgaatgtctgcacagccactttccacacagacatcataacaaaaaatttccaccaaaccccccctcccccgcttctggccacagcacttaaacacatctctgccaaaccccaaaaacaaagaaccctaacaccagcctaaccagatttcaaattttatcttttggcggtatgcacttttaacagtcaccccccaactaacacattattttcccctcccactcccatactactaatctcatcaatacaacccccgcccatcctacccagcacacacacaccgctgctaaccccataccccgaaccaaccaaaccccaaagacaccccccacagtttatgtagcttacctcctcaaagcaatacactgaaaatgtttagacgggctcacatcaccccataaacaaataggtttggtcctagcctttctattagctcttagtaagattacacatgcaagcatccccattccagtgagttcaccctctaaatcaccacgatcaaaagggacaagcatcaagcacgcagcaatgcagctcaaaacgcttagcctagccacacccccacgggaaacagcagtgattaacctttagcaataaacgaaagtttaactaagctatactaaccccagggttggtcaatttcgtgccagccaccgcggtcacacgattaacccaagtcaatagaaaccggcgtaaagagtgttttagatcaccccctccccaataaagctaaaactcacctgagttgtaaaaaactccagttgacacaaaatagactacgaaagtggctttaacatatctgaacacacaatagctaagacccaaactgggattagataccccactatgcttagccctaaacctcaacagttaaatcaacaaaactgctcgccagaacactacgagccacagcttaaaactcaaaggacctggcggtgcttcatatccctctagaggagcctgttctgtaatcgataaaccccgatcaacctcaccacctcttgctcagcctatataccgccatcttcagcaaaccctgatgaaggctacaaagtaagcgcaagtacccacgtaaagacgttaggtcaaggtgtagcccatgaggtggcaagaaatgggctacattttctaccccagaaaactacgatagcccttatgaaacttaagggtcgaaggtggatttagcagtaaactgagagtagagtgcttagttgaacagggccctgaagcgcgtacacaccgcccgtcaccctcctcaagtatacttcaaaggacatttaactaaaacccctacgcatttatatagaggagacaagtcgtaacatggtaagtgtactggaaagtgcacttggacgaaccagagtgtagcttaacacaaagcacccaacttacacttaggagatttcaacttaacttgaccgctctgagctaaacctagccccaaacccactccaccttactaccagacaaccttagccaaaccatttacccaaataaagtataggcgatagaaattgaaacctggcgcaatagatatagtaccgcaagggaaagatgaaaaattataaccaagcataatatagcaaggactaacccctataccttctgcataatgaattaactagaaataactttgcaaggagaaccaaagctaagacccccgaaaccagacgagctacctaagaacagctaaaagagcacacccgtctatgtagcaaaatagtgggaagatttataggtagaggcgacaaacctaccgagcctggtgatagctggttgtccaagatagaatcttagttcaactttaaatttgcccacagaaccctctaaatccccttgtaaatttaactgttagtccaaagaggaacagctctttggacactaggaaaaaaccttgtagagagagtaaaaaatttaacacccatagtaggcctaaaagcagccaccaattaagaaagcgttcaagctcaacacccactacctaaaaaatcccaaacatataactgaactcctcacacccaattggaccaatctatcaccctatagaagaactaatgttagtataagtaacatgaaaacattctcctccgcataagcctgcgtcagattaaaacactgaactgacaattaacagcccaatatctacaatcaaccaacaagtcattattaccctcactgtcaacccaacacaggcatgctcataaggaaaggttaaaaaaagtaaaaggaactcggcaaatcttaccccgcctgtttaccaaaaacatcacctctagcatcaccagtattagaggcaccgcctgcccagtgacacatgtttaacggccgcggtaccctaaccgtgcaaaggtagcataatcacttgttccttaaatagggacctgtatgaatggctccacgagggttcagctgtctcttacttttaaccagtgaaattgacctgcccgtgaagaggcgggcatgacacagcaagacgagaagaccctatggagctttaatttattaatgcaaacagtacctaacaaacccacaggtcctaaactaccaaacctgcattaaaaatttcggttggggcgacctcggagcagaacccaacctccgagcagtacatgctaagacttcaccagtcaaagcgaactactatactcaattgatccaataacttgaccaacggaacaagttaccctagggataacagcgcaatcctattctagagtccatatcaacaatagggtttacgacctcgatgttggatcaggacatcccgatggtgcagccgctattaaaggttcgtttgttcaacgattaaagtcctacgtgatctgagttcagaccggagtaatccaggtcggtttctatctacnttcaaattcctccctgtacgaaaggacaagagaaataaggcctacttcacaaagcgccttcccccgtaaatgatatcatctcaacttagtattatacccacacccacccaagaacagggtttgttaagatggcagagcccggtaatcgcataaaacttaaaactttacagtcagaggttcaattcctcttcttaacaacatacccatggccaacctcctactcctcattgtacccattctaatcgcaatggcattcctaatgcttaccgaacgaaaaattctaggctatatacaactacgcaaaggccccaacgttgtaggcccctacgggctactacaacccttcgctgacgccataaaactcttcaccaaagagcccctaaaacccgccacatctaccatcaccctctacatcaccgccccgaccttagctctcaccatcgctcttctactatgaacccccctccccatacccaaccccctggtcaacctcaacctaggcctcctatttattctagccacctctagcctagccgtttactcaatcctctgatcagggtgagcatcaaactcaaactacgccctgatcggcgcactgcgagcagtagcccaaacaatctcatatgaagtcaccctagccatcattctactatcaacattactaataagtggctcctttaacctctccacccttatcacaacacaagaacacctctgattactcctgccatcatgacccttggccataatatgatttatctccacactagcagagaccaaccgaacccccttcgaccttgccgaaggggagtccgaactagtctcaggcttcaacatcgaatacgccgcaggccccttcgccctattcttcatagccgaatacacaaacattattataataaacaccctcaccactacaatcttcctaggaacaacatatgacgcactctcccctgaactctacacaacatattttgtcaccaagaccctacttctaacctccctgttcttatgaattcgaacagcatacccccgattccgctacgaccaactcatacacctcctatgaaaaaacttcctaccactcaccctagcattacttatatgacatgtctccatacccattacaatctccagcattccccctcaaacctaagaaatatgtctgataaaagagttactttgatagagtaaataataggagcttaaacccccttatttctaggactatgagaatcgaacccatccctgagaatccaaaattctccgtgccacctatcacaccccatcctaaagtaaggtcagctaaataagctatcgggcccataccccgaaaatgttggttatacccttcccgtactaattaatcccctggcccaacccgtcatctactctaccatctttgcaggcacactcatcacagcgctaagctcgcactgattttttacctgagtaggcctagaaataaacatgctagcttttattccagttctaaccaaaaaaataaaccctcgttccacagaagctgccatcaagtatttcctcacgcaagcaaccgcatccataatccttctaatagctatcctcttcaacaatatactctccggacaatgaaccataaccaatactaccaatcaatactcatcattaataatcataatggctatagcaataaaactaggaatagccccctttcacttctgagtcccagaggttacccaaggcacccctctgacatccggcctgcttcttctcacatgacaaaaactagcccccatctcaatcatataccaaatctctccctcactagacgtaagccttctcctcactctctcaatcttatccatcatagcaggcagttgaggtggattaaaccaaacccagctacgcaaaatcttagcatactcctcaattacccacataggatgaataatagcagttctaccgtacaaccctaacataaccattcttaatttaactatttatattatcctaactactaccgcattcctactactcaacttaaactccagcaccacaaccctactactatctcgcacctgaaacaagctaacatgactaacacccttaattccatccaccctcctctccctaggaggcctgcccccgctaaccggctttttgcccaaatgggccattatcgaagaattcacaaaaaacaatagcctcatcatccccaccatcatagccaccatcaccctccttaacctctacttctacctacgcctaatctactccacctcaatcacactactccccatatctaacaacgtaaaaataaaatgacagtttgaacatacaaaacccaccccattcctccccacactcatcgcccttaccacgctactcctacctatctccccttttatactaataatcttatagaaatttaggttaaatacagaccaagagccttcaaagccctcagtaagttgcaatacttaatttctgtaacagctaaggactgcaaaaccccactctgcatcaactgaacgcaaatcagccactttaattaagctaagcccttactagaccaatgggacttaaacccacaaacacttagttaacagctaagcaccctaatcaactggcttcaatctacttctcccgccgccgggaaaaaaggcgggagaagccccggcaggtttgaagctgcttcttcgaatttgcaattcaatatgaaaatcacctcggagctggtaaaaagaggcctaacccctgtctttagatttacagtccaatgcttcactcagccattttacctcacccccactgatgttcgccgaccgttgactattctctacaaaccacaaagacattggaacactatacctattattcggcgcatgagctggagtcctaggcacagctctaagcctccttattcgagccgagctgggccagccaggcaaccttctaggtaacgaccacatctacaacgttatcgtcacagcccatgcatttgtaataatcttcttcatagtaatacccatcataatcggaggctttggcaactgactagttcccctaataatcggtgcccccgatatggcgtttccccgcataaacaacataagcttctgactcttacctccctctctcctactcctgctcgcatctgctatagtggaggccggagcaggaacaggttgaacagtctaccctcccttagcagggaactactcccaccctggagcctccgtagacctaaccatcttctccttacacctagcaggtgtctcctctatcttaggggccatcaatttcatcacaacaattatcaatataaaaccccctgccataacccaataccaaacgcccctcttcgtctgatccgtcctaatcacagcagtcctacttctcctatctctcccagtcctagctgctggcatcactatactactaacagaccgcaacctcaacaccaccttcttcgaccccgccggaggaggagaccccattctataccaacacctattctgatttttcggtcaccctgaagtttatattcttatcctaccaggcttcggaataatctcccatattgtaacttactactccggaaaaaaagaaccatttggatacataggtatggtctgagctatgatatcaattggcttcctagggtttatcgtgtgagcacaccatatatttacagtaggaatagacgtagacacacgagcatatttcacctccgctaccataatcatcgctatccccaccggcgtcaaagtatttagctgactcgccacactccacggaagcaatatgaaatgatctgctgcagtgctctgagccctaggattcatctttcttttcaccgtaggtggcctgactggcattgtattagcaaactcatcactagacatcgtactacacgacacgtactacgttgtagctcacttccactatgtcctatcaataggagctgtatttgccatcataggaggcttcattcactgatttcccctattctcaggctacaccctagaccaaacctacgccaaaatccatttcactatcatattcatcggcgtaaatctaactttcttcccacaacactttctcggcctatccggaatgccccgacgttactcggactaccccgatgcatacaccacatgaaacatcctatcatctgtaggctcattcatttctctaacagcagtaatattaataattttcatgatttgagaagccttcgcttcgaagcgaaaagtcctaatagtagaagaaccctccataaacctggagtgactatatggatgccccccaccctaccacacattcgaagaacccgtatacataaaatctagacaaaaaaggaaggaatcgaaccccccaaagctggtttcaagccaaccccatggcctccatgactttttcaaaaaggtattagaaaaaccatttcataactttgtcaaagttaaattataggctaaatcctatatatcttaatggcacatgcagcgcaagtaggtctacaagacgctacttcccctatcatagaagagcttatcacctttcatgatcacgccctcataatcattttccttatctgcttcctagtcctgtatgcccttttcctaacactcacaacaaaactaactaatactaacatctcagacgctcaggaaatagaaaccgtctgaactatcctgcccgccatcatcctagtcctcatcgccctcccatccctacgcatcctttacataacagacgaggtcaacgatccctcccttaccatcaaatcaattggccaccaatggtactgaacctacgagtacaccgactacggcggactaatcttcaactcctacatacttcccccattattcctagaaccaggcgacctgcgactccttgacgttgacaatcgagtagtactcccgattgaagcccccattcgtataataattacatcacaagacgtcttgcactcatgagctgtccccacattaggcttaaaaacagatgcaattcccggacgtctaaaccaaaccactttcaccgctacacgaccgggggtatactacggtcaatgctctgaaatctgtggagcaaaccacagtttcatgcccatcgtcctagaattaattcccctaaaaatctttgaaatagggcccgtatttaccctatagcaccccctctaccccctctagagcccactgtaaagctaacttagcattaaccttttaagttaaagattaagagaaccaacacctctttacagtgaaatgccccaactaaatactaccgtatggcccaccataattacccccatactccttacactattcctcatcacccaactaaaaatattaaacacaaactaccacctacctccctcaccaaagcccataaaaataaaaaattataacaaaccctgagaaccaaaatgaacgaaaatctgttcgcttcattcattgcccccacaatcctaggcctacccgccgcagtactgatcattctatttccccctctattgatccccacctccaaatatctcatcaacaaccgactaatcaccacccaacaatgactaatcaaactaacctcaaaacaaataataaccatacacaacactaaaggacgaacctgatctcttatactagtatccttaatcatttttattgccacaactaacctcctcggactcctgcctcactcatttacaccaaccacccaactatctataaacctagccatggccatccccttatgagcgggcgcagtgattataggctttcgctctaagattaaaaatgccctagcccacttcttaccacaaggcacacctacaccccttatccccatactagttattatcgaaaccatcagcctactcattcaaccaatagccctggccgtacgcctaaccgctaacattactgcaggccacctactcatgcacctaattggaagcgccaccctagcaatatcaaccattaaccttccctctacacttatcatcttcacaattctaattctactgactatcctagaaatcgctgtcgccttaatccaagcctacgttttcacacttctagtaagcctctacctgcacgacaacacataatgacccaccaatcacatgcctatcatatagtaaaacccagcccatgacccctaacaggggccctctcagccctcctaatgacctccggcctagccatgtgatttcacttccactccataacgctcctcatactaggcctactaaccaacacactaaccatataccaatgatggcgcgatgtaacacgagaaagcacataccaaggccaccacacaccacctgtccaaaaaggccttcgatacgggataatcctatttattacctcagaagtttttttcttcgcaggatttttctgagccttttaccactccagcctagcccctaccccccaattaggagggcactggcccccaacaggcatcaccccgctaaatcccctagaagtcccactcctaaacacatccgtattactcgcatcaggagtatcaatcacctgagctcaccatagtctaatagaaaacaaccgaaaccaaataattcaagcactgcttattacaattttactgggtctctattttaccctcctacaagcctcagagtacttcgagtctcccttcaccatttccgacggcatctacggctcaacattttttgtagccacaggcttccacggacttcacgtcattattggctcaactttcctcactatctgcttcatccgccaactaatatttcactttacatccaaacatcactttggcttcgaagccgccgcctgatactggcattttgtagatgtggtttgactatttctgtatgtctccatctattgatgagggtcttactcttttagtataaatagtaccgttaacttccaattaactagttttgacaacattcaaaaaagagtaataaacttcgccttaattttaataatcaacaccctcctagccttactactaataattattacattttgactaccacaactcaacggctacatagaaaaatccaccccttacgagtgcggcttcgaccctatatcccccgcccgcgtccctttctccataaaattcttcttagtagctattaccttcttattatttgatctagaaattgccctccttttacccctaccatgagccctacaaacaactaacctgccactaatagttatgtcatccctcttattaatcatcatcctagccctaagtctggcctatgagtgactacaaaaaggattagactgaaccgaattggtatatagtttaaacaaaacgaatgatttcgactcattaaattatgataatcatatctaccaaatgcccctcatttacataaatattatactagcatttaccatctcacttctaggaatactagtatatcgctcacacctcatatcctccctactatgcctagaaggaataatactatcgctgttcattatagctactctcataaccctcaacacccactccctcttagccaatattgtgcctattgccatactagtctttgccgcctgcgaagcagcggtgggcctagccctactagtctcaatctccaacacatatggcctagactacgtacataacctaagcctactccaatgctaaaactaatcgtcccaacaattatattactaccactgacatgactttccaaaaaacacataatttgaatcaacacaaccacccacagcctaattattagcatcatccctctactattttttaaccaaatcaacaacaacctatttagctgttccccaaccttttcctccgaccccctaacaacccccctcctaatactaactacctgactcctacccctcacaatcatggcaagccaacgccacttatccagtgaaccactatcacgaaaaaaactctacctatctatactaatctccctacaaatctccttaattataacattcacagccacagaactaatcatattttatatcttcttcgaaaccacacttatccccaccttggctatcatcacccgatgaggcaaccagccagaacgcctgaacgcaggcacatacttcctattctacaccctagtaggctcccttcccctactcatcgcactgatttacactcacaacaccctaggctcactaaacattctactactcactctcactgcccaagaactatcaaactcctgagccaacaacttaatatgactagcttacacaatagcttttatagtaaagatacctctttacggactccacttatgactccctaaagcccatgtcgaagcccccatcgctgggtcaatagtacttgccgcagtactcttaaaactaggcggctatggtataatacgcctcacactcattctcaaccccctgacaaaacacatagcctaccccttccttgtactatccctatgaggcataattataacaagctccatctgcctacgacaaacagacctaaaatcgctcattgcatactcttcaatcagccacatagccctcgtagtaacagccattctcatccaaaccccctgaagcttcaccggcgcagtcattctcataatcgcccacggacttacatcctcattactattctgcctagcaaactcaaactacgaacgcactcacagtcgcatcataatcctctctcaaggacttcaaactctgctcccactaatagctttttgatgacttctagcaagcctcgctaacctcgccttaccccccactattaacctactgggagaactctctgtgctagtaaccacgttctcctgatcaaatatcactctcctacttacaggactcaacatactagtcacagccctatactccctctacatatttaccacaacacaatggggctcactcacccaccacattaacaacataaaaccctcattcacacgagaaaacaccctcatgttcatacacctatcccccattctcctcctatccctcaaccccgacatcattaccgggttttcctcttgtaaatatagtttaaccaaaacatcagattgtgaatctgacaacagaggcttacgaccccttatttaccgagaaagctcacaagaactgctaactcatgcccccatgtctaacaacatggctttctcaacttttaaaggataacagctatccattggtcttaggccccaaaaattttggtgcaactccaaataaaagtaataaccatgcacactactataaccaccctaaccctgacttccctaattccccccatccttaccaccctcgttaaccctaacaaaaaaaactcatacccccattatgtaaaatccattgtcgcatccacctttattatcagtctcttccccacaacaatattcatgtgcctagaccaagaagttattatctcgaactgacactgagccacaacccaaacaacccagctctccctaagcttcaaactagactacttctccataatattcatccctgtagcattgttcgttacatggtccatcatagaattctcactgtgatatataaactcagacccaaacattaatcagttcttcaaatatctactcatcttcctaattaccatactaatcttagttaccgctaacaacctattccaactgttcatcggctgagagggcgtaggaattatatccttcttgctcatcagttgatgatacgcccgagcagatgccaacacagcagccattcaagcaatcctatacaaccgtatcggcgatatcggtttcatcctcgccttagcatgatttatcctacactccaactcatgagacccacaacaaatagcccttctaaacgctaatccaagcctcaccccactactaggcctcctcctagcagcagcaggcaaatcagcccaattaggtctccacccctgactcccctcagccatagaaggccccaccccagtctcagccctactccactcaagcactatagttgtagcaggaatcttcttactcatccgcttccaccccctagcagaaaatagcccactaatccaaactctaacactatgcttaggcgctatcaccactctgttcgcagcagtctgcgcccttacacaaaatgacatcaaaaaaatcgtagccttctccacttcaagtcaactaggactcataatagttacaatcggcatcaaccaaccacacctagcattcctgcacatctgtacccacgccttcttcaaagccatactatttatgtgctccggatccatcatccacaaccttaacaatgaacaagatattcgaaaaataggaggactactcaaaaccatacctctcacttcaacctccctcaccattggcagcctagcattagcaggaatacctttcctcacaggtttctactccaaagaccacatcatcgaaaccgcaaacatatcatacacaaacgcctgagccctatctattactctcatcgctacctccctgacaagcgcctatagcactcgaataattcttctcaccctaacaggtcaacctcgcttccccacccttactaacattaacgaaaataaccccaccctactaaaccccattaaacgcctggcagccggaagcctattcgcaggatttctcattactaacaacatttcccccgcatcccccttccaaacaacaatccccctctacctaaaactcacagccctcgctgtcactttcctaggacttctaacagccctagacctcaactacctaaccaacaaacttaaaataaaatccccactatgcacattttatttctccaacatactcggattctaccctagcatcacacaccgcacaatcccctatctaggccttcttacgagccaaaacctgcccctactcctcctagacctaacctgactagaaaagctattacctaaaacaatttcacagcaccaaatctccacctccatcatcacctcaacccaaaaaggcataattaaactttacttcctctctttcttcttcccactcatcctaaccctactcctaatcacataacctattcccccgagcaatctcaattacaatatatacaccaacaaacaatgttcaaccagtaactactactaatcaacgcccatagtcatacaaagcccccgcaccaataggatcctcccgaatcaaccctgacccctctccttcataaattattcagcttcctacactattaaagtttaccacaaccaccaccccatcatactctttcacccacagcaccaatcctacctccatcgctaaccccactaaaacactcaccaagacctcaacccctgacccccatgcctcaggatactcctcaatagccatcgctgtagtatatccaaagacaaccatcattccccctaaataaattaaaaaaactattaaacccatataacctcccccaaaattcagaataataacacacccgaccacaccgctaacaatcaatactaaacccccataaataggagaaggcttagaagaaaaccccacaaaccccattactaaacccacactcaacagaaacaaagcatacatcattattctcgcacggactacaaccacgaccaatgatatgaaaaaccatcgttgtatttcaactacaagaacaccaatgaccccaatacgcaaaattaaccccctaataaaattaattaaccactcattcatcgacctccccaccccatccaacatctccgcatgatgaaacttcggctcactccttggcgcctgcctgatcctccaaatcaccacaggactattcctagccatacactactcaccagacgcctcaaccgccttttcatcaatcgcccacatcactcgagacgtaaattatggctgaatcatccgctaccttcacgccaatggcgcctcaatattctttatctgcctcttcctacacatcgggcgaggcctatattacggatcatttctctactcagaaacctgaaacatcggcattatcctcctgcttgcaactatagcaacagccttcataggctatgtcctcccgtgaggccaaatatcattctgaggggccacagtaattacaaacttactatccgccatcccatacattgggacagacctagttcaatgaatctgaggaggctactcagtagacagtcccaccctcacacgattctttacctttcacttcatcttgcccttcattattgcagccctagcagcactccacctcctattcttgcacgaaacgggatcaaacaaccccctaggaatcacctcccattccgataaaatcaccttccacccttactacacaatcaaagacgccctcggcttacttctcttcattctctccttaatgacattaacactattctcaccagacctcctaggcgacccagacaattataccctagccaaccccttaaacacccctccccacatcaagcccgaatgatatttcctattcgcctacacaattctccgatccgtccctaacaagctaggaggcgtccttgccctattactatccatcctcatcctagcaataatccccatcctccatatatccaaacaacaaagcataatatttcgcccactaagccaatcactttattgactcctagccgcagacctcctcattctaacctgaatcggaggacaaccagtaagctacccttttaccatcattggacaagtagcatccgtactatacttcacaacaatcctaatcctaataccaactatctccctaattgaaaacaaaatactcaaatgggcctgtccttgtagtataaactaatacaccagtcttgtaaaccgaagatgaaaacctttttccaaggacaaatcagagaaaaagtctttaactccaccattagcacccaaagctaagattctaatttaaactattctctgttctttcatggggaagcagatttgggtaccacccaagtattgactcacccatcaacaaccgctatgtatttcgtacattactgccagccaccatgaatattgtacggtaccataaatacttgaccacctgtagtacataaaaacccaatccacatcaaaaccccctccccatgcttacaagcaagtacagcaatcaaccctcaactatcacacatcaactgcaactccaaagccacccctcacccactaggataccaacaaacctacccacccttaacagtacatagtacataaagccatttaccgtacatagcacattacagtcaaatcccttctcgtccccatggatgacccccctcagataggggtcccttgaccaccatcctccgtgaaatcaatatcccgcacaagagtgctactctcctcgctccgggcccataacacttgggggtagctaaagtgaactgtatccgacatctggttcctacttcagggtcataaagcctaaatagcccacacgttccccttaaataagacatcacgatg

SEQ ID NO: 487 - DNA, 16569 bp, Homo sapiens mitochondrial
  3107: "n" refers to a nucleotide at position 3107 of the Cambridge Reference Sequence (CRS, Anderson et al. 1981 Nature 290:457-465), later determined to be absent from the human mtDNA sequence according to the revised CRS (rCRS, Andrews et al. 1999 Nature Genetics 23:147); "n" therefore represents a single nucleotide deletion at a position corresponding to nucleotide 3107 of SEQ ID NO:1 as provided herein.
gatcacaggtctatcaccctattaaccactcacgggagctctccatgcatttggtattttcgtctggggggtatgcacgcgatagcattgcgagacgctggagccggagcaccctatgtcgcagtatctgtctttgattcctgcctcatcctattatttatcgcacctacgttcaatattacaggcgaacatacttactaaagtgtgttaattaattaatgcttgtaggacataataataacaattgaatgtctgcacagccactttccacacagacatcataacaaaaaatttccaccaaaccccccctcccccgcttctggccacagcacttaaacacatctctgccaaaccccaaaaacaaagaaccctaacaccagcctaaccagatttcaaattttatcttttggcggtatgcacttttaacagtcaccccccaactaacacattattttcccctcccactcccatactactaatctcatcaatacaacccccgcccatcctacccagcacacacacaccgctgctaaccccataccccgaaccaaccaaaccccaaagacaccccccacagtttatgtagcttacctcctcaaagcaatacactgaaaatgtttagacgggctcacatcaccccataaacaaataggtttggtcctagcctttctattagctcttagtaagattacacatgcaagcatccccattccagtgagttcaccctctaaatcaccacgatcaaaagggacaagcatcaagcacgcagcaatgcagctcaaaacgcttagcctagccacacccccacgggaaacagcagtgattaacctttagcaataaacgaaagtttaactaagctatactaaccccagggttggtcaatttcgtgccagccaccgcggtcacacgattaacccaagtcaatagaaaccggcgtaaagagtgttttagatcaccccctccccaataaagctaaaactcacctgagttgtaaaaaactccagttgacacaaaatagactacgaaagtggctttaacatatctgaacacacaatagctaagacccaaactgggattagataccccactatgcttagccctaaacctcaacagttaaatcaacaaaactgctcgccagaacactacgagccacagcttaaaactcaaaggacctggcggtgcttcatatccctctagaggagcctgttctgtaatcgataaaccccgatcaacctcaccacctcttgctcagcctatataccgccatcttcagcaaaccctgatgaaggctacaaagtaagcgcaagtacccacgtaaagacgttaggtcaaggtgtagcccatgaggtggcaagaaatgggctacattttctaccccagaaaactacgatagcccttatgaaacttaagggtcgaaggtggatttagcagtaaactgagagtagagtgcttagttgaacagggccctgaagcgcgtacacaccgcccgtcaccctcctcaagtatacttcaaaggacatttaactaaaacccctacgcatttatatagaggagacaagtcgtaacatggtaagtgtactggaaagtgcacttggacgaaccagagtgtagcttaacacaaagcacccaacttacacttaggagatttcaacttaacttgaccgctctgagctaaacctagccccaaacccactccaccttactaccagacaaccttagccaaaccatttacccaaataaagtataggcgatagaaattgaaacctggcgcaatagatatagtaccgcaagggaaagatgaaaaattataaccaagcataatatagcaaggactaacccctataccttctgcataatgaattaactagaaataactttgcaaggagaaccaaagctaagacccccgaaaccagacgagctacctaagaacagctaaaagagcacacccgtctatgtagcaaaatagtgggaagatttataggtagaggcgacaaacctaccgagcctggtgatagctggttgtccaagatagaatcttagttcaactttaaatttgcccacagaaccctctaaatccccttgtaaatttaactgttagtccaaagaggaacagctctttggacactaggaaaaaaccttgtagagagagtaaaaaatttaacacccatagtaggcctaaaagcagccaccaattaagaaagcgttcaagctcaacacccactacctaaaaaatcccaaacatataactgaactcctcacacccaattggaccaatctatcaccctatagaagaactaatgttagtataagtaacatgaaaacattctcctccgcataagcctgcgtcagattaaaacactgaactgacaattaacagcccaatatctacaatcaaccaacaagtcattattaccctcactgtcaacccaacacaggcatgctcataaggaaaggttaaaaaaagtaaaaggaactcggcaaatcttaccccgcctgtttaccaaaaacatcacctctagcatcaccagtattagaggcaccgcctgcccagtgacacatgtttaacggccgcggtaccctaaccgtgcaaaggtagcataatcacttgttccttaaatagggacctgtatgaatggctccacgagggttcagctgtctcttacttttaaccagtgaaattgacctgcccgtgaagaggcgggcatgacacagcaagacgagaagaccctatggagctttaatttattaatgcaaacagtacctaacaaacccacaggtcctaaactaccaaacctgcattaaaaatttcggttggggcgacctcggagcagaacccaacctccgagcagtacatgctaagacttcaccagtcaaagcgaactactatactcaattgatccaataacttgaccaacggaacaagttaccctagggataacagcgcaatcctattctagagtccatatcaacaatagggtttacgacctcgatgttggatcaggacatcccgatggtgcagccgctattaaaggttcgtttgttcaacgattaaagtcctacgtgatctgagttcagaccggagtaatccaggtcggtttctatctacnttcaaattcctccctgtacgaaaggacaagagaaataaggcctacttcacaaagcgccttcccccgtaaatgatatcatctcaacttagtattatacccacacccacccaagaacagggtttgttaagatggcagagcccggtaatcgcataaaacttaaaactttacagtcagaggttcaattcctcttcttaacaacatacccatgaccaacctcctactcctcattgtacccattctaatcgcaatggcattcctaatgcttaccgaacgaaaaattctaggctatatacaactacgcaaaggccccaacgttgtaggcccctacgggctactacaacccttcgctgacgccataaaactcttcaccaaagagcccctaaaacccgccacatctaccatcaccctctacatcaccgccccgaccttagctctcaccatcgctcttctactatgaacccccctccccatacccaaccccctggtcaacctcaacctaggcctcctatttattctagccacctctagcctagccgtttactcaatcctctgatcagggtgagcatcaaactcaaactacgccctgatcggcgcactgcgagcagtagcccaaacaatctcatatgaagtcaccctagccatcattctactatcaacattactaataagtggctcctttaacctctccacccttatcacaacacaagaacacctctgattactcctgccatcatgacccttggccataatatgatttatctccacactagcagagaccaaccgaacccccttcgaccttgccgaaggggagtccgaactagtctcaggcttcaacatcgaatacgccgcaggccccttcgccctattcttcatagccgaatacacaaacattattataataaacaccctcaccactacaatcttcctaggaacaacatatgacgcactctcccctgaactctacacaacatattttgtcaccaagaccctacttctaacctccctgttcttatgaattcgaacagcatacccccgattccgctacgaccaactcatacacctcctatgaaaaaacttcctaccactcaccctagcattacttatatgacatgtctccatacccattacaatctccagcattccccctcaaacctaagaaatatgtctgataaaagagttactttgatagagtaaataataggagcttaaacccccttatttctaggactatgagaatcgaacccatccctgagaatccaaaattctccgtgccacctatcacaccccatcctaaagtaaggtcagctaaataagctatcgggcccataccccgaaaatgttggttatacccttcccgtactaattaatcccctggcccaacccgtcatctactctaccatctttgcaggcacactcatcacagcgctaagctcgcactgattttttacctgagtaggcctagaaataaacatgctagcttttattccagttctaaccaaaaaaataaaccctcgttccacagaagctgccatcaagtatttcctcacgcaagcaaccgcatccataatccttctaatagctatcctcttcaacaatatactctccggacaatgaaccataaccaatactaccaatcaatactcatcattaataatcataatggctatagcaataaaactaggaatagccccctttcacttctgagtcccagaggttacccaaggcacccctctgacatccggcctgcttcttctcacatgacaaaaactagcccccatctcaatcatataccaaatctctccctcactagacgtaagccttctcctcactctctcaatcttatccatcatagcaggcagttgaggtggattaaaccaaacccagctacgcaaaatcttagcatactcctcaattacccacataggatgaataatagcagttctaccgtacaaccctaacataaccattcttaatttaactatttatattatcctaactactaccgcattcctactactcaacttaaactccagcaccacaaccctactactatctcgcacctgaaacaagctaacatgactaacacccttaattccatccaccctcctctccctaggaggcctgcccccgctaaccggctttttgcccaaatgggccattatcgaagaattcacaaaaaacaatagcctcatcatccccaccatcatagccaccatcaccctccttaacctctacttctacctacgcctaatctactccacctcaatcacactactccccatatctaacaacgtaaaaataaaatgacagtttgaacatacaaaacccaccccattcctccccacactcatcgcccttaccacgctactcctacctatctccccttttatactaataatcttatagaaatttaggttaaatacagaccaagagccttcaaagccctcagtaagttgcaatacttaatttctgtaacagctaaggactgcaaaaccccactctgcatcaactgaacgcaaatcagccactttaattaagctaagcccttactagaccaatgggacttaaacccacaaacacttagttaacagctaagcaccctaatcaactggcttcaatctacttctcccgccgccgggaaaaaaggcgggagaagccccggcaggtttgaagctgcttcttcgaatttgcaattcaatatgaaaatcacctcggagctggtaaaaagaggcctaacccctgtctttagatttacagtccaatgcttcactcagccattttacctcacccccactgatgttcgccgaccgttgactattctctacaaaccacaaagacattggaacactatacctattattcggcgcatgagctggagtcctaggcacagctctaagcctccttattcgagccgagctgggccagccaggcaaccttctaggtaacgaccacatctacaacgttatcgtcacagcccatgcatttgtaataatcttcttcatagtaatacccatcataatcggaggctttggcaactgactagttcccctaataatcggtgcccccgatatggcgtttccccgcataaacaacataagcttctgactcttacctccctctctcctactcctgctcgcatctgctatagtggaggccggagcaggaacaggttgaacagtctaccctcccttagcagggaactactcccaccctggagcctccgtagacctaaccatcttctccttacacctagcaggtgtctcctctatcttaggggccatcaatttcatcacaacaattatcaatataaaaccccctgccataacccaataccaaacgcccctcttcgtctgatccgtcctaatcacagcagtcctacttctcctatctctcccagtcctagctgctggcatcactatactactaacagaccgcaacctcaacaccaccttcttcgaccccgccggaggaggagaccccattctataccaacacctattctgatttttcggtcaccctgaagtttatattcttatcctaccaggcttcggaataatctcccatattgtaacttactactccggaaaaaaagaaccatttggatacataggtatggtctgagctatgatatcaattggcttcctagggtttatcgtgtgagcacaccatatatttacagtaggaatagacgtagacacacgagcatatttcacctccgctaccataatcatcgctatccccaccggcgtcaaagtatttagctgactcgccacactccacggaagcaatatgaaatgatctgctgcagtgctctgagccctaggattcatctttcttttcaccgtaggtggcctgactggcattgtattagcaaactcatcactagacatcgtactacacgacacgtactacgttgtagctcacttccactatgtcctatcaataggagctgtatttgccatcataggaggcttcattcactgatttcccctattctcaggctacaccctagaccaaacctacgccaaaatccatttcactatcatattcatcggcgtaaatctaactttcttcccacaacactttctcggcctatccggaatgccccgacgttactcggactaccccgatgcatacaccacatgaaacatcctatcatctgtaggctcattcatttctctaacagcagtaatattaataattttcatgatttgagaagccttcgcttcgaagcgaaaagtcctaatagtagaagaaccctccataaacctggagtgactatatggatgccccccaccctaccacacattcgaagaacccgtatacataaaatctagacaaaaaaggaaggaatcgaaccccccaaagctggtttcaagccaaccccatggcctccatgactttttcaaaaaggtattagaaaaaccatttcataactttgtcaaagttaaattataggctaaatcctatatatcttaatggcacatgcagcgcaagtaggtctacaagacgctacttcccctatcatagaagagcttatcacctttcatgatcacgccctcataatcattttccttatctgcttcctagtcctgtatgcccttttcctaacactcacaacaaaactaactaatactaacatctcagacgctcaggaaatagaaaccgtctgaactatcctgcccgccatcatcctagtcctcatcgccctcccatccctacgcatcctttacataacagacgaggtcaacgatccctcccttaccatcaaatcaattggccaccaatggtactgaacctacgagtacaccgactacggcggactaatcttcaactcctacatacttcccccattattcctagaaccaggcgacctgcgactccttgacgttgacaatcgagtagtactcccgattgaagcccccattcgtataataattacatcacaagacgtcttgcactcatgagctgtccccacattaggcttaaaaacagatgcaattcccggacgtctaaaccaaaccactttcaccgctacacgaccgggggtatactacggtcaatgctctgaaatctgtggagcaaaccacagtttcatgcccatcgtcctagaattaattcccctaaaaatctttgaaatagggcccgtatttaccctatagcaccccctctaccccctctagagcccactgtaaagctaacttagcattaaccttttaagttaaagattaagagaaccaacacctctttacagtgaaatgccccaactaaatactaccgtatggcccaccataattacccccatactccttacactattcctcatcacccaactaaaaatattaaacacaaactaccacctacctccctcaccaaagcccataaaaataaaaaattataacaaaccctgagaaccaaaatgaacgaaaatctgttcgcttcattcattgcccccacaatcctaggcctacccgccgcagtactgatcattctatttccccctctattgatccccacctccaaatatctcatcaacaaccgactaatcaccacccaacaatgactaatcaaactaacctcaaaacaaataataaccatacacaacactaaaggacgaacctgatctcttatactagtatccttaatcatttttattgccacaactaacctcctcggactcctgcctcactcatttacaccaaccacccaactatctataaacctagccatggccatccccttatgagcgggcgcagtgattataggctttcgctctaagattaaaaatgccctagcccacttcttaccacaaggcacacctacaccccttatccccatactagttattatcgaaaccatcagcctactcattcaaccaatagccctggccgtacgcctaaccgctaacattactgcaggccacctactcatgcacctaattggaagcgccaccctagcaatatcaaccattaaccttccctctacacttatcatcttcacaattctaattctactgactatcctagaaatcgctgtcgccttaatccaagcctacgttttcacacttctagtaagcctctacctgcacgacaacacataatgacccaccaatcacatgcctatcatatagtaaaacccagcccatgacccctaacaggggccctctcagccctcctaatgacctccggcctagccatgtgatttcacttccactccataacgctcctcatactaggcctactaaccaacacactaaccatataccaatgatggcgcgatgtaacacgagaaagcacataccaaggccaccacacaccacctgtccaaaaaggccttcgatacgggataatcctatttattacctcagaagtttttttcttcgcaggatttttctgagccttttaccactccagcctagcccctaccccccaattaggagggcactggcccccaacaggcatcaccccgctaaatcccctagaagtcccactcctaaacacatccgtattactcgcatcaggagtatcaatcacctgagctcaccatagtctaatagaaaacaaccgaaaccaaataattcaagcactgcttattacaattttactgggtctctattttaccctcctacaagcctcagagtacttcgagtctcccttcaccatttccgacggcatctacggctcaacattttttgtagccacaggcttccacggacttcacgtcattattggctcaactttcctcactatctgcttcatccgccaactaatatttcactttacatccaaacatcactttggcttcgaagccgccgcctgatactggcattttgtagatgtggtttgactatttctgtatgtctccatctattgatgagggtcttactcttttagtataaatagtaccgttaacttccaattaactagttttgacaacattcaaaaaagagtaataaacttcgccttaattttaataatcaacaccctcctagccttactactaataattattacattttgactaccacaactcaacggctacatagaaaaatccaccccttacgagtgcggcttcgaccctatatcccccgcccgcgtccctttctccataaaattcttcttagtagctattaccttcttattatttgatctagaaattgccctccttttacccctaccatgagccctacaaacaactaacctgccactaatagttatgtcatccctcttattaatcatcatcctagccctaagtctggcctatgagtgactacaaaaaggattagactgaaccgaattggtatatagtttaaacaaaacgaatgatttcgactcattaaattatgataatcatatctaccaaatgcccctcatttacataaatattatactagcatttaccatctcacttctaggaatactagtatatcgctcacacctcatatcctccctactatgcctagaaggaataatactatcgctgttcattatagctactctcataaccctcaacacccactccctcttagccaatattgtgcctattgccatactagtctttgccgcctgcgaagcagcggtgggcctagccctactagtctcaatctccaacacatatggcctagactacgtacataacctaaacctactccaatgctaaaactaatcgtcccaacaattatattactaccactgacatgactttccaaaaaacacataatttgaatcaacacaaccacccacagcctaattattagcatcatccctctactattttttaaccaaatcaacaacaacctatttagctgttccccaaccttttcctccgaccccctaacaacccccctcctaatactaactacctgactcctacccctcacaatcatggcaagccaacgccacttatccagtgaaccactatcacgaaaaaaactctacctctctatactaatctccctacaaatctccttaattataacattcacagccacagaactaatcatattttatatcttcttcgaaaccacacttatccccaccttggctatcatcacccgatgaggcaaccagccagaacgcctgaacgcaggcacatacttcctattctacaccctagtaggctcccttcccctactcatcgcactgatttacactcacaacaccctaggctcactaaacattctactactcactctcactgcccaagaactatcaaactcctgagccaacaacttaatatgactagcttacacaatagcttttatagtaaagatacctctttacggactccacttatgactccctaaagcccatgtcgaagcccccatcgctgggtcaatagtacttgccgcagtactcttaaaactaggcggctatggtataatacgcctcacactcattctcaaccccctgacaaaacacatagcctaccccttccttgtactatccctatgaggcataattataacaagctccatctgcctacgacaaacagacctaaaatcgctcattgcatactcttcaatcagccacatagccctcgtagtaacagccattctcatccaaaccccctgaagcttcaccggcgcagtcattctcataatcgcccacggacttacatcctcattactattctgcctagcaaactcaaactacgaacgcactcacagtcgcatcataatcctctctcaaggacttcaaactctgctcccactaatagctttttgatgacttctagcaagcctcgctaacctcgccttaccccccactattaacctactgggagaactctctgtgctagtaaccacgttctcctgatcaaatatcactctcctacttacaggactcaacatactagtcacagccctatactccctctacatatttaccacaacacaatggggctcactcacccaccacattaacaacataaaaccctcattcacacgagaaaacaccctcatgttcatacacctatcccccattctcctcctatccctcaaccccgacatcattaccgggttttcctcttgtaaatatagtttaaccaaaacatcagattgtgaatctgacaacagaggcttacgaccccttatttaccgagaaagctcacaagaactgctaactcatgcccccatgtctaacaacatggctttctcaacttttaaaggataacagctatccattggtcttaggccccaaaaattttggtgcaactccaaataaaagtaataaccatgcacactactataaccaccctaaccctgacttccctaattccccccatccttaccaccctcgttaaccctaacaaaaaaaactcatacccccattatgtaaaatccattgtcgcatccacctttattatcagtctcttccccacaacaatattcatgtgcctagaccaagaagttattatctcgaactgacactgagccacaacccaaacaacccagctctccctaagcttcaaactagactacttctccataatattcatccctgtagcattgttcgttacatggtccatcatagaattctcactgtgatatataaactcagacccaaacattaatcagttcttcaaatatctactcatcttcctaattaccatactaatcttagttaccgctaacaacctattccaactgttcatcggctgagagggcgtaggaattatatccttcttgctcatcagttgatgatacgcccgagcagatgccaacacagcagccattcaagcaatcctatacaaccgtatcggcgatatcggtttcatcctcgccttagcatgatttatcctacactccaactcatgagacccacaacaaatagcccttctaaacgctaatccaagcctcaccccactactaggcctcctcctagcagcagcaggcaaatcagcccaattaggtctccacccctgactcccctcagccatagaaggccccaccccagtctcagccctactccactcaagcactatagttgtagcaggaatcttcttactcatccgcttccaccccctagcagaaaatagcccactaatccaaactctaacactatgcttaggcgctatcaccactctgttcgcagcagtctgcgcccttacacaaaatgacatcaaaaaaatcgtagccttctccacttcaagtcaactaggactcataatagttacaatcggcatcaaccaaccacacctagcattcctgcacatctgtacccacgccttcttcaaagccatactatttatgtgctccggatccatcatccacaaccttaacaatgaacaagatattcgaaaaataggaggactactcaaaaccatacctctcacttcaacctccctcaccattggcagcctagcattagcaggaatacctttcctcacaggtttctactccaaagaccacatcatcgaaaccgcaaacatatcatacacaaacgcctgagccctatctattactctcatcgctacctccctgacaagcgcctatagcactcgaataattcttctcaccctaacaggtcaacctcgcttccccacccttactaacattaacgaaaataaccccaccctactaaaccccattaaacgcctggcagccggaagcctattcgcaggatttctcattactaacaacatttcccccgcatcccccttccaaacaacaatccccctctacctaaaactcacagccctcgctgtcactttcctaggacttctaacagccctagacctcaactacctaaccaacaaacttaaaataaaatccccactatgcacattttatttctccaacatactcggattctaccctagcatcacacaccgcacaatcccctatctaggccttcttacgagccaaaacctgcccctactcctcctagacctaacctgactagaaaagctattacctaaaacaatttcacagcaccaaatctccacctccatcatcacctcaacccaaaaaggcataattaaactttacttcctctctttcttcttcccactcatcctaaccctactcctaatcacataacctattcccccgagcaatctcaattacaatatatacaccaacaaacaatgttcaaccagtaactactactaatcaacgcccatagtcatacaaagcccccgcaccaataggatcctcccgaatcaaccctgacccctctccttcataaattattcagcttcctacactattaaagtttaccacaaccaccaccccatcatactctttcacccacagcaccaatcctacctccatcgctaaccccactaaaacactcaccaagacctcaacccctgacccccatgcctcaggatactcctcaatagccatcgctgtagtatatccaaagacaaccatcattccccctaaataaattaaaaaaactattaaacccatataacctcccccaaaattcagaataataacacacccgaccacaccgctaacaatcaatactaaacccccataaataggagaaggcttagaagaaaaccccacaaaccccattactaaacccacactcaacagaaacaaagcatacatcattattctcgcacggactacaaccacgaccaatgatatgaaaaaccatcgttgtatttcaactacaagaacaccaatgaccccaatacgcaaaattaaccccctaataaaattaattaaccactcattcatcgacctccccaccccatccaacatctccgcatgatgaaacttcggctcactccttggcgcctgcctgatcctccaaatcaccacaggactattcctagccatacactactcaccagacgcctcaaccgccttttcatcaatcgcccacatcactcgagacgtaaattatggctgaatcatccgctaccttcacgccaatggcgcctcaatattctttatctgcctcttcctacacatcgggcgaggcctatattacggatcatttctctactcagaaacctgaaacatcggcattatcctcctgcttgcaactatagcaacagccttcataggctatgtcctcccgtgaggccaaatatcattctgaggggccacagtaattacaaacttactatccgccatcccatacattgggacagacctagttcaatgaatctgaggaggctactcagtagacagtcccaccctcacacgattctttacctttcacttcatcttgcccttcattattgcagccctagcagcactccacctcctattcttgcacgaaacgggatcaaacaaccccctaggaatcacctcccattccgataaaatcaccttccacccttactacacaatcaaagacgccctcggcttacttctcttcattctctccttaatgacattaacactattctcaccagacctcctaggcgacccagacaattataccctagccaaccccttaaacacccctccccacatcaagcccgaatgatatttcctattcgcctacacaattctccgatccgtccctaacaagctaggaggcgtccttgccctattactatccatcctcatcctagcaataatccccatcctccatatatccaaacaacaaagcataatatttcgcccactaagccaatcactttattgactcctagccgcagacctcctcattctaacctgaatcggaggacaaccagtaagctacccttttaccatcattggacaagtagcatccgtactatacttcacaacaatcctaatcctaataccaactatctccctaattgaaaacaaaatactcaaatgggcctgtccttgtagtataaactaatacaccagtcttgtaaaccgaagatgaaaacctttttccaaggacaaatcagagaaaaagtctttaactccaccattagcacccaaagctaagattctaatttaaactattctctgttctttcatggggaagcagatttgggtaccacccaagtattgactcacccatcaacaaccgctatgtatttcgtacattactgccagccaccatgaatattgtacggtaccataaatacttgaccacctgtagtacataaaaacccaatccacatcaaaaccccctccccatgcttacaagcaagtacagcaatcaaccctcaactatcacacatcaactgcaactccaaagccacccctcacccactaggataccaacaaacctacccacccttaacagtacatagtacataaagccatttaccgtacatagcacattacagtcaaatcccttctcgtccccatggatgacccccctcagataggggtcccttgaccaccatcctccgtgaaatcaatatcccgcacaagagtgctactctcctcgctccgggcccataacacttgggggtagctaaagtgaactgtatccgacatctggttcctacttcagggtcataaagcctaaatagcccacacgttccccttaaataagacatcacgatg

SEQ ID NO: 488 - DNA, 16569 bp, Homo sapiens mitochondrial
  3107: "n" refers to a nucleotide at position 3107 of the Cambridge Reference Sequence (CRS, Anderson et al. 1981 Nature 290:457-465), later determined to be absent from the human mtDNA sequence according to the revised CRS (rCRS, Andrews et al. 1999 Nature Genetics 23:147); "n" therefore represents a single nucleotide deletion at a position corresponding to nucleotide 3107 of SEQ ID NO:1 as provided herein.
gatcacaggtctatcaccctattaaccactcacgggagctctccatgcatttggtattttcgtctggggggtatgcacgcgatagcattgcgagacgctggagccggagcaccctatgtcgcagtatctgtctttgattcctgcctcatcctattatttatcgcacctacgttcaatattacaggcgaacatacttactaaagtgtgttaattaattaatgcttgtaggacataataataacaattgaatgtctgcacagccactttccacacagacatcataacaaaaaatttccaccaaaccccccctcccccgcttctggccacagcacttaaacacatctctgccaaaccccaaaaacaaagaaccctaacaccagcctaaccagatttcaaattttatcttttggcggtatgcacttttaacagtcaccccccaactaacacattattttcccctcccactcccatactactaatctcatcaatacaacccccgcccatcctacccagcacacacacaccgctgctaaccccataccccgaaccaaccaaaccccaaagacaccccccacagtttatgtagcttacctcctcaaagcaatacactgaaaatgtttagacgggctcacatcaccccataaacaaataggtttggtcctagcctttctattagctcttagtaagattacacatgcaagcatccccgttccagtgagttcaccctctaaatcaccacgatcaaaagggacaagcatcaagcacgcagcaatgcagctcaaaacgcttagcctagccacacccccacgggaaacagcagtgattaacctttagcaataaacgaaagtttaactaagctatactaaccccagggttggtcaatttcgtgccagccaccgcggtcacacgattaacccaagtcaatagaagccggcgtaaagagtgttttaaatcaccccctccccaataaagctaaaactcacctgagttgtaaaaaactccagttgacacaaaatagactacgaaagtggctttaacatatctgaacacacaatagctaagacccaaactgggattagataccccactatgcttagccctaaacctcaacagttaaatcaacaaaactgctcgccagaacactacgagccacagcttaaaactcaaaggacctggcggtgcttcatatccctctagaggagcctgttctgtaatcgataaaccccgatcaacctcaccacctcttgctcagcctatataccgccatcttcagcaaaccctgatgaaggctacaaagtaagcgcaagtacccacgtaaagacgttaggtcaaggtgtagcccatgaggtggcaagaaatgggctacattttctaccccagaaaactacgatagcccttatgaaacttaagggtcgaaggtggatttagcagtaaactaagagtagagtgcttagttgaacagggccctgaagcgcgtacacaccgcccgtcaccctcctcaagtatacttcaaaggacatttaactaaaacccctacgcatttatatagaggagacaagtcgtaacatggtaagtgtactggaaagtgcacttggacgaaccagagtgtagcttaacacaaagcacccaacttacacttaggagatttcaacttaacttgaccgctctgagctaaacctagccccaaacccactccaccttactaccagacaaccttagccaaaccatttacccaaataaagtataggcgatagaaattgaaacctggcgcaatagatatagtaccgcaagggaaagatgaaaaattataaccaagcataatatagcaaggactaacccctataccttctgcataatgaattaactagaaataactttgcaaggagagccaaagctaagacccccgaaaccagacgagctacctaagaacagctaaaagagcacacccgtctatgtagcaaaatagtgggaagatttataggtagaggcgacaaacctaccgagcctggtgatagctggttgtccaagatagaatcttagttcaactttaaatttgcccacagaaccctctaaatccccttgtaaatttaactgttagtccaaagaggaacagctctttggacactaggaaaaaaccttgtagagagagtaaaaaatttaacacccatagtaggcctaaaagcagccaccaattaagaaagcgttcaagctcaacacccactacctaaaaaatcccaaacatataactgaactcctcacacccaattggaccaatctatcaccctatagaagaactaatgttagtataagtaacatgaaaacattctcctccgcataagcctgcgtcagattaaaacactgaactgacaattaacagcccaatatctacaatcaaccaacaagtcattattaccctcactgtcaacccaacacaggcatgctcataaggaaaggttaaaaaaagtaaaaggaactcggcaaatcttaccccgcctgtttaccaaaaacatcacctctagcatcaccagtattagaggcaccgcctgcccagtgacacatgtttaacggccgcggtaccctaaccgtgcaaaggtagcataatcacttgttccttaaatagggacctgtatgaatggctccacgagggttcagctgtctcttacttttaaccagtgaaattgacctgcccgtgaagaggcgggcataacacagcaagacgagaagaccctatggagctttaatttattaatgcaaacagtacctaacaaacccacaggtcctaaactaccaaacctgcattaaaaatttcggttggggcgacctcggagcagaacccaacctccgagcagtacatgctaagacttcaccagtcaaagcgaactactatactcaattgatccaataacttgaccaacggaacaagttaccctagggataacagcgcaatcctattctagagtccatatcaacaatagggtttacgacctcgatgttggatcaggacatcccgatggtgcagccgctattaaaggttcgtttgttcaacgattaaagtcctacgtgatctgagttcagaccggagtaatccaggtcggtttctatctacnttcaaattcctccctgtacgaaaggacaagagaaataaggcctacttcacaaagcgccttcccccgtaaatgatatcatctcaacttagtattatacccacacccacccaagaacagggtttgttaagatggcagagcccggtaatcgcataaaacttaaaactttacagtcagaggttcaattcctcttcttaacaacatacccatggccaacctcctactcctcattgtacccattctaatcgcaatggcattcctaatgcttaccgaacgaaaaattctaggctatatacaactacgcaaaggccccaacgttgtaggcccctacgggctactacaacccttcgctgacgccataaaactcttcaccaaagagcccctaaaacccgccacatctaccatcaccctctacatcaccgccccgaccttagctctcaccatcgctcttctactatgaacccccctccccatacccaaccccctggtcaacctcaacctaggcctcctatttattctagccacctctagcctagccgtttactcaatcctctgatcagggtgagcatcaaactcaaactacgccctgatcggcgcactgcgagcagtagcccaaacaatctcatatgaagtcaccctagccatcattctactatcaacattactaataagtggctcctttaacctctccacccttatcacaacacaagaacacctctgattactcctgccatcatgacccttggccataatatgatttatctccacactagcagagaccaaccgaacccccttcgaccttgccgaaggggagtccgaactagtctcaggcttcaacatcgaatacgccgcaggccccttcgccctattcttcatagccgaatacacaaacattattataataaacaccctcaccactacaatcttcctaggaacaacatatgacgcactctcccctgaactctacacaacatattttgtcaccaagaccctacttctaacctccctgttcttatgaattcgaacagcatacccccgattccgctacgaccaactcatacacctcctatgaaaaaacttcctaccactcaccctagcattacttatatgatatgtctccatacccattacaatctccagcattccccctcaaacctaagaaatatgtctgataaaagagttactttgatagagtaaataataggagcttaaacccccttatttctaggactatgagaatcgaacccatccctgagaatccaaaattctccgtgccacctatcacaccccatcctaaagtaaggtcagctaaataagctatcgggcccataccccgaaaatgttggttatacccttcccgtactaattaatcccctggcccaacccgtcatctactctaccatctttgcaggcacactcatcacagcgctaagctcgcactgattttttacctgagtaggcctagaaataaacatgctagcttttattccagttctaaccaaaaaaataaaccctcgttccacagaagctgccatcaagtatttcctcacgcaagcaaccgcatccataatccttctaatagctatcctcttcaacaatatactctccggacaatgaaccataaccaatactaccaatcaatactcatcattaataatcataatagctatagcaataaaactaggaatagccccctttcacttctgagtcccagaggttacccaaggcacccctctgacatccggcctgcttcttctcacatgacaaaaactagcccccatctcaatcatataccaaatctctccctcactaaacgtaagccttctcctcactctctcaatcttatccatcatagcaggcagttgaggtggattaaaccaaacccagctacgcaaaatcttagcatactcctcaattacccacataggatgaataatagcagttctaccgtacaaccctaacataaccattcttaatttaactatttatattatcctaactactaccgcattcctactactcaacttaaactccagcaccacgaccctactactatctcgcacctgaaacaagctaacatgactaacacccttaattccatccaccctcctctccctaggaggcctgcccccgctaaccggctttttgcccaaatgggccattatcgaagaattcacaaaaaacaatagcctcatcatccccaccatcatagccaccatcaccctccttaacctctacttctacctacgcctaatctactccacctcaatcacactactccccatatctaacaacgtaaaaataaaatgacagtttgaacatacaaaacccaccccattcctccccacactcatcgcccttaccacgctactcctacctatctccccttttatactaataatcttatagaaatttaggttaaatacagaccaagagccttcaaagccctcagtaagttgcaatacttaatttctgtaacagctaaggactgcaaaaccccactctgcatcaactgaacgcaaatcagccactttaattaagctaagcccttactagaccaatgggacttaaacccacaaacacttagttaacagctaagcaccctaatcaactggcttcaatctacttctcccgccgccgggaaaaaaggcgggagaagccccggcaggtttgaagctgcttcttcgaatttgcaattcaatatgaaaatcacctcggagctggtaaaaagaggcctaacccctgtctttagatttacagtccaatgcttcactcagccattttacctcacccccactgatgttcgccgaccgttgactattctctacaaaccacaaagacattggaacactatacctattattcggcgcatgagctggagtcctaggcacagctctaagcctccttattcgagccgagctgggccagccaggcaaccttctaggtaacgaccacatctacaacgttatcgtcacagcccatgcatttgtaataatcttcttcatagtaatacccatcataatcggaggctttggcaactgactagttcccctaataatcggtgcccccgatatggcgtttccccgcataaacaacataagcttctgactcttacctccctctctcctactcctgctcgcatctgctatagtggaggccggagcaggaacaggttgaacagtctaccctcccttagcagggaactactcccaccctggagcctccgtagacctaaccatcttctccttacacctagcaggtgtctcctctatcttaggggccatcaatttcatcacaacaattatcaatataaaaccccctgccataacccaataccaaacgcccctcttcgtctgatccgtcctaatcacagcagtcctacttctcctatctctcccagtcctagctgctggcatcactatactactaacagaccgcaacctcaacaccaccttcttcgaccccgccggaggaggagaccccattctataccaacacctattctgatttttcggtcaccctgaagtttatattcttatcctaccaggcttcggaataatctcccatattgtaacttactactccggaaaaaaagaaccatttggatacataggtatggtctgagctatgatatcaattggcttcctagggtttatcgtgtgagcacaccatatatttacagtaggaatagacgtagacacacgagcatatttcacctccgctaccataatcatcgctatccccaccggcgtcaaagtatttagctgactcgccacactccacggaagcaatatgaaatgatctgctgcagtgctctgagccctaggattcatctttcttttcaccgtaggtggcctgactggcattgtattagcaaactcatcactagacatcgtactacacgacacgtactacgttgtagcccacttccactatgtcctatcaataggagctgtatttgccatcataggaggcttcattcactgatttcccctattctcaggctacaccctagaccaaacctacgccaaaatccatttcactatcatattcatcggcgtaaatctaactttcttcccacaacactttctcggcctatccggaatgccccgacgttactcggactaccccgatgcatacaccacatgaaacatcctatcatctgtaggctcattcatttctctaacagcagtaatattaataattttcatgatttgagaagccttcgcttcgaagcgaaaagtcctaatagtagaagaaccctccataaacctggagtgactatatggatgccccccaccctaccacacattcgaagaacccgtatacataaaatctagacaaaaaaggaaggaatcgaaccccccaaagctggtttcaagccaaccccatggcctccatgactttttcaaaaaggtattagaaaaaccatttcataactttgtcaaagttaaattataggctaaatcctatatatcttaatggcacatgcagcgcaagtaggtctacaagacgctacttcccctatcatagaagagcttatcacctttcatgatcacgccctcataatcattttccttatctgcttcctagtcctgtatgcccttttcctaacactcacaacaaaactaactaatactaacatctcagacgctcaggaaatagaaaccgtctgaactatcctgcccgccatcatcctagtcctcatcgccctcccatccctacgcatcctttacataacagacgaggtcaacgatccctcccttaccatcaaatcaattggccaccaatggtactgaacctacgagtacaccgactacggcggactaatcttcaactcctacatacttcccccattattcctagaaccaggcgacctgcgactccttgacgttgacaatcgagtagtactcccgattgaagcccccattcgtataataattacatcacaagacgtcttgcactcatgagctgtccccacattaggcttaaaaacagatgcaattcccggacgtctaaaccaaaccactttcaccgctacacgaccgggggtatactacggtcaatgctctgaaatctgtggagcaaaccacagtttcatgcccatcgtcctagaattaattcccctaaaaatctttgaaatagggcccgtatttaccctatagcaccccctctaccccctctagagcccactgtaaagctaacttagcattaaccttttaagttaaagattaagagaaccaacacctctttacagtgaaatgccccaactaaatactaccgtatggcccaccataattacccccatactccttacactattcctcatcacccaactaaaaatattaaacacaaactaccacctacctccctcaccaaagcccataaaaataaaaaattataacaaaccctgagaaccaaaatgaacgaaaatctgttcgcttcattcattgcccccacaatcctaggcctacccgccgcagtactgatcattctatttccccctctattgatccccacctccaaatatctcatcaacaaccgactaatcaccacccaacaatgactaatcaaactaacctcaaaacaaatgataaccatacacaacactaaaggacgaacctgatctcttatactagtatccttaatcatttttattgccacaactaacctcctcggactcctgcctcactcatttacaccaaccacccaactatctataaacctagccatggccatccccttatgagcgggcgcagtgattataggctttcgctctaagattaaaaatgccctagcccacttcttaccacaaggcacacctacaccccttatccccatactagttattatcgaaaccatcagcctactcattcaaccaatagccctggccgtacgcctaaccgctaacattactgcaggccacctactcatgcacctaattggaagcgccaccctagcaatatcaaccattaaccttccctctacacttatcatcttcacaattctaattctactgactatcctagaaatcgctgtcgccttaatccaagcctacgttttcacacttctagtaagcctctacctgcacgacaacacataatgacccaccaatcacatgcctatcatatagtaaaacccagcccatgacccctaacaggggccctctcagccctcctaatgacctccggcctagccatgtgatttcacttccactccataacgctcctcatactaggcctactaaccaacacactaaccatataccaatgatggcgcgatgtaacacgagaaagcacataccaaggccaccacacaccacctgtccaaaaaggccttcgatacgggataatcctatttattacctcagaagtttttttcttcgcaggatttttctgagccttttaccactccagcctagcccctaccccccaattaggagggcactggcccccaacaggcatcaccccgctaaatcccctagaagtcccactcctaaacacatccgtattactcgcatcaggagtatcaatcacctgagctcaccatagtctaatagaaaacaaccgaaaccaaataattcaagcactgcttattacaattttactgggtctctattttaccctcctacaagcctcagagtacttcgagtctcccttcaccatttccgacggcatctacggctcaacattttttgtagccacaggcttccacggacttcacgtcattattggctcaactttcctcactatctgcttcatccgccaactaatatttcactttacatccaaacatcactttggcttcgaagccgccgcctgatactggcattttgtagatgtggtttgactatttctgtatgtctccatctattgatgagggtcttactcttttagtataaatagtaccgttaacttccaattaactagttttgacaacattcaaaaaagagtaataaacttcgccttaattttaataatcaacaccctcctagccttactactaataattattacattttgactaccacaactcaacggctacatagaaaaatccaccccttacgagtgcggcttcgaccctatatcccccgcccgcgtccctttctccataaaattcttcttagtagctattaccttcttattatttgatctagaaattgccctccttttacccctaccatgagccctacaaacaactaacctgccactaatagttatgtcatccctcttattaatcatcatcctagccctaagtctggcctatgagtgactacaaaaaggattagactgaaccgaattggtatatagtttaaacaaaacgaatgatttcgactcattaaattatgataatcatatttaccaaatgcccctcatttacataaatattatactagcatttaccatctcacttctaggaatactagtatatcgctcacacctcatatcctccctactatgcctagaaggaataatactatcgctgttcattatagctactctcataaccctcaacacccactccctcttagccaatattgtgcctattgccatactagtctttgccgcctgcgaagcagcggtgggcctagccctactagtctcaatctccaacacatatggcctagactacgtacataacctaaacctactccaatgctaaaactaatcgtcccaacaattatattactaccactgacatgactttccaaaaaacacataatttgaatcaacacaaccacccacagcctaattattagcatcatccctctactattttttaaccaaatcaacaacaacctatttagctgttccccaaccttttcctccgaccccctaacaacccccctcctaatactaactacctgactcctacccctcacaatcatggcaagccaacgccacttatccagtgaaccactatcacgaaaaaaactctacctctctatactaatctccctacaaatctccttaattataacattcacagccacagaactaatcatattttatatcttcttcgaaaccacacttatccccaccttggctatcatcacccgatgaggcaaccagccagaacgcctgaacgcaggcacatacttcctattctacaccctagtaggctcccttcccctactcatcgcactaatttacactcacaacaccctaggctcactaaacattctactactcactctcactgcccaagaactatcaaactcctgagccaacaacttaatatgactagcttacacaatagcttttatagtaaagatacctctttacggactccacttatgactccctaaagcccatgtcgaagcccccatcgctgggtcaatagtacttgccgcagtactcttaaaactaggcggctatggtataatacgcctcacactcattctcaaccccctgacaaaacacatagcctaccccttccttgtactatccctatgaggcataattataacaagctccatctgcctacgacaaacagacctaaaatcgctcattgcatactcttcaatcagccacatagccctcgtagtaacagccattctcatccaaaccccctgaagcttcaccggcgcagtcattctcataatcgcccacgggcttacatcctcattactattctgcctagcaaactcaaactacgaacgcactcacagtcgcatcataatcctctctcaaggacttcaaactctactcccactaatagctttttgatgacttctagcaagcctcgctaacctcgccttaccccccactattaacctactgggagaactctctgtgctagtaaccacgttctcctgatcaaatatcactctcctacttacaggactcaacatactagtcacagccctatactccctctacatatttaccacaacacaatggggctcactcacccaccacattaacaacataaaaccctcattcacacgagaaaacaccctcatgttcatacacctatcccccattctcctcctatccctcaaccccgacatcattaccgggttttcctcttgtaaatatagtttaaccaaaacatcagattgtgaatctgacaacagaggcttacgaccccttatttaccgagaaagctcacaagaactgctaactcatgcccccatgtctaacaacatggctttctcaacttttaaaggataacagctatccattggtcttaggccccaaaaattttggtgcaactccaaataaaagtaataaccatgcacactactataaccaccctaaccctgacttccctaattccccccatccttaccaccctcgttaaccctaacaaaaaaaactcatacccccattatgtaaaatccattgtcgcatccacctttattatcagtctcttccccacaacaatattcatgtgcctagaccaagaagttattatctcgaactgacactgagccacaacccaaacaacccagctctccctaagcttcaaactagactacttctccataatattcatccctgtagcattgttcgttacatggtccatcatagaattctcactgtgatatataaactcagacccaaacattaatcagttcttcaaatatctactcatcttcctaattaccatactaatcttagttaccgctaacaacctattccaactgttcatcggctgagagggcgtaggaattatatccttcttgctcatcagttgatgatacgcccgagcagatgccaacacagcagccattcaagcaatcctatacaaccgtatcggcgatatcggtttcatcctcgccttagcatgatttatcctacactccaactcatgagacccacaacaaatagcccttctaaacgctaatccaagcctcaccccactactaggcctcctcctagcagcagcaggcaaatcagcccaattaggtctccacccctgactcccctcagccatagaaggccccaccccagtctcagccctactccactcaagcactatagttgtagcaggaatcttcttactcatccgcttccaccccctagcagaaaatagcccactaatccaaactctaacactatgcttaggcgctatcaccactctgttcgcagcagtctgcgcccttacacaaaatgacatcaaaaaaatcgtagccttctccacttcaagtcaactaggactcataatagttacaatcggcatcaaccaaccacacctagcattcctgcacatctgtacccacgccttcttcaaagccatactatttatgtgctccgggtccatcatccacaaccttaacaatgaacaagatattcgaaaaataggaggactactcaaaaccatacctctcacttcaacctccctcaccattggcagcctagcattagcaggaatacctttcctcacaggtttctactccaaagaccacatcatcgaaaccgcaaacatatcatacacaaacgcctgagccctatctattactctcatcgctacctccctgacaagcgcctatagcactcgaataattcttctcaccctaacaggtcaacctcgcttccccacccttactaacattaacgaaaataaccccaccctactaaaccccattaaacgcctggcagccggaagcctattcgcaggatttctcattactaacaacatttcccccgcatcccccttccaaacaacaatccccctctacctaaaactcacagccctcgctgtcactttcctaggacttctaacagccctagacctcaactacctaaccaacaaacttaaaataaaatccccactatgcacattttatttctccaacatactcggattctaccctagcatcacacaccgcacaatcccctatctaggccttcttacgagccaaaacctgcccctactcctcctagacctaacctgactagaaaagctattacctaaaacaatttcacagcaccaaatctccacctccatcatcacctcaacccaaaaaggcataattaaactttacttcctctctttcttcttcccactcatcctaaccctactcctaatcacataacctattcccccgagcaatctcaattacaatatatacaccaacaaacaatgttcaaccagtaactactactaatcaacgcccataatcatacaaagcccccgcaccaataggatcctcccgaatcaaccctgacccctctccttcataaattattcagcttcctacactattaaagtttaccacaaccaccaccccatcatactctttcacccacagcaccaatcctacctccatcgctaaccccactaaaacactcaccaagacctcaacccctgacccccatgcctcaggatactcctcaatagccatcgctgtagtatatccaaagacaaccatcattccccctaaataaattaaaaaaactattaaacccatataacctcccccaaaattcagaataataacacacccgaccacaccgctaacaatcaatactaaacccccataaataggagaaggcttagaagaaaaccccacaaaccccattactaaacccacactcaacagaaacaaagcatacatcattattctcgcacggactacaaccacgaccaatgatatgaaaaaccatcgttgtatttcaactacaagaacaccaatgaccccaatacgcaaaactaaccccctaataaaattaattaaccactcattcatcgacctccccaccccatccaacatctccgcatgatgaaacttcggctcactccttggcgcctgcctgatcctccaaatcaccacaggactattcctagccatgcactactcaccagacgcctcaaccgccttttcatcaatcgcccacatcactcgagacgtaaattatggctgaatcatccgctaccttcacgccaatggcgcctcaatattctttatctgcctcttcctacacatcgggcgaggcctatattacggatcatttctctactcagaaacctgaaacatcggcattatcctcctgcttgcaactatagcaacagccttcataggctatgtcctcccgtgaggccaaatatcattctgaggggccacagtaattacaaacttactatccgccatcccatacattgggacagacctagttcaatgaatctgaggaggctactcagtagacagtcccaccctcacacgattctttacctttcacttcatcttgcccttcattattgcagccctagcagcactccacctcctattcttgcacgaaacgggatcaaacaaccccctaggaatcacctcccattccgataaaatcaccttccacccttactacacaatcaaagacgccctcggcttacttctcttccttctctccttaatgacattaacactattctcaccagacctcctaggcgacccagacaattataccctagccaaccccttaaacacccctccccacatcaagcccgaatgatatttcctattcgcctacacaattctccgatccgtccctaacaaactaggaggcgtccttgccctattactatccatcctcatcctagcaataatccccatcctccatatatccaaacaacaaagcataatatttcgcccactaagccaatcactttattgactcctagccgcagacctcctcattctaacctgaatcggaggacaaccagtaagctacccttttaccatcattggacaagtagcatccgtactatacttcacaacaatcctaatcctaataccaactatctccctaattgaaaacaaaatactcaaatgggcctgtccttgtagtataaactaatacaccagtcttgtaaaccggagatgaaaacctttttccaaggacaaatcagagaaaaagtctttaactccaccattagcacccaaagctaagattctaatttaaactattctctgttctttcatggggaagcagatttgggtaccacccaagtattgactcacccatcaacaaccgctatgtatttcgtacattactgccagccaccatgaatattgtacggtaccataaatacttgaccacctgtagtacataaaaacccaatccacatcaaaaccccctccccatgcttacaagcaagtacagcaatcaaccctcaactatcacacatcaactgcaactccaaagccacccctcacccactaggataccaacaaacctacccacccttaacagtacatagtacataaagccatttaccgtacatagcacattacagtcaaatcccttctcgtccccatggatgacccccctcagataggggtcccttgaccaccatcctccgtgaaatcaatatcccgcacaagagtgctactctcctcgctccgggcccataacacttgggggtagctaaagtgaactgtatccgacatctggttcctacttcagggtcataaagcctaaatagcccacacgttccccttaaataagacatcacgatg

SEQ ID NO: 489 - DNA, 16569 bp, Homo sapiens mitochondrial
  3107: "n" refers to a nucleotide at position 3107 of the Cambridge Reference Sequence (CRS, Anderson et al. 1981 Nature 290:457-465), later determined to be absent from the human mtDNA sequence according to the revised CRS (rCRS, Andrews et al. 1999 Nature Genetics 23:147); "n" therefore represents a single nucleotide deletion at a position corresponding to nucleotide 3107 of SEQ ID NO:1 as provided herein.
gatcacaggtctatcaccctattaaccactcacgggagctctccatgcatttggtattttcgtctggggggtatgcacgcgatagcattgcgagacgctggagccggagcaccctatgtcgcagtatctgtctttgattcctgcctcatcctattatttatcgcacctacgttcaatattacaggcgaacatacttactaaagtgtgttaattaattaatgcttgtaggacataataataacaattgaatgtctgcacagccactttccacacagacatcataacaaaaaatttccaccaaaccccccctcccccgcttctggccacagcacttaaacacatctctgccaaaccccaaaaacaaagaaccctaacaccagcctaaccagatttcaaattttatcttttggcggtatgcacttttaacagtcaccccccaactaacacattattttcccctcccactcccatactactaatctcatcaatacaacccccgcccatcctacccagcacacacacaccgctgctaaccccataccccgaaccaaccaaaccccaaagacaccccccacagtttatgtagcttacctcctcaaagcaatacactgaaaatgtttagacgggctcacatcaccccataaacaaataggtttggtcctagcctttctattagctcttagtaagattacacatgcaagcatccccgttccagtgagttcaccctctaaatcaccacgatcaaaagggacaagcatcaagcacgcagcaatgcagctcaaaacgcttagcctagccacacccccacgggaaacagcagtgattaacctttagcaataaacgaaagtttaactaagctatactaaccccagggttggtcaatttcgtgccagccaccgcggtcacacgattaacccaagtcaatagaagccggcgtaaagagtgttttagatcaccccctccccaataaagctaaaactcacctgagttgtaaaaaactccagttgacacaaaatagactacgaaagtggctttaacatatctgaacacacaatagctaagacccaaactgggattagataccccactatgcttagccctaaacctcaacagttaaatcaacaaaactgctcgccagaacactacgagccacagcttaaaactcaaaggacctggcggtgcttcatatccctctagaggagcctgttctgtaatcgataaaccccgatcaacctcaccacctcttgctcagcctatataccgccatcttcagcaaaccctgatgaaggctacaaagtaagcgcaagtacccacgtaaagacgttaggtcaaggtgtagcccatgaggtggcaagaaatgggctacattttctaccccagaaaactacgatagcccttatgaaacttaagggtcgaaggtggatttagcagtaaactgagagtagagtgcttagttgaacagggccctgaagcgcgtacacaccgcccgtcaccctcctcaagtatacttcaaaggacatttaactaaaacccctacgcatttatatagaggagacaagtcgtaacatggtaagtgtactggaaagtgcacttggacgaaccagagtgtagcttaacacaaagcacccaacttacacttaggagatttcaacttaacttgaccgctctgagctaaacctagccccaaacccactccaccttactaccagacaaccttagccaaaccatttacccaaataaagtataggcgatagaaattgaaacctggcgcaatagatatagtaccgcaagggaaagatgaaaaattataaccaagcataatatagcaaggactaacccctataccttctgcataatgaattaactagaaataactttgcaaggagagccaaagctaagacccccgaaaccagacgagctacctaagaacagctaaaagagcacacccgtctatgtagcaaaatagtgggaagatttataggtagaggcgacaaacctaccgagcctggtgatagctggttgtccaagatagaatcttagttcaactttaaatttgcccacagaaccctctaaatccccttgtaaatttaactgttagtccaaagaggaacagctctttggacactaggaaaaaaccttgtagagagagtaaaaaatttaacacccatagtaggcctaaaagcagccaccaattaagaaagcgttcaagctcaacacccactacctaaaaaatcccaaacatataactgaactcctcacacccaattggaccaatctatcaccctatagaagaactaatgttagtataagtaacatgaaaacattctcctccgcataagcctgcgtcagattaaaacactgaactgacaattaacagcccaatatctacaatcaaccaacaagtcattattaccctcactgtcaacccaacacaggcatgctcataaggaaaggttaaaaaaagtaaaaggaactcggcaaatcttaccccgcctgtttaccaaaaacatcacctctagcatcaccagtattagaggcaccgcctgcccagtgacacatgtttaacggccgcggtaccctaaccgtgcaaaggtagcataatcacttgttccttaaatagggacctgtatgaatggctccacgagggttcagctgtctcttacttttaaccagtgaaattgacctgcccgtgaagaggcgggcatgacacagcaagacgagaagaccctatggagctttaatttattaatgcaaacagtacctaacaaacccacaggtcctaaactaccaaacctgcattaaaaatttcggttggggcgacctcggagcagaacccaacctccgagcagtacatgctaagacttcaccagtcaaagcgaactactatactcaattgatccaataacttgaccaacggaacaagttaccctagggataacagcgcaatcctattctagagtccatatcaacaatagggtttacgacctcgatgttggatcaggacatcccgatggtgcagccgctattaaaggttcgtttgttcaacgattaaagtcctacgtgatctgagttcagaccggagtaatccaggtcggtttctatctacnttcaaattcctccctgtacgaaaggacaagagaaataaggcctacttcacaaagcgccttcccccgtaaatgatatcatctcaacttagtattatacccacacccacccaagaacagggtttgttaagatggcagagcccggtaatcgcataaaacttaaaactttacagtcagaggttcaattcctcttcttaacaacatacccatggccaacctcctactcctcattgtacccattctaatcgcaatggcattcctaatgcttaccgaacgaaaaattctaggctatatacaactacgcaaaggccccaacgttgtaggcccctacgggctactacaacccttcgctgacgccataaaactcttcaccaaagagcccctaaaacccgccacatctaccatcaccctctacatcaccgccccgaccttagctctcaccatcgctcttctactatgaacccccctccccatacccaaccccctggtcaacctcaacctaggcctcctatttattctagccacctctagcctagccgtttactcaatcctctgatcagggtgagcatcaaactcaaactacgccctgatcggcgcactgcgagcagtagcccaaacaatctcatatgaagtcaccctagccatcattctactatcaacattactaataagtggctcctttaacctctccacccttatcacaacacaagaacacctctgattactcctgccatcatgacccttggccataatatgatttatctccacactagcagagaccaaccgaacccccttcgaccttgccgaaggggagtccgaactagtctcaggcttcaacatcgaatacgccgcaggccccttcgccctattcttcatagccgaatacacaaacattattataataaacaccctcaccactacaatcttcctaggaacaacatatgacgcactctcccctgaactctacacaacatattttgtcaccaagaccctacttctaacctccctgttcttatgaattcgaacagcatacccccgattccgctacgaccaactcatacacctcctatgaaaaaacttcctaccactcaccctagcattacttatatgatatgtctccatacccattacaatctccagcattccccctcaaacctaagaaatatgtctgataaaagagttactttgatagagtaaataataggagcttaaacccccttatttctaggactatgagaatcgaacccatccctgagaatccaaaattctccgtgccacctatcacaccccatcctaaagtaaggtcagctaaataagctatcgggcccataccccgaaaatgttggttatacccttcccgtactaattaatcccctggcccaacccgtcatctactctaccatctttgcaggcacactcatcacagcgctaagctcgcactgattttttacctgagtaggcctagaaataaacatgctagcttttattccagttctaaccaaaaaaataaaccctcgttccacagaagctgccatcaagtatttcctcacgcaagcaaccgcatccataatccttctaatagctatcctcttcaacaatatactctccggacaatgaaccataaccaatactaccaatcaatactcatcattaataatcataatggctatagcaataaaactaggaatagccccctttcacttctgagtcccagaggttacccaaggcacccctctgacatccggcctgcttcttctcacatgacaaaaactagcccccatctcaatcatataccaaatctctccctcactaaacgtaagccttctcctcactctctcaatcttatccatcatagcaggcagttgaggtggattaaaccaaacccagctacgcaaaatcttagcatactcctcaattacccacataggatgaataatagcagttctaccgtacaaccctaacataaccattcttaatttaactatttatattatcctaactactaccgcattcctactactcaacttaaactccagcaccacgaccctactactatctcgcacctgaaacaagctaacatgactaacacccttaattccatccaccctcctctccctaggaggcctgcccccgctaaccggctttttgcccaaatgggccattatcgaagaattcacaaaaaacaatagcctcatcatccccaccatcatagccaccatcaccctccttaacctctacttctacctacgcctaatctactccacctcaatcacactactccccatatctaacaacgtaaaaataaaatgacagtttgaacatacaaaacccaccccattcctccccacactcatcgcccttaccacgctactcctacctatctccccttttatactaataatcttatagaaatttaggttaaatacagaccaagagccttcaaagccctcagtaagttgcaatacttaatttctgtaacagctaaggactgcaaaaccccactctgcatcaactgaacgcaaatcagccactttaattaagctaagcccttactagaccaatgggacttaaacccacaaacacttagttaacagctaagcaccctaatcaactggcttcaatctacttctcccgccgccgggaaaaaaggcgggagaagccccggcaggtttgaagctgcttcttcgaatttgcaattcaatatgaaaatcacctcggagctggtaaaaagaggcctaacccctgtctttagatttacagtccaatgcttcactcagccattttacctcacccccactgatgttcgccgaccgttgactattctctacaaaccacaaagacattggaacactatacctattattcggcgcatgagctggagtcctaggcacagctctaagcctccttattcgagccgagctgggccagccaggcaaccttctaggtaacgaccacatctacaacgttatcgtcacagcccatgcatttgtaataatcttcttcatagtaatacccatcataatcggaggctttggcaactgactagttcccctaataatcggtgcccccgatatggcgtttccccgcataaacaacataagcttctgactcttacctccctctctcctactcctgctcgcatctgctatagtggaggccggagcaggaacaggttgaacagtctaccctcccttagcagggaactactcccaccctggagcctccgtagacctaaccatcttctccttacacctagcaggtgtctcctctatcttaggggccatcaatttcatcacaacaattatcaatataaaaccccctgccataacccaataccaaacgcccctcttcgtctgatccgtcctaatcacagcagtcctacttctcctatctctcccagtcctagctgctggcatcactatactactaacagaccgcaacctcaacaccaccttcttcgaccccgccggaggaggagaccccattctataccaacacctattctgatttttcggtcaccctgaagtttatattcttatcctaccaggcttcggaataatctcccatattgtaacttactactccggaaaaaaagaaccatttggatacataggtatggtctgagctatgatatcaattggcttcctagggtttatcgtgtgagcacaccatatatttacagtaggaatagacgtagacacacgagcatatttcacctccgctaccataatcatcgctatccccaccggcgtcaaagtatttagctgactcgccacactccacggaagcaatatgaaatgatctgctgcagtgctctgagccctaggattcatctttcttttcaccgtaggtggcctgactggcattgtattagcaaactcatcactagacatcgtactacacgacacgtactacgttgtagctcacttccactatgtcctatcaataggagctgtatttgccatcataggaggcttcattcactgatttcccctattctcaggctacaccctagaccaaacctacgccaaaatccatttcactatcatattcatcggcgtaaatctaactttcttcccacaacactttctcggcctatccggaatgccccgacgttactcggactaccccgatgcatacaccacatgaaacatcctatcatctgtaggctcattcatttctctaacagcagtaatattaataattttcatgatttgagaagccttcgcttcgaagcgaaaagtcctaatagtagaagaaccctccataaacctggagtgactatatggatgccccccaccctaccacacattcgaagaacccgtatacataaaatctagacaaaaaaggaaggaatcgaaccccccaaagctggtttcaagccaaccccatggcctccatgactttttcaaaaaggtattagaaaaaccatttcataactttgtcaaagttaaattataggctaaatcctatatatcttaatggcacatgcagcgcaagtaggtctacaagacgctacttcccctatcatagaagagcttatcacctttcatgatcacgccctcataatcattttccttatctgcttcctagtcctgtatgcccttttcctaacactcacaacaaaactaactaatactaacatctcagacgctcaggaaatagaaaccgtctgaactatcctgcccgccatcatcctagtcctcatcgccctcccatccctacgcatcctttacataacagacgaggtcaacgatccctcccttaccatcaaatcaattggccaccaatggtactgaacctacgagtacaccgactacggcggactaatcttcaactcctacatacttcccccattattcctagaaccaggcgacctgcgactccttgacgttgacaatcgagtagtactcccgattgaagcccccattcgtataataattacatcacaagacgtcttgcactcatgagctgtccccacattaggcttaaaaacagatgcaattcccggacgtctaaaccaaaccactttcaccgctacacgaccgggggtatactacggtcaatgctctgaaatctgtggagcaaaccacagtttcatgcccatcgtcctagaattaattcccctaaaaatctttgaaatagggcccgtatttaccctatagcaccccctctaccccctctagagcccactgtaaagctaacttagcattaaccttttaagttaaagattaagagaaccaacacctctttacagtgaaatgccccaactaaatactaccgtatggcccaccataattacccccatactccttacactattcctcatcacccaactaaaaatattaaacacaaactaccacctacctccctcaccaaagcccataaaaataaaaaattataacaaaccctgagaaccaaaatgaacgaaaatctgttcgcttcattcattgcccccacaatcctaggcctacccgccgcagtactgatcattctatttccccctctattgatccccacctccaaatatctcatcaacaaccgactaatcaccacccaacaatgactaatcaaactaacctcaaaacaaatgataaccatacacaacactaaaggacgaacctgatctcttatactagtatccttaatcatttttattgccacaactaacctcctcggactcctgcctcactcatttacaccaaccacccaactatctataaacctagccatggccatccccttatgagcgggcgcagtgattataggctttcgctctaagattaaaaatgccctagcccacttcttaccacaaggcacacctacaccccttatccccatactagttattatcgaaaccatcagcctactcattcaaccaatagccctggccgtacgcctaaccgctaacattactgcaggccacctactcatgcacctaattggaagcgccaccctagcaatatcaaccattaaccttccctctacacttatcatcttcacaattctaattctactaactatcctagaaatcgctgtcgccttaatccaagcctacgttttcacacttctagtaagcctctacctgcacgacaacacataatgacccaccaatcacatgcctatcatatagtaaaacccagcccatgacccctaacaggggccctctcagccctcctaatgacctccggcctagccatgtgatttcacttccactccataacgctcctcatactaggcctactaaccaacacactaaccatataccaatgatggcgcgatgtaacacgagaaagcacataccaaggccaccacacaccacctgtccaaaaaggccttcgatacgggataatcctatttattacctcagaagtttttttcttcgcaggatttttctgagccttttaccactccagcctagcccctaccccccaattaggagggcactggcccccaacaggcatcaccccgctaaatcccctagaagtcccactcctaaacacatccgtattactcgcatcaggagtatcaatcacctgagctcaccatagtctaatagaaaacaaccgaaaccaaataattcaagcactgcttattacaattttactgggtctctattttaccctcctacaagcctcagagtacttcgagtctcccttcaccatttccgacggcatctacggctcaacattttttgtagccacaggcttccacggacttcacgtcattattggctcaactttcctcactatctgcttcatccgccaactaatatttcactttacatccaaacatcactttggcttcgaagccgccgcctgatactggcattttgtagatgtggtttgactatttctgtatgtctccatctattgatgagggtcttactcttttagtataaatagtaccgttaacttccaattaactagttttgacaacattcaaaaaagagtaataaacttcgccttaattttaataatcaacaccctcctagccttactactaataattattacattttgactaccacaactcaacggctacatagaaaaatccaccccttacgagtgcggcttcgaccctatatcccccgcccgcgtccctttctccataaaattcttcttagtagctattaccttcttattatttgatctagaaattgccctccttttacccctaccatgagccctacaaacaactaacctgccactaatagttatgtcatccctcttattaatcatcatcctagccctaagtctggcctatgagtgactacaaaaaggattagactgaaccgaattggtatatagtttaaacaaaacgaatgatttcgactcattaaattatgataatcatatttaccaaatgcccctcatttacataaatattatactagcatttaccatctcacttctaggaatactagtatatcgctcacacctcatatcctccctactatgcctagaaggaataatactatcgctgttcattatagctactctcataaccctcaacacccactccctcttagccaatattgtgcctattgccatactagtctttgccgcctgcgaagcagcggtgggcctagccctactagtctcaatctccaacacatatggcctagactacgtacataacctaaacctactccaatgctaaaactaatcgtcccaacaattatattactaccactgacatgactttccaaaaaacacataatttgaatcaacacaaccacccacagcctaattattagcatcatccctctactattttttaaccaaatcaacaacaacctatttagctgttccccaaccttttcctccgaccccctaacaacccccctcctaatactaactacctgactcctacccctcacaatcatggcaagccaacgccacttatccagtgaaccactatcacgaaaaaaactctacctctctatactaatctccctacaaatctccttaattataacattcacagccacagaactaatcatattttatatcttcttcgaaaccacacttatccccaccttggctatcatcacccgatgaggcaaccagccagaacgcctgaacgcaggcacatacttcctattctacaccctagtaggctcccttcccctactcatcgcactaatttacactcacaacaccctaggctcactaaacattctactactcactctcactgcccaagaactatcaaactcctgagccaacaacttaatatgactagcttacacaatagcttttatagtaaagatacctctttacggactccacttatgactccctaaagcccatgtcgaagcccccatcgctgggtcaatagtacttgccgcagtactcttaaaactaggcggctatggtataatacgcctcacactcattctcaaccccctgacaaaacacatagcctaccccttccttgtactatccctatgaggcataattataacaagctccatctgcctacgacaaacagacctaaaatcgctcattgcatactcttcaatcagccacatagccctcgtagtaacagccattctcatccaaaccccctgaagcttcaccggcgcagtcattctcataatcgcccacgggcttacatcctcattactattctgcctagcaaactcaaactacgaacgcactcacagtcgcatcataatcctctctcaaggacttcaaactctactcccactaatagctttttgatgacttctagcaagcctcgctaacctcgccttaccccccactattaacctactgggagaactctctgtgctagtaaccacgttctcctgatcaaatatcactctcctacttacaggactcaacatactagtcacagccctatactccctctacatatttaccacaacacaatggggctcactcacccaccacattaacaacataaaaccctcattcacacgagaaaacaccctcatgttcatacacctatcccccattctcctcctatccctcaaccccgacatcattaccgggttttcctcttgtaaatatagtttaaccaaaacatcagattgtgaatctgacaacagaggcttacgaccccttatttaccgagaaagctcacaagaactgctaactcatgcccccatgtctaacaacatggctttctcaacttttaaaggataacagctatccattggtcttaggccccaaaaattttggtgcaactccaaataaaagtaataaccatgcacactactataaccaccctaaccctgacttccctaattccccccatccttaccaccctcgttaaccctaacaaaaaaaactcatacccccattatgtaaaatccattgtcgcatccacctttattatcagtctcttccccacaactatattcatgtgcctagaccaagaagttattatctcgaactgacactgagccacaacccaaacaacccagctctccctaagcttcaaactagactacttctccataatattcatccctgtagcattgttcgttacatggtccatcatagaattctcactgtggtatataaactcagacccaaacattaatcagttcttcaaatatctactcatcttcctaattaccatactaatcttagttaccgctaacaacctattccaactgttcatcggctgagagggcgtaggaattatatccttcttgctcatcagttgatgatacgcccgagcagatgccaacacagcagccattcaagcaatcctatacaaccgtatcggcgatatcggtttcatcctcgccttagcatgatttatcctacactccaactcatgagacccacaacaaatagcccttctaaacgctaatccaagcctcaccccactactaggcctcctcctagcagcagcaggcaaatcagcccaattaggtctccacccctgactcccctcagccatagaaggccccaccccagtctcagccctactccactcaagcactatagttgtagcaggaatcttcttactcatccgcttccaccccctagcagaaaatagcccactaatccaaactctaacactatgcttaggcgctatcaccactctgttcgcagcagtctgcgcccttacacaaaatgacatcaaaaaaatcgtagccttctccacttcaagtcaactaggactcataatagttacaatcggcatcaaccaaccacacctagcattcctgcacatctgtacccacgccttcttcaaagccatactatttatgtgctccgggtccatcatccacaaccttaacaatgaacaagatattcgaaaaataggaggactactcaaaaccatacctctcacttcaacctccctcaccattggcagcctagcattagcaggaatacctttcctcacaggtttctactccaaagaccacatcatcgaaaccgcaaacatatcatacacaaacgcctgagccctatctattactctcatcgctacctccctgacaagcgcctatagcactcgaataattcttctcaccctaacaggtcaacctcgcttccccacccttactaacattaacgaaaataaccccaccctactaaaccccattaaacgcctggcagccggaagcctattcgcaggatttctcattactaacaacatttcccccgcatcccccttccaaacaacaatccccctctacctaaaactcacagccctcgctgtcactttcctaggacttctaacagccctagacctcaactacctaaccaacaaacttaaaataaaatccccactatgcacattttatttctccaacatactcggattctaccctagcatcacacaccgcacaatcccctatctaggccttcttacgagccaaaacctgcccctactcctcctagacctaacctgactagaaaagctattacctaaaacaatttcacagcaccaaatctccacctccatcatcacctcaacccaaaaaggcataattaaactttacttcctctctttcttcttcccactcatcctaaccctactcctaatcacataacctattcccccgagcaatctcaattacaatatatacaccaacaaacaatgttcaaccagtaactactactaatcaacgcccataatcatacaaagcccccgcaccaataggatcctcccgaatcaaccctgacccctctccttcataaattattcagcttcctacactattaaagtttaccacaaccaccaccccatcatactctttcacccacagcaccaatcctacctccatcgctaaccccactaaaacactcaccaagacctcaacccctgacccccatgcctcaggatactcctcaatagccatcgctgtagtatatccaaagacaaccatcattccccctaaataaattaaaaaaactattaaacccatataacctcccccaaaattcagaataataacacacccgaccacaccgctaacaatcaatactaaacccccataaataggagaaggcttagaagaaaaccccacaaaccccattactaaacccacactcaacagaaacaaagcatacatcattattctcgcacggactacaaccacgaccaatgatatgaaaaaccatcgttgtatttcaactacaagaacaccaatgaccccaatacgcaaaactaaccccctaataaaattaattaaccactcattcatcgacctccccaccccatccaacatctccgcatgatgaaacttcggctcactccttggcgcctgcctgatcctccaaatcaccacaggactattcctagccatgcactactcaccagacgcctcaaccgccttttcatcaatcgcccacatcactcgagacgtaaattatggctgaatcatccgctaccttcacgccaatggcgcctcaatattctttatctgcctcttcctacacatcgggcgaggcctatattacggatcatttctctactcagaaacctgaaacatcggcattatcctcctgcttgcaactatagcaacagccttcataggctatgtcctcccgtgaggccaaatatcattctgaggggccacagtaattacaaacttactatccgccatcccatacattgggacagacctagttcaatgaatctgaggaggctactcagtagacagtcccaccctcacacgattctttacctttcacttcatcttgcccttcattattgcagccctagcagcactccacctcctattcttgcacgaaacgggatcaaacaaccccctaggaatcacctcccattccgataaaatcaccttccacccttactacacaatcaaagacgccctcggcttacttctcttccttctctccttaatgacattaacactattctcaccagacctcctaggcgacccagacaattataccctagccaaccccttaaacacccctccccacatcaagcccgaatgatatttcctattcgcctacacaattctccgatccgtccctaacaaactaggaggcgtccttgccctattactatccatcctcatcctagcaataatccccatcctccatatatccaaacaacaaagcataatatttcgcccactaagccaatcactttattgactcctagccgcagacctcctcattctaacctgaatcggaggacaaccagtaagctacccttttaccatcattggacaagtagcatccgtactatacttcacaacaatcctaatcctaataccaactatctccctaattgaaaacaaaatactcaaatgggcctgtccttgtagtataaactaatacaccagtcttgtaaaccggagatgaaaacctttttccaaggacaaatcagagaaaaagtctttaactccaccattagcacccaaagctaagattctaatttaaactattctctgttctttcatggggaagcagatttgggtaccacccaagtattgactcacccatcaacaaccgctatgtatttcgtacattactgccagccaccatgaatattgtacggtaccataaatacttgaccacctgtagtacataaaaacccaatccacatcaaaaccccctccccatgcttacaagcaagtacagcaatcaaccctcaactatcacacatcaactgcaactccaaagccacccctcacccactaggataccaacaaacctacccacccttaacagtacatagtacataaagccatttaccgtacatagcacattacagtcaaatcccttctcgtccccatggatgacccccctcagataggggtcccttgaccaccatcctccgtgaaatcaatatcccgcacaagagtgctactctcctcgctccgggcccataacacttgggggtagctaaagtgaactgtatccgacatctggttcctacttcagggtcataaagcctaaatagcccacacgttccccttaaataagacatcacgatg

SEQ ID NO: 490 - DNA, 16569 bp, Homo sapiens mitochondrial
  3107: "n" refers to a nucleotide at position 3107 of the Cambridge Reference Sequence (CRS, Anderson et al. 1981 Nature 290:457-465), later determined to be absent from the human mtDNA sequence according to the revised CRS (rCRS, Andrews et al. 1999 Nature Genetics 23:147); "n" therefore represents a single nucleotide deletion at a position corresponding to nucleotide 3107 of SEQ ID NO:1 as provided herein.
gatcacaggtctatcaccctattaaccactcacgggagctctccatgcatttggtattttcgtctggggggtatgcacgcgatagcattgcgagacgctggagccggagcaccctatgtcgcagtatctgtctttgattcctgcctcatcctattatttatcgcacctacgttcaatattacaggcgaacatacttactaaagtgtgttaattaattaatgcttgtaggacataataataacaattgaatgtctgcacagccactttccacacagacatcataacaaaaaatttccaccaaaccccccctcccccgcttctggccacagcacttaaacacatctctgccaaaccccaaaaacaaagaaccctaacaccagcctaaccagatttcaaattttatcttttggcggtatgcacttttaacagtcaccccccaactaacacattattttcccctcccactcccatactactaatctcatcaatacaacccccgcccatcctacccagcacacacacaccgctgctaaccccataccccgaaccaaccaaaccccaaagacaccccccacagtttatgtagcttacctcctcaaagcaatacactgaaaatgtttagacgggctcacatcaccccataaacaaataggtttggtcctagcctttctattagctcttagtaagattacacatgcaagcatccccgttccagtgagttcaccctctaaatcaccacgatcaaaagggacaagcatcaagcacgcagcaatgcagctcaaaacgcttagcctagccacacccccacgggaaacagcagtgattaacctttagcaataaacgaaagtttaactaagctatactaaccccagggttggtcaatttcgtgccagccaccgcggtcacacgattaacccaagtcaatagaagccggcgtaaagagtgttttagatcaccccctccccaataaagctaaaactcacctgagttgtaaaaaactccagttgacacaaaatagactacgaaagtggctttaacatatctgaacacacaatagctaagacccaaactgggattagataccccactatgcttagccctaaacctcaacagttaaatcaacaaaactgctcgccagaacactacgagccacagcttaaaactcaaaggacctggcggtgcttcatatccctctagaggagcctgttctgtaatcgataaaccccgatcaacctcaccacctcttgctcagcctatataccgccatcttcagcaaaccctgatgaaggctacaaagtaagcgcaagtacccacgtaaagacgttaggtcaaggtgtagcccatgaggtggcaagaaatgggctacattttctaccccagaaaactacgatagcccttatgaaacttaagggtcgaaggtggatttagcagtaaactgagagtagagtgcttagttgaacagggccctgaagcgcgtacacaccgcccgtcaccctcctcaagtatacttcaaaggacatttaactaaaacccctacgcatttatatagaggagacaagtcgtaacatggtaagtgtactggaaagtgcacttggacgaaccagagtgtagcttaacacaaagcacccaacttacacttaggagatttcaacttaacttgaccgctctgagctaaacctagccccaaacccactccaccttactaccagacaaccttagccaaaccatttacccaaataaagtataggcgatagaaattgaaacctggcgcaatagatatagtaccgcaagggaaagatgaaaaattataaccaagcataatatagcaaggactaacccctataccttctgcataatgaattaactagaaataactttgcaaggagagccaaagctaagacccccgaaaccagacgagctacctaagaacagctaaaagagcacacccgtctatgtagcaaaatagtgggaagatttataggtagaggcgacaaacctaccgagcctggtgatagctggttgtccaagatagaatcttagttcaactttaaatttgcccacagaaccctctaaatccccttgtaaatttaactgttagtccaaagaggaacagctctttggacactaggaaaaaaccttgtagagagagtaaaaaatttaacacccatagtaggcctaaaagcagccaccaattaagaaagcgttcaagctcaacacccactacctaaaaaatcccaaacatataactgaactcctcacacccaattggaccaatctatcaccctatagaagaactaatgttagtataagtaacatgaaaacattctcctccgcataagcctgcgtcagattaaaacactgaactgacaattaacagcccaatatctacaatcaaccaacaagtcattattaccctcactgtcaacccaacacaggcatgctcataaggaaaggttaaaaaaagtaaaaggaactcggcaaatcttaccccgcctgtttaccaaaaacatcacctctagcatcaccagtattagaggcaccgcctgcccagtgacacatgtttaacggccgcggtaccctaaccgtgcaaaggtagcataatcacttgttccttaaatagggacctgtatgaatggctccacgagggttcagctgtctcttacttttaaccagtgaaattgacctgcccgtgaagaggcgggcataacacagcaagacgagaagaccctatggagctttaatttattaatgcaaacagtacctaacaaacccacaggtcctaaactaccaaacctgcattaaaaatttcggttggggcgacctcggagcagaacccaacctccgagcagtacatgctaagacttcaccagtcaaagcgaactactatactcaattgatccaataacttgaccaacggaacaagttaccctagggataacagcgcaatcctattctagagtccatatcaacaatagggtttacgacctcgatgttggatcaggacatcccgatggtgcagccgctattaaaggttcgtttgttcaacgattaaagtcctacgtgatctgagttcagaccggagtaatccaggtcggtttctatctacnttcaaattcctccctgtacgaaaggacaagagaaataaggcctacttcacaaagcgccttcccccgtaaatgatatcatctcaacttagtattatacccacacccacccaagaacagggtttgttaagatggcagagcccggtaatcgcataaaacttaaaactttacagtcagaggttcaattcctcttcttaacaacatacccatggccaacctcctactcctcattgtacccattctaatcgcaatggcattcctaatgcttaccgaacgaaaaattctaggctatatacaactacgcaaaggccccaacgttgtaggcccctacgggctactacaacccttcgctgacgccataaaactcttcaccaaagagcccctaaaacccgccacatctaccatcaccctctacatcaccgccccgaccttagctctcaccatcgctcttctactatgaacccccctccccatacccaaccccctagtcaacctcaacctaggcctcctatttattctagccacctctagcctagccgtttactcaatcctctgatcagggtgagcatcaaactcaaactacgccctgatcggcgcactgcgagcagtagcccaaacaatctcatatgaagtcaccctagccatcattctactatcaacattactaataagtggctcctttaacctctccacccttatcacaacacaagaacacctctgattactcctgccatcatgacccttggccataatatgatttatctccacactagcagagaccaaccgaacccccttcgaccttgccgaaggggagtccgaactagtctcaggcttcaacatcgaatacgccgcaggccccttcgccctattcttcatagccgaatacacaaacattattataataaacaccctcaccactacaatcttcctaggaacaacatatgacgcactctcccctgaactctacacaacatattttgtcaccaagaccctacttctaacctccctgttcttatgaattcgaacagcatacccccgattccgctacgaccaactcatacacctcctatgaaaaaacttcctaccactcaccctagcattacttatatgatatgtctccatacccattacaatctccagcattccccctcaaacctaagaaatatgtctgataaaagagttactttgatagagtaaataataggggcttaaacccccttatttctaggactatgagaatcgaacccatccctgagaatccaaaattctccgtgccacctatcacaccccatcctaaagtaaggtcagctaaataagctatcgggcccataccccgaaaatgttggttatacccttcccgtactaattaatcccctggcccaacccgtcatctactctaccatctttgcaggcacactcatcacagcgctaagctcgcactgattttttacctgagtaggcctagaaataaacatgctagcttttattccagttctaaccaaaaaaataaaccctcgttccacagaagctgccatcaagtatttcctcacgcaagcaaccgcatccataatccttctaatagctatcctcttcaacaatatactctccggacaatgaaccataaccaatactaccaatcaatactcatcattaataatcataatggctatagcaataaaactaggaatagccccctttcacttctgagtcccagaggttacccaaggcacccctctgacatccggcctgcttcttctcacatgacaaaaactagcccccatctcaatcatataccaaatctctccctcactaaacgtaagccttctcctcactctctcaatcttatccatcatagcaggcagttgaggtggattaaaccaaacccagctacgcaaaatcttagcatactcctcaattacccacataggatgaataatagcagttctaccgtacaaccctaacataaccattcttaatttaactatttatattatcctaactactaccgcattcctactactcaacttaaactccagcaccacgaccctactactatctcgcacctgaaacaagctaacatgactaacacccttaattccatccaccctcctctccctaggaggcctgcccccgctaaccggctttttgcccaaatgggccattatcgaagaattcacaaaaaacaatagcctcatcatccccaccatcatagccaccatcaccctccttaacctctacttctacctacgcctaatctactccacctcaatcacactactccccatatctaacaacgtaaaaataaaatgacagtttgaacatacaaaacccaccccattcctccccacactcatcgcccttaccacgctactcctacctatctccccttttatactaataatcttatagaaatttaggttaaatacagaccaagagccttcaaagccctcagtaagttgcaatacttaatttctgtaacagctaaggactgcaaaaccccactctgcatcaactgaacgcaaatcagccactttaattaagctaagcccttactagaccaatgggacttaaacccacaaacacttagttaacagctaagcaccctaatcaactggcttcaatctacttctcccgccgccgggaaaaaaggcgggagaagccccggcaggtttgaagctgcttcttcgaatttgcaattcaatatgaaaatcacctcggagctggtaaaaagaggcctaacccctgtctttagatttacagtccaatgcttcactcagccattttacctcacccccactgatgttcgccgaccgttgactattctctacaaaccacaaagacattggaacactatacctattattcggcgcatgagctggagtcctaggcacagctctaagcctccttattcgagccgagctgggccagccaggcaaccttctaggtaacgaccacatctacaacgttatcgtcacagcccatgcatttgtaataatcttcttcatagtaatacccatcataatcggaggctttggcaactgactagttcccctaataatcggtgcccccgatatggcgtttccccgcataaacaacataagcttctgactcttacctccctctctcctactcctgctcgcatctgctatagtggaggccggagcaggaacaggttgaacagtctaccctcccttagcagggaactactcccaccctggagcctccgtagacctaaccatcttctccttacacctagcaggtgtctcctctatcttaggggccatcaatttcatcacaacaattatcaatataaaaccccctgccataacccaataccaaacgcccctcttcgtctgatccgtcctaatcacagcagtcctacttctcctatctctcccagtcctagctgctggcatcactatactactaacagaccgcaacctcaacaccaccttcttcgaccccgccggaggaggagaccccattctataccaacacctattctgatttttcggtcaccctgaagtttatattcttatcctaccaggcttcggaataatctcccatattgtaacttactactccggaaaaaaagaaccatttggatacataggtatggtctgagctatgatatcaattggcttcctagggtttatcgtgtgagcacaccatatatttacagtaggaatagacgtagacacacgagcatatttcacctccgctaccataatcatcgctatccccaccggcgtcaaagtatttagctgactcgccacactccacggaagcaatatgaaatgatctgctgcagtgctctgagccctaggattcatctttcttttcaccgtaggtggcctgactggcattgtattagcaaactcatcactagacatcgtactacacgacacgtactacgttgtagcccacttccactatgtcctatcaataggagctgtatttgccatcataggaggcttcattcactgatttcccctattctcaggctacaccctagaccaaacctacgccaaaatccatttcactatcatattcatcggcgtaaatctaactttcttcccacaacactttctcggcctatccggaatgccccgacgttactcggactaccccgatgcatacaccacatgaaacatcctatcatctgtaggctcattcatttctctaacagcagtaatattaataattttcatgatttgagaagccttcgcttcgaagcgaaaagtcctaatagtagaagaaccctccataaacctggagtgactatatggatgccccccaccctaccacacattcgaagaacccgtatacataaaatctagacaaaaaaggaaggaatcgaaccccccaaagctggtttcaagccaaccccatggcctccatgactttttcaaaaaggtattagaaaaaccatttcataactttgtcaaagttaaattataggctaaatcctatatatcttaatggcacatgcagcgcaagtaggtctacaagacgctacttcccctatcatagaagagcttatcacctttcatgatcacgccctcataatcattttccttatctgcttcctagtcctgtatgcccttttcctaacactcacaacaaaactaactaatactaacatctcagacgctcaggaaatagaaaccgtctgaactatcctgcccgccatcatcctagtcctcatcgccctcccatccctacgcatcctttacataacagacgaggtcaacgatccctcccttaccatcaaatcaattggccaccaatggtactgaacctacgagtacaccgactacggcggactaatcttcaactcctacatacttcccccattattcctagaaccaggcgacctgcgactccttgacgttgacaatcgagtagtactcccgattgaagcccccattcgtataataattacatcacaagacgtcttgcactcatgagctgtccccacattaggcttaaaaacagatgcaattcccggacgtctaaaccaaaccactttcaccgctacacgaccgggggtatactacggtcaatgctctgaaatctgtggagcaaaccacagtttcatgcccatcgtcctagaattaattcccctaaaaatctttgaaatagggcccgtatttaccctatagcaccccctctaccccctctagagcccactgtaaagctaacttagcattaaccttttaagttaaagattaagagaaccaacacctctttacagtgaaatgccccaactaaatactaccgtatggcccaccataattacccccatactccttacactattcctcatcacccaactaaaaatattaaacacaaactaccacctacctccctcaccaaagcccataaaaataaaaaattataacaaaccctgagaaccaaaatgaacgaaaatctgttcgcttcattcattgcccccacaatcctaggcctacccgccgcagtactgatcattctatttccccctctattgatccccacctccaaatatctcatcaacaaccgactaatcaccacccaacaatgactaatcaaactaacctcaaaacaaatgataaccatacacaacactaaaggacgaacctgatctcttatactagtatccttaatcatttttattgccacaactaacctcctcggactcctgcctcactcatttacaccaaccacccaactatctataaacctagccatggccatccccttatgagcgggcgcagtgattataggctttcgctctaagattaaaaatgccctagcccacttcttaccacaaggcacacctacaccccttatccccatactagttattatcgaaaccatcagcctactcattcaaccaatagccctggccgtacgcctaaccgctaacattactgcaggccacctactcatgcacctaattggaagcgccaccctagcaatatcaaccattaaccttccctctacacttatcatcttcacaattctaattctactgactatcctagaaatcgctgtcgccttaatccaagcctacgttttcacacttctagtaagcctctacctgcacgacaacacataatgacccaccaatcacatgcctatcatatagtaaaacccagcccatgacccctaacaggggccctctcagccctcctaatgacctccggcctagccatgtgatttcacttccactccataacgctcctcatactaggcctactaaccaacacactaaccatataccaatgatggcgcgatgtaacacgagaaagcacataccaaggccaccacacaccacctgtccaaaaaggccttcgatacgggataatcctatttattacctcagaagtttttttcttcgcaggatttttctgagccttttaccactccagcctagcccctaccccccaattaggagggcactggcccccaacaggcatcaccccgctaaatcccctagaagtcccactcctaaacacatccgtattactcgcatcaggagtatcaatcacctgagctcaccatagtctaatagaaaacaaccgaaaccaaataattcaagcactgcttattacaattttactgggtctctattttaccctcctacaagcctcagagtacttcgagtctcccttcaccatttccgacggcatctacggctcaacattttttgtagccacaggcttccacggacttcacgtcattattggctcaactttcctcactatctgcttcatccgccaactaatatttcactttacatccaaacatcactttggcttcgaagccgccgcctgatactggcattttgtagatgtggtttgactatttctgtatgtctccatctattgatgagggtcttactcttttagtataaatagtaccgttaacttccaattaactagttttgacaacattcaaaaaagagtaataaacttcgccttaattttaataatcaacaccctcctagccttactactaataattattacattttgactaccacaactcaacggctacatagaaaaatccaccccttacgagtgcggcttcgaccctatatcccccgcccgcgtccctttctccataaaattcttcttagtagctattaccttcttattatttgatctagaaattgccctccttttacccctaccatgagccctacaaacaactaacctgccactaatagttatgtcatccctcttattaatcatcatcctagccctaagtctggcctatgagtgactacaaaaaggattagactgaaccgaattggtatatagtttaaacaaaacgaatgatttcgactcattaaattatgataatcatatttaccaaatgcccctcatttacataaatattatactagcatttaccatctcacttctaggaatactagtatatcgctcacacctcatatcctccctactatgcctagaaggaataatactatcgctgttcattatagctactctcataaccctcaacacccactccctcttagccaatattgtgcctattgccatactagtctttgccgcctgcgaagcagcggtgggcctagccctactagtctcaatctccaacacatatggcctagactacgtacataacctaaacctactccaatgctaaaactaatcgtcccaacaattatattactaccactgacatgactttccaaaaaacacataatttgaatcaacacaaccacccacagcctaattattagcatcatccctctactattttttaaccaaatcaacaacaacctatttagctgttccccaaccttttcctccgaccccctaacaacccccctcctaatactaactacctgactcctacccctcacaatcatggcaagccaacgccacttatccagtgaaccactatcacgaaaaaaactctacctctctatactaatctccctacaaatctccttaattataacattcacagccacagaactaatcatattttatatcttcttcgaaaccacacttatccccaccttggctatcatcacccgatgaggcaaccagccagaacgcctgaacgcaggcacatacttcctattctacaccctagtaggctcccttcccctactcatcgcactaatttacactcacaacaccctaggctcactaaacattctactactcactctcactgcccaagaactatcaaactcctgagccaacaacttaatatgactagcttacacaatagcttttatagtaaagatacctctttacggactccacttatgactccctaaagcccatgtcgaagcccccatcgctgggtcaatagtacttgccgcagtactcttaaaactaggcggctatggtataatacgcctcacactcattctcaaccccctgacaaaacacatagcctaccccttccttgtactatccctatgaggcataattataacaagctccatctgcctacgacaaacagacctaaaatcgctcattgcatactcttcaatcagccacatagccctcgtagtaacagccattctcatccaaaccccctgaagcttcaccggcgcagtcattctcataatcgcccacgggcttacatcctcattactattctgcctagcaaactcaaactacgaacgcactcacagtcgcatcataatcctctctcaaggacttcaaactctactcccactaatagctttttgatgacttctagcaagcctcgctaacctcgccttaccccccactattaacctactgggagaactctctgtgctagtaaccacgttctcctgatcaaatatcactctcctacttacaggactcaacatactagtcacagccctatactccctctacatatttaccacaacacaatggggctcactcacccaccacattaacaacataaaaccctcattcacacgagaaaacaccctcatgttcatacacctatcccccattctcctcctatccctcaaccccgacatcattaccgggttttcctcttgtaaatatagtttaaccaaaacatcagattgtgaatctgacaacagaggcttacgaccccttatttaccgagaaagctcacaagaactgctaactcatgcccccatgtctaacaacatggctttctcaacttttaaaggataacagctatccattggtcttaggccccaaaaattttggtgcaactccaaataaaagtaataaccatgcacactactataaccaccctaaccctgacttccctaattccccccatccttaccaccctcgttaaccctaacaaaaaaaactcatacccccattatgtaaaatccattgtcgcatccacctttattatcagtctcttccccacaacaatattcatgtgcctagaccaagaagttattatctcgaactgacactgagccacaacccaaacaacccagctctccctaagcttcaaactagactacttctccataatattcatccctgtagcattgttcgttacatggtccatcatagaattctcactgtgatatataaactcagacccaaacattaatcagttcttcaaatatctactcatcttcctaattaccatactaatcttagttaccgctaacaacctattccaactgttcatcggctgagagggcgtaggaattatatccttcttgctcatcagttgatgatacgcccgagcagatgccaacacagcagccattcaagcaatcctatacaaccgtatcggcgatatcggtttcatcctcgccttagcatgatttatcctacactccaactcatgagacccacaacaaatagcccttctaaacgctaatccaagcctcaccccactactaggcctcctcctagcagcagcaggcaaatcagcccaattaggcctccacccctgactcccctcagccatagaaggccccaccccagtctcagccctactccactcaagcactatagttgtagcaggaatcttcttactcatccgcttccaccccctagcagaaaatagcccactaatccaaactctaacactatgcttaggcgctatcaccactctgttcgcagcagtctgcgcccttacacaaaatgacatcaaaaaaatcgtagccttctccacttcaagtcaactaggactcataatagttacaatcggcatcaaccaaccacacctagcattcctgcacatctgtacccacgccttcttcaaagccatactatttatgtgctccgggtccatcatccacaaccttaacaatgaacaagatattcgaaaaataggaggactactcaaaaccatacctctcacttcaacctccctcaccattggcagcctagcattagcaggaatacctttcctcacaggtttctactccaaagaccacatcatcgaaaccgcaaacatatcatacacaaacgcctgagccctatctattactctcatcgctacctccctgacaagcgcctatagcactcgaataattcttctcaccctaacaggtcaacctcgcttccccacccttactaacattaacgaaaataaccccaccctactaaaccccattaaacgcctggcagccggaagcctattcgcaggatttctcattactaacaacatttcccccgcatcccccttccaaacaacaatccccctctacctaaaactcacagccctcgctgtcactttcctaggacttctaacagccctagacctcaactacctaaccaacaaacttaaaataaaatccccactatgcacattttatttctccaacatactcggattctaccctagcatcacacaccgcacaatcccctatctaggccttcttacgagccaaaacctgcccctactcctcctagacctaacctgactagaaaagctattacctaaaacaatttcacagcaccaaatctccacctccatcatcacctcaacccaaaaaggcataattaaactttacttcctctctttcttcttcccactcatcctaaccctactcctaatcacataacctattcccccgagcaatctcaattacaatatatacaccaacaaacaatgttcaaccagtaactactactaatcaacgcccataatcatacaaagcccccgcaccaataggatcctcccgaatcaaccctgacccctctccttcataaattattcagcttcctacactattaaagtttaccacaaccaccaccccatcatactctttcacccacagcaccaatcctacctccatcgctaaccccactaaaacactcaccaagacctcaacccctgacccccatgcctcaggatactcctcaatagccatcgctgtagtatatccaaagacaaccatcattccccctaaataaattaaaaaaactattaaacccatataacctcccccaaaattcagaataataacacacccgaccacaccgctaacaatcaatactaaacccccataaataggagaaggcttagaagaaaaccccacaaaccccattactaaacccacactcaacagaaacaaagcatacatcattattctcgcacggactacaaccacgaccaatgatatgaaaaaccatcgttgtatttcaactacaagaacaccaatgaccccaatacgcaaaactaaccccctaataaaattaattaaccactcattcatcgacctccccaccccatccaacatctccgcatgatgaaacttcggctcactccttggcgcctgcctgatcctccaaatcaccacaggactattcctagccatgcactactcaccagacgcctcaaccgccttttcatcaatcgcccacatcactcgagacgtaaattatggctgaatcatccgctaccttcacgccaatggcgcctcaatattctttatctgcctcttcctacacatcgggcgaggcctatattacggatcatttctctactcagaaacctgaaacatcggcattatcctcctgcttgcaactatagcaacagccttcataggctatgtcctcccgtgaggccaaatatcattctgaggggccacagtaattacaaacttactatccgccatcccatacattgggacagacctagttcaatgaatctgaggaggctactcagtagacagtcccaccctcacacgattctttacctttcacttcatcttgcccttcattattgcagccctagcagcactccacctcctattcttgcacgaaacgggatcaaacaaccccctaggaatcacctcccattccgataaaatcaccttccacccttactacacaatcaaagacgccctcggcttacttctcttccttctctccttaatgacattaacactattctcaccagacctcctaggcgacccagacaattataccctagccaaccccttaaacacccctccccacatcaagcccgaatgatatttcctattcgcctacacaattctccgatccgtccctaacaaactaggaggcgtccttgccctattactatccatcctcatcctagcaataatccccatcctccatatatccaaacaacaaagcataatatttcgcccactaagccaatcactttattgactcctagccgcagacctcctcattctaacctgaatcggaggacaaccagtaagctacccttttaccatcattggacaagtagcatccgtactatacttcacaacaatcctaatcctaataccaactatctccctaattgaaaacaaaatactcaaatgggcctgtccttgtagtataaactaatacaccagtcttgtaaaccggagatgaaaacctttttccaaggacaaatcagagaaaaagtctttaactccaccattagcacccaaagctaagattctaatttaaactattctctgttctttcatggggaagcagatttgggtaccacccaagtattgactcacccatcaacaaccgctatgtatttcgtacattactgccagccaccatgaatattgtacggtaccataaatacttgaccacctgtagtacataaaaacccaatccacatcaaaaccccctccccatgcttacaagcaagtacagcaatcaaccctcaactatcacacatcaactgcaactccaaagccacccctcacccactaggataccaacaaacctacccacccttaacagtacatagtacataaagccatttaccgtacatagcacattacagtcaaatcccttctcgtccccatggatgacccccctcagataggggtcccttgaccaccatcctccgtgaaatcaatatcccgcacaagagtgctactctcctcgctccgggcccataacacttgggggtagctaaagtgaactgtatccgacatctggttcctacttcagggtcataaagcctaaatagcccacacgttccccttaaataagacatcacgatg

SEQ ID NO: 491 - DNA, 16569 bp, Homo sapiens mitochondrial
  3107: "n" refers to a nucleotide at position 3107 of the Cambridge Reference Sequence (CRS, Anderson et al. 1981 Nature 290:457-465), later determined to be absent from the human mtDNA sequence according to the revised CRS (rCRS, Andrews et al. 1999 Nature Genetics 23:147); "n" therefore represents a single nucleotide deletion at a position corresponding to nucleotide 3107 of SEQ ID NO:1 as provided herein.
gatcacaggtctatcaccctattaaccactcacgggagctctccatgcatttggtattttcgtctggggggtatgcacgcgatagcattgcgagacgctggagccggagcaccctatgtcgcagtatctgtctttgattcctgcctcatcctattatttatcgcacctacgttcaatattacaggcgaacatacttactaaagtgtgttaattaattaatgcttgtaggacataataataacaattgaatgtctgcacagccactttccacacagacatcataacaaaaaatttccaccaaaccccccctcccccgcttctggccacagcacttaaacacatctctgccaaaccccaaaaacaaagaaccctaacaccagcctaaccagatttcaaattttatcttttggcggtatgcacttttaacagtcaccccccaactaacacattattttcccctcccactcccatactactaatctcatcaatacaacccccgcccatcctacccagcacacacacaccgctgctaaccccataccccgaaccaaccaaaccccaaagacaccccccacagtttatgtagcttacctcctcaaagcaatacactgaaaatgtttagacgggctcacatcaccccataaacaaataggtttggtcctagcctttctattagctcttagtaagattacacatgcaagcatccccgttccagtgagttcaccctctaaatcaccacgatcaaaagggacaagcatcaagcacgcagcaatgcagctcaaaacgcttagcctagccacacccccacgggaaacagcagtgattaacctttagcaataaacgaaagtttaactaagctatactaaccccagggttggtcaatttcgtgccagccaccgcggtcacacgattaacccaagtcaatagaagccggcgtaaagagtgttttagatcaccccctccccaataaagctaaaactcacctgagttgtaaaaaactccagttgacacaaaatagactacgaaagtggctttaacatatctgaacacacaatagctaagacccaaactgggattagataccccactatgcttagccctaaacctcaacagttaaatcaacaaaactgctcgccagaacactacgagccacagcttaaaactcaaaggacctggcggtgcttcatatccctctagaggagcctgttctgtaatcgataaaccccgatcaacctcaccacctcttgctcagcctatataccgccatcttcagcaaaccctgatgaaggctacaaagtaagcgcaagtacccacgtaaagacgttaggtcaaggtgtagcccatgaggtggcaagaaatgggctacattttctaccccagaaaactacgatagcccttatgaaacttaagggtcgaaggtggatttagcagtaaactgagagtagagtgcttagttgaacagggccctgaagcgcgtacacaccgcccgtcaccctcctcaagtatacttcaaaggacatttaactaaaacccctacgcatttatatagaggagacaagtcgtaacatggtaagtgtactggaaagtgcacttggacgaaccagagtgtagcttaacacaaagcacccaacttacacttaggagatttcaacttaacttgaccgctctgagctaaacctagccccaaacccactccaccttactaccagacaaccttagccaaaccatttacccaaataaagtataggcgatagaaattgaaacctggcgcaatagatatagtaccgcaagggaaagatgaaaaattataaccaagcataatatagcaaggactaacccctataccttctgcataatgaattaactagaaataactttgcaaggagagccaaagctaagacccccgaaaccagacgagctacctaagaacagctaaaagagcacacccgtctatgtagcaaaatagtgggaagatttataggtagaggcgacaaacctaccgagcctggtgatagctggttgtccaagatagaatcttagttcaactttaaatttgcccacagaaccctctaaatccccttgtaaatttaactgttagtccaaagaggaacagctctttggacactaggaaaaaaccttgtagagagagtaaaaaatttaacacccatagtaggcctaaaagcagccaccaattaagaaagcgttcaagctcaacacccactacctaaaaaatcccaaacatataactgaactcctcacacccaattggaccaatctatcaccctatagaagaactaatgttagtataagtaacatgaaaacattctcctccgcataagcctgcgtcagattaaaacactgaactgacaattaacagcccaatatctacaatcaaccaacaagtcattattaccctcactgtcaacccaacacaggcatgctcataaggaaaggttaaaaaaagtaaaaggaactcggcaaatcttaccccgcctgtttaccaaaaacatcacctctagcatcaccagtattagaggcaccgcctgcccagtgacacatgtttaacggccgcggtaccctaaccgtgcaaaggtagcataatcacttgttccttaaatagggacctgtatgaatggctccacgagggttcagctgtctcttacttttaaccagtgaaattgacctgcccgtgaagaggcgggcataacacagcaagacgagaagaccctatggagctttaatttattaatgcaaacagtacctaacaaacccacaggtcctaaactaccaaacctgcattaaaaatttcggttggggcgacctcggagcagaacccaacctccgagcagtacatgctaagacttcaccagtcaaagcgaactactatactcaattgatccaataacttgaccaacggaacaagttaccctagggataacagcgcaatcctattctagagtccatatcaacaatagggtttacgacctcgatgttggatcaggacatcccgatggtgcagccgctattaaaggttcgtttgttcaacgattaaagtcctacgtgatctgagttcagaccggagtaatccaggtcggtttctatctacnttcaaattcctccctgtacgaaaggacaagagaaataaggcctacttcacaaagcgccttcccccgtaaatgatatcatctcaacttagtattatacccacacccacccaagaacagggtttgttaagatggcagagcccggtaatcgcataaaacttaaaactttacagtcagaggttcaattcctcttcttaacaacatacccatggccaacctcctactcctcattgtacccattctaatcgcaatggcattcctaatgcttaccgaacgaaaaattctaggctatatacaactacgcaaaggccccaacgttgtaggcccctacgggctactacaacccttcgctgacgccataaaactcttcaccaaagagcccctaaaacccgccacatctaccatcaccctctacatcaccgccccgaccttagctctcaccatcgctcttctactatgaacccccctccccatacccaaccccctggtcaacctcaacctaggcctcctatttattctagccacctctagcctagccgtttactcaatcctctgatcagggtgagcatcaaactcaaactacgccctgatcggcgcactgcgagcagtagcccaaacaatctcatatgaagtcaccctagccatcattctactatcaacattactaataagtggctcctttaacctctccacccttatcacaacacaagaacacctctgattactcctgccatcatgacccttggccataatatgatttatctccacactagcagagaccaaccgaacccccttcgaccttgccgaaggggagtccgaactagtctcaggcttcaacatcgaatacgccgcaggccccttcgccctattcttcatagccgaatacacaaacattattataataaacaccctcaccactacaatcttcctaggaacaacatatgacgcactctcccctgaactctacacaacatattttgtcaccaagaccctacttctaacctccctgttcttatgaattcgaacagcatacccccgattccgctacgaccaactcatacacctcctatgaaaaaacttcctaccactcaccctagcattacttatatgatatgtctccatacccattacaatctccagcattccccctcaaacctaagaaatatgtctgataaaagagttactttgatagagtaaataataggagcttaaacccccttatttctaggactatgagaatcgaacccatccctgagaatccaaaattctccgtgccacctatcacaccccatcctaaagtaaggtcagctaaataagctatcgggcccataccccgaaaatgttggttatacccttcccgtactaattaatcccctggcccaacccgtcatctactctaccatctttgcaggcacactcatcacagcgctaagctcgcactgattttttacctgagtaggcctagaaataaacatgctagcttttattccagttctaaccaaaaaaataaaccctcgttccacagaagctgccatcaagtatttcctcacgcaagcaaccgcatccataatccttctaatagctatcctcttcaacaatatactctccggacaatgaaccataaccaatactaccaatcaatactcatcattaataatcataatggctatagcaataaaactaggaatagccccctttcacttctgagtcccagaggttacccaaggcacccctctgacatccggcctgcttcttctcacatgacaaaaactagcccccatctcaatcatataccaaatctctccctcactaaacgtaagccttctcctcactctctcaatcttatccatcatagcaggcagttgaggtggattaaaccaaacccagctacgcaaaatcttagcatactcctcaattacccacataggatgaataatagcagttctaccgtacaaccctaacataaccattcttaatttaactatttatattatcctaactactaccgcattcctactactcaacttaaactccagcaccacgaccctactactatctcgcacctgaaacaagctaacatgactaacacccttaattccatccaccctcctctccctaggaggcctgcccccgctaaccggctttttgcccaaatgggccattatcgaagaattcacaaaaaacaatagcctcatcatccccaccatcatagccaccatcaccctccttaacctctacttctacctacgcctaatctactccacctcaatcacactactccccatatctaacaacgtaaaaataaaatgacagtttgaacatacaaaacccaccccattcctccccacactcatcgcccttaccacactactcctacctatctccccttttatactaataatcttatagaaatttaggttaaatacagaccaagagccttcaaagccctcagtaagttgcaatacttaatttctgtaacagctaaggactgcaaaaccccactctgcatcaactgaacgcaaatcagccactttaattaagctaagcccttactagaccaatgggacttaaacccacaaacacttagttaacagctaagcaccctaatcaactggcttcaatctacttctcccgccgccgggaaaaaaggcgggagaagccccggcaggtttgaagctgcttcttcgaatttgcaattcaatatgaaaatcacctcggagctggtaaaaagaggcctaacccctgtctttagatttacagtccaatgcttcactcagccattttacctcacccccactgatgttcgccgaccgttgactattctctacaaaccacaaagacattggaacactatacctattattcggcgcatgagctggagtcctaggcacagctctaagcctccttattcgagccgagctgggccagccaggcaaccttctaggtaacgaccacatctacaacgttatcgtcacagcccatgcatttgtaataatcttcttcatagtaatacccatcataatcggaggctttggcaactgactagttcccctaataatcggtgcccccgatatggcgtttccccgcataaacaacataagcttctgactcttacctccctctctcctactcctgctcgcatctgctatagtggaggccggagcaggaacaggttgaacagtctaccctcccttagcagggaactactcccaccctggagcctccgtagacctaaccatcttctccttacacctagcaggtgtctcctctatcttaggggccatcaatttcatcacaacaattatcaatataaaaccccctgccataacccaataccaaacgcccctcttcgtctgatccgtcctaatcacagcagtcctacttctcctatctctcccagtcctagctgctggcatcactatactactaacagaccgcaacctcaacaccaccttcttcgaccccgccggaggaggagaccccattctataccaacacctattctgatttttcggtcaccctgaagtttatattcttatcctaccaggcttcggaataatctcccatattgtaacttactactccggaaaaaaagaaccatttggatacataggtatggtctgagctatgatatcaattggcttcctagggtttatcgtgtgagcacaccatatatttacagtaggaatagacgtagacacacgagcatatttcacctccgctaccataatcatcgctatccccaccggcgtcaaagtatttagctgactcgccacactccacggaagcaatatgaaatgatctgctgcagtgctctgagccctaggattcatctttcttttcaccgtaggtggcctgactggcattgtattagcaaactcatcactagacatcgtactacacgacacgtactacgttgtagcccacttccactatgtcctatcaataggagctgtatttgccatcataggaggcttcattcactgatttcccctattctcaggctacaccctagaccaaacctacgccaaaatccatttcactatcatattcatcggcgtaaatctaactttcttcccacaacactttctcggcctatccggaatgccccgacgttactcggactaccccgatgcatacaccacatgaaacatcctatcatctgtaggctcattcatttctctaacagcagtaatattaataattttcatgatttgagaagccttcgcttcgaagcgaaaagtcctaatagtagaagaaccctccataaacctggagtgactatatggatgccccccaccctaccacacattcgaagaacccgtatacataaaatctagacaaaaaaggaaggaatcgaaccccccaaagctggtttcaagccaaccccatggcctccatgactttttcaaaaaggtattagaaaaaccatttcataactttgtcaaagttaaattataggctaaatcctatatatcttaatggcacatgcagcgcaagtaggtctacaagacgctacttcccctatcatagaagagcttatcacctttcatgatcacgccctcataatcattttccttatctgcttcctagtcctgtatgcccttttcctaacactcacaacaaaactaactaatactaacatctcagacgctcaggaaatagaaaccgtctgaactatcctgcccgccatcatcctagtcctcatcgccctcccatccctacgcatcctttacataacagacgaggtcaacgatccctcccttaccatcaaatcaattggccaccaatggtactgaacctacgagtacaccgactacggcggactaatcttcaactcctacatacttcccccattattcctagaaccaggcgacctgcgactccttgacgttgacaatcgagtagtactcccgattgaagcccccattcgtataataattacatcacaagacgtcttgcactcatgagctgtccccacattaggcttaaaaacagatgcaattcccggacgtctaaaccaaaccactttcaccgctacacgaccgggggtatactacggtcaatgctctgaaatctgtggagcaaaccacagtttcatgcccatcgtcctagaattaattcccctaaaaatctttgaaatagggcccgtatttaccctatagcaccccctctaccccctctagagcccactgtaaagctaacttagcattaaccttttaagttaaagattaagagaaccaacacctctttacagtgaaatgccccaactaaatactaccgtatggcccaccataattacccccatactccttacactattcctcatcacccaactaaaaatattaaacacaaactaccacctacctccctcaccaaagcccataaaaataaaaaattataacaaaccctgagaaccaaaatgaacgaaaatctgttcgcttcattcattgcccccacaatcctaggcctacccgccgcagtactgatcattctatttccccctctattgatccccacctccaaatatctcatcaacaaccgactaatcaccacccaacaatgactaatcaaactaacctcaaaacaaatgataaccatacacaacactaaaggacgaacctgatctcttatactagtatccttaatcatttttattgccacaactaacctcctcggactcctgcctcactcatttacaccaaccacccaactatctataaacctagccatggccatccccttatgagcgggcgcagtgattataggctttcgctctaagattaaaaatgccctagcccacttcttaccacaaggcacacctacaccccttatccccatactagttattatcgaaaccatcagcctactcattcaaccaatagccctggccgtacgcctaaccgctaacattactgcaggccacctactcatgcacctaattggaagcgccaccctagcaatatcaaccattaaccttccctctacacttatcatcttcacaattctaattctactgactatcctagaaatcgctgtcgccttaatccaagcctacgttttcacacttctagtaagcctctacctgcacgacaacacataatgacccaccaatcacatgcctatcatatagtaaaacccagcccatgacccctaacaggggccctctcagccctcctaatgacctccggcctagccatgtgatttcacttccactccataacgctcctcatactaggcctactaaccaacacactaaccatataccaatgatggcgcgatgtaacacgagaaagcacataccaaggccaccacacaccacctgtccaaaaaggccttcgatacgggataatcctatttattacctcagaagtttttttcttcgcaggatttttctgagccttttaccactccagcctagcccctaccccccaattaggagggcactggcccccaacaggcatcaccccgctaaatcccctagaagtcccactcctaaacacatccgtattactcgcatcaggagtatcaatcacctgagctcaccatagtctaatagaaaacaaccgaaaccaaataattcaagcactgcttattacaattttactgggtctctattttaccctcctacaagcctcagagtacttcgagtctcccttcaccatttccgacggcatctacggctcaacattttttgtagccacaggcttccacggacttcacgtcattattggctcaactttcctcactatctgcttcatccgccaactaatatttcactttacatccaaacatcactttggcttcgaagccgccgcctgatactggcattttgtagatgtggtttgactatttctgtatgtctccatctattgatgagggtcttactcttttagtataaatagtaccgttaacttccaattaactagttttgacaacattcaaaaaagagtaataaacttcgccttaattttaataatcaacaccctcctagccttactactaataattattacattttgactaccacaactcaacggctacatagaaaaatccaccccttacgagtgcggcttcgaccctatatcccccgcccgcgtccctttctccataaaattcttcttagtagctattaccttcttattatttgatctagaaattgccctccttttacccctaccatgagccctacaaacaactaacctgccactaatagttatgtcatccctcttattaatcatcatcctagccctaagtctggcctatgagtgactacaaaaaggattagactgaaccgaattggtatatagtttaaacaaaacgaatgatttcgactcattaaattatgataatcatatttaccaaatgcccctcatttacataaatattatactagcatttaccatctcacttctaggaatactagtatatcgctcacacctcatatcctccctactatgcctagaaggaataatactatcgctgttcattatagctactctcataaccctcaacacccactccctcttagccaatattgtgcctattgccatactagtctttgccgcctgcgaagcagcggtgggcctagccctactagtctcaatctccaacacatatggcctagactacgtacataacctaaacctactccaatgctaaaactaatcgtcccaacaattatattactaccactgacatgactttccaaaaaacacataatttgaatcaacacaaccacccacagcctaattattagcatcatccctctactattttttaaccaaatcaacaacaacctatttagctgttccccaaccttttcctccgaccccctaacaacccccctcctaatactaactacctgactcctacccctcacaatcatggcaagccaacgccacttatccagtgaaccactatcacgaaaaaaactctacctctctatactaatctccctacaaatctccttaattataacattcacagccacagaactaatcatattttatatcttcttcgaaaccacacttatccccaccttggctatcatcacccgatgaggcaaccagccagaacgcctgaacgcaggcacatacttcctattctacaccctagtaggctcccttcccctactcatcgcactaatttacactcacaacaccctaggctcactaaacattctactactcactctcactgcccaagaactatcaaactcctgagccaacaacttaatatgactagcttacacaatagcttttatagtaaagatacctctttacggactccacttatgactccctaaagcccatgtcgaagcccccatcgctgggtcaatagtacttgccgcagtactcttaaaactaggcggctatggtataatacgcctcacactcattctcaaccccctgacaaaacacatagcctaccccttccttgtactatccctatgaggcataattataacaagctccatctgcctacgacaaacagacctaaaatcgctcattgcatactcttcaatcagccacatagccctcgtagtaacagccattctcatccaaaccccctgaagcttcaccggcgcagtcattctcataatcgcccacgggcttacatcctcattactattctgcctagcaaactcaaactacgaacgcactcacagtcgcatcataatcctctctcaaggacttcaaactctactcccactaatagctttttgatgacttctagcaagcctcgctaacctcgccttaccccccactattaacctactgggagaactctctgtgctagtaaccacgttctcctgatcaaatatcactctcctacttacaggactcaacatactagtcacagccctatactccctctacatatttaccacaacacaatggggctcactcacccaccacattaacaacataaaaccctcattcacacgagaaaacaccctcatgttcatacacctatcccccattctcctcctatccctcaaccccgacatcattaccgggttttcctcttgtaaatatagtttaaccaaaacatcagattgtgaatctgacaacagaggcttacgaccccttatttaccgagaaagctcacaagaactgctaactcatgcccccatgtctaacaacatggctttctcaacttttaaaggataacagctatccattggtcttaggccccaaaaattttggtgcaactccaaataaaagtaataaccatgcacactactataaccaccctaaccctgacttccctaattccccccatccttaccaccctcgttaaccctaacaaaaaaaactcatacccccattatgtaaaatccattgtcgcatccacctttattatcagtctcttccccacaacaatattcatgtgcctagaccaagaagttattatctcgaactgacactgagccacaacccaaacaacccagctctccctaagcttcaaactagactacttctccataatattcatccctgtagcattgttcgttacatggtccatcatagaattctcactgtgatatataaactcagacccaaacattaatcagttcttcaaatatctactcatcttcctaattaccatactaatcttagttaccgctaacaacctattccaactgttcatcggctgagagggcgtaggaattatatccttcttgctcatcagttgatgatacgcccgagcagatgccaacacagcagccattcaagcaatcctatacaaccgtatcggcgatatcggtttcatcctcgccttagcatgatttatcctacactccaactcatgagacccacaacaaatagcccttctaaacgctaatccaagcctcaccccactactaggcctcctcctagcagcagcaggcaaatcagcccaattaggtctccacccctgactcccctcagccatagaaggccccaccccagtctcagccctactccactcaagcactatagttgtagcaggaatcttcttactcatccgcttccaccccctagcagaaaatagcccactaatccaaactctaacactatgcttaggcgctatcaccactctgttcgcagcagtctgcgcccttacacaaaatgacatcaaaaaaatcgtagccttctccacttcaagtcaactaggactcataatagttacaatcggcatcaaccaaccacacctagcattcctgcacatctgtacccacgccttcttcaaagccatactatttatgtgctccgggtccatcatccacaaccttaacaatgaacaagatattcgaaaaataggaggactactcaaaaccatacctctcacttcaacctccctcaccattggcagcctagcattagcaggaatacctttcctcacaggtttctactccaaagaccacatcatcgaaaccgcaaacatatcatacacaaacgcctgagccctatctattactctcatcgctacctccctgacaagcgcctatagcactcgaataattcttctcaccctaacaggtcaacctcgcttccccacccttactaacattaacgaaaataaccccaccctactaaaccccattaaacgcctggcagccggaagcctattcgcaggatttctcattactaacaacatttcccccgcatcccccttccaaacaacaatccccctctacctaaaactcacagccctcgctgtcactttcctaggacttctaacagccctagacctcaactacctaaccaacaaacttaaaataaaatccccactatgcacattttatttctccaacatactcggattctaccctagcatcacacaccgcacaatcccctatctaggccttcttacgagccaaaacctgcccctactcctcctagacctaacctgactagaaaagctattacctaaaacaatttcacagcaccaaatctccacctccatcatcacctcaacccaaaaaggcataattaaactttacttcctctctttcttcttcccactcatcctaaccctactcctaatcacataacctattcccccgagcaatctcaattacaatatatacaccaacaaacaatgttcaaccagtaactactactaatcaacgcccataatcatacaaagcccccgcaccaataggatcctcccgaatcaaccctgacccctctccttcataaattattcagcttcctacactattaaagtttaccacaaccaccaccccatcatactctttcacccacagcaccaatcctacctccatcgctaaccccactaaaacactcaccaagacctcaacccctgacccccatgcctcaggatactcctcaatagccatcgctgtagtatatccaaagacaaccatcattccccctaagtaaattaaaaaaactattaaacccatataacctcccccaaaattcagaataataacacacccgaccacaccgctaacaatcaatactaaacccccataaataggagaaggcttagaagaaaaccccacaaaccccattactaaacccacactcaacagaaacaaagcatacatcattattctcgcacggactacaaccacgaccaatgatatgaaaaaccatcgttgtatttcaactacaagaacaccaatgaccccaatacgcaaaactaaccccctaataaaattaattaaccactcattcatcgacctccccaccccatccaacatctccgcatgatgaaacttcggctcactccttggcgcctgcctgatcctccaaatcaccacaggactattcctagccatgcactactcaccagacgcctcaaccgccttttcatcaatcgcccacatcactcgagacgtaaattatggctgaatcatccgctaccttcacgccaatggcgcctcaatattctttatctgcctcttcctacacatcgggcgaggcctatattacggatcatttctctactcagaaacctgaaacatcggcattatcctcctgcttgcaactatagcaacagccttcataggctatgtcctcccgtgaggccaaatatcattctgaggggccacagtaattacaaacttactatccgccatcccatacattgggacagacctagttcaatgaatctgaggaggctactcagtagacagtcccaccctcacacgattctttacctttcacttcatcttgcccttcattattgcagccctagcagcactccacctcctattcttgcacgaaacgggatcaaacaaccccctaggaatcacctcccattccgataaaatcaccttccacccttactacacaatcaaagacgccctcggcttacttctcttccttctctccttaatgacattaacactattctcaccagacctcctaggcgacccagacaattataccctagccaaccccttaaacacccctccccacatcaagcccgaatgatatttcctattcgcctacacaattctccgatccgtccctaacaaactaggaggcgtccttgccctattactatccatcctcatcctagcaataatccccatcctccatatatccaaacaacaaagcataatatttcgcccactaagccaatcactttattgactcctagccgcagacctcctcattctaacctgaatcggaggacaaccagtaagctacccttttaccatcattggacaagtagcatccgtactatacttcacaacaatcctaatcctaataccaactatctccctaattgaaaacaaaatactcaaatgggcctgtccttgtagtataaactaatacaccagtcttgtaaaccggagatgaaaacctttttccaaggacaaatcagagaaaaagtctttaactccaccattagcacccaaagctaagattctaatttaaactattctctgttctttcatggggaagcagatttgggtaccacccaagtattgactcacccatcaacaaccgctatgtatttcgtacattactgccagccaccatgaatattgtacggtaccataaatacttgaccacctgtagtacataaaaacccaatccacatcaaaaccccctccccatgcttacaagcaagtacagcaatcaaccctcaactatcacacatcaactgcaactccaaagccacccctcacccactaggataccaacaaacctacccacccttaacagtacatagtacataaagccatttaccgtacatagcacattacagtcaaatcccttctcgtccccatggatgacccccctcagataggggtcccttgaccaccatcctccgtgaaatcaatatcccgcacaagagtgctactctcctcgctccgggcccataacacttgggggtagctaaagtgaactgtatccgacatctggttcctacttcagggtcataaagcctaaatagcccacacgttccccttaaataagacatcacgatg

SEQ ID NO: 492 - DNA, 16569 bp, Homo sapiens mitochondrial
  3107: "n" refers to a nucleotide at position 3107 of the Cambridge Reference Sequence (CRS, Anderson et al. 1981 Nature 290:457-465), later determined to be absent from the human mtDNA sequence according to the revised CRS (rCRS, Andrews et al. 1999 Nature Genetics 23:147); "n" therefore represents a single nucleotide deletion at a position corresponding to nucleotide 3107 of SEQ ID NO:1 as provided herein.
gatcacaggtctatcaccctattaaccactcacgggagctctccatgcatttggtattttcgtctggggggtatgcacgcgatagcattgcgagacgctggagccggagcaccctatgtcgcagtatctgtctttgattcctgcctcatcctattatttatcgcacctacgttcaatattacaggcgaacatacttactaaagtgtgttaattaattaatgcttgtaggacataataataacaattgaatgtctgcacagccactttccacacagacatcataacaaaaaatttccaccaaaccccccctcccccgcttctggccacagcacttaaacacatctctgccaaaccccaaaaacaaagaaccctaacaccagcctaaccagatttcaaattttatcttttggcggtatgcacttttaacagtcaccccccaactaacacattattttcccctcccactcccatactactaatctcatcaatacaacccccgcccatcctacccagcacacacacaccgctgctaaccccataccccgaaccaaccaaaccccaaagacaccccccacagtttatgtagcttacctcctcaaagcaatacactgaaaatgtttagacgggctcacatcaccccataaacaaataggtttggtcctagcctttctattagctcttagtaagattacacatgcaagcatccccgttccagtgagttcaccctctaaatcaccacgatcaaaagggacaagcatcaagcacgcagcaatgcagctcaaaacgcttagcctagccacacccccacgggaaacagcagtgattaacctttagcaataaacgaaagtttaactaagctatactaaccccagggttggtcaatttcgtgccagccaccgcggtcacacgattaacccaagtcaatagaagccggcgtaaagagtgttttagatcaccccctccccaataaagctaaaactcacctgagttgtaaaaaactccagttgacacaaaatagactacgaaagtggctttaacatatctgaacacacaatagctaagacccaaactgggattagataccccactatgcttagccctaaacctcaacagttaaatcaacaaaactgctcgccagaacactacgagccacagcttaaaactcaaaggacctggcggtgcttcatatccctctagaggagcctgttctgtaatcgataaaccccgatcaacctcaccacctcttgctcagcctatataccgccatcttcagcaaaccctgatgaaggctacaaagtaagcgcaagtacccacgtaaagacgttaggtcaaggtgtagcccatgaggtggcaagaaatgggctacattttctaccccagaaaactacgatagcccttatgaaacttaagggtcgaaggtggatttagcagtaaactgagagtagagtgcttagttgaacagggccctgaagcgcgtacacaccgcccgtcaccctcctcaagtatacttcaaaggacatttaactaaaacccctacgcatttatatagaggagacaagtcgtaacatggtaagtgtactggaaagtgcacttggacgaaccagagtgtagcttaacacaaagcacccaacttacacttaggagatttcaacttaacttgaccgctctgagctaaacctagccccaaacccactccaccttactaccagacaaccttaaccaaaccatttacccaaataaagtataggcgatagaaattgaaacctggcgcaatagatatagtaccgcaagggaaagatgaaaaattataaccaagcataatatagcaaggactaacccctataccttctgcataatgaattaactagaaataactttgcaaggagagccaaagctaagacccccgaaaccagacgagctacctaagaacagctaaaagagcacacccgtctatgtagcaaaatagtgggaagatttataggtagaggcgacaaacctaccgagcctggtgatagctggttgtccaagatagaatcttagttcaactttaaatttgcccacagaaccctctaaatccccttgtaaatttaactgttagtccaaagaggaacagctctttggacactaggaaaaaaccttgtagagagagtaaaaaatttaacacccatagtaggcctaaaagcagccaccaattaagaaagcgttcaagctcaacacccactacctaaaaaatcccaaacatataactgaactcctcacacccaattggaccaatctatcaccctatagaagaactaatgttagtataagtaacatgaaaacattctcctccgcataagcctgcgtcagattaaaacactgaactgacaattaacagcccaatatctacaatcaaccaacaagtcattattaccctcactgtcaacccaacacaggcatgctcataaggaaaggttaaaaaaagtaaaaggaactcggcaaatcttaccccgcctgtttaccaaaaacatcacctctagcatcaccagtattagaggcaccgcctgcccagtgacacatgtttaacggccgcggtaccctaaccgtgcaaaggtagcataatcacttgttccttaaatagggacctgtatgaatggctccacgagggttcagctgtctcttacttttaaccagtgaaattgacctgcccgtgaagaggcgggcatgacacagcaagacgagaagaccctatggagctttaatttattaatgcaaacagtacctaacaaacccacaggtcctaaactaccaaacctgcattaaaaatttcggttggggcgacctcggagcagaacccaacctccgagcagtacatgctaagacttcaccagtcaaagcgaactactatactcaattgatccaataacttgaccaacggaacaagttaccctagggataacagcgcaatcctattctagagtccatatcaacaatagggtttacgacctcgatgttggatcaggacatcccgatggtgcagccgctattaaaggttcgtttgttcaacgattaaagtcctacgtgatctgagttcagaccggagtaatccaggtcggtttctatctacnttcaaattcctccctgtacgaaaggacaagagaaataaggcctacttcacaaagcgccttcccccgtaaatgatatcatctcaacttagtattatacccacacccacccaagaacagggtttgttaagatggcagagcccggtaatcgcataaaacttaaaactttacagtcagaggttcaattcctcttcttaacaacatacccatggccaacctcctactcctcattgtacccattctaatcgcaatggcattcctaatgcttaccgaacgaaaaattctaggctatatacaactacgcaaaggccccaacgttgtaggcccctacgggctactacaacccttcgctgacgccataaaactcttcaccaaagagcccctaaaacccgccacatctaccatcaccctctacatcaccgccccgaccttagctctcaccatcgctcttctactatgaacccccctccccatacccaaccccctggtcaacctcaacctaggcctcctatttattctagccacctctagcctagccgtttactcaatcctctgatcagggtgagcatcaaactcaaactacgccctgatcggcgcactgcgagcagtagcccaaacaatctcatatgaagtcaccctagccatcattctactatcaacattactaataagtggctcctttaacctctccacccttatcacaacacaagaacacctctgattactcctgccatcatgacccttggccataatatgatttatctccacactagcagagaccaaccgaacccccttcgaccttgccgaaggggagtccgaactagtctcaggcttcaacatcgaatacgccgcaggccccttcgccctattcttcatagccgaatacacaaacattattataataaacaccctcaccactacaatcttcctaggaacaacatatgacgcactctcccctgaactctacacaacatattttgtcaccaagaccctacttctaacctccctgttcttatgaattcgaacagcatacccccgattccgctacgaccaactcatacacctcctatgaaaaaacttcctaccactcaccctagcattacttatatgatatgtctccatacccattacaatctccagcattccccctcaaacctaagaaatatgtctgataaaagagttactttgatagagtaaataataggagcttaaacccccttatttctaggactatgagaatcgaacccatccctgagaatccaaaattctccgtgccacctatcacaccccatcctaaagtaaggtcagctaaataagctatcgggcccataccccgaaaatgttggttatacccttcccgtactaattaatcccctggcccaacccgtcatctactctaccatctttgcaggcacactcatcacagcgctaagctcgcactgattttttacctgagtaggcctagaaataaacatgctagcttttattccagttctaaccaaaaaaataaaccctcgttccacagaagctgccatcaagtatttcctcacgcaagcaaccgcatccataatccttctaatagctatcctcttcaacaatatactctccggacaatgaaccataaccaatactaccaatcaatactcatcattaataatcataatggctatagcaataaaactaggaatagccccctttcacttctgagtcccagaggttacccaaggcacccctctgacatccggcctgcttcttctcacatgacaaaaactagcccccatctcaatcatataccaaatctctccctcactaaacgtaagccttctcctcactctctcaatcttatccatcatagcaggcagttgaggtggattaaaccaaacccagctacgcaaaatcttagcatactcctcaattacccacataggatgaataatagcagttctaccgtacaaccctaacataaccattcttaatttaactatttatattatcctaactactaccgcattcctactactcaacttaaactccagcaccacgaccctactactatctcgcacctgaaacaagctaacatgactaacacccttaattccatccaccctcctctccctaggaggcctgcccccgctaaccggctttttgcccaaatgggccattatcgaagaattcacaaaaaacaatagcctcatcatccccaccatcatagccaccatcaccctccttaacctctacttctacctacgcctaatctactccacctcaatcacactactccccatatctaacaacgtaaaaataaaatgacagtttgaacatacaaaacccaccccattcctccccacactcatcgcccttaccacgctactcctacctatctccccttttatactaataatcttatagaaatttaggttaaatacagaccaagagccttcaaagccctcagtaagttgcaatacttaatttctgtaacagctaaggactgcaaaaccccactctgcatcaactgaacgcaaatcagccactttaattaagctaagcccttactagaccaatgggacttaaacccacaaacacttagttaacagctaagcaccctaatcaactggcttcaatctacttctcccgccgccgggaaaaaaggcgggagaagccccggcaggtttgaagctgcttcttcgaatttgcaattcaatatgaaaatcacctcggagctggtaaaaagaggcctaacccctgtctttagatttacagtccaatgcttcactcagccattttacctcacccccactgatgttcgccgaccgttgactattctctacaaaccacaaagacattggaacactatacctattattcggcgcatgagctggagtcctaggcacagctctaagcctccttattcgagccgagctgggccagccaggcaaccttctaggtaacgaccacatctacaacgttatcgtcacagcccatgcatttgtaataatcttcttcatagtaatacccatcataatcggaggctttggcaactgactagttcccctaataatcggtgcccccgatatggcgtttccccgcataaacaacataagcttctgactcttacccccctctctcctactcctgctcgcatctgctatagtggaggccggagcaggaacaggttgaacagtctaccctcccttagcagggaactactcccaccctggagcctccgtagacctaaccatcttctccttacacctagcaggtgtctcttctatcttaggggccatcaatttcatcacaacaattatcaatataaaaccccctgccataacccaataccaaacgcccctcttcgtctgatccgtcctaatcacagcagtcctacttctcctatctctcccagtcctagctgctggcatcactatactactaacagaccgcaacctcaacaccaccttcttcgaccccgccggaggaggagaccccattctataccaacacctattctgatttttcggtcaccctgaagtttatattcttatcctaccaggcttcggaataatctcccatattgtaacttactactccggaaaaaaagaaccatttggatacataggtatggtctgagctatgatatcaattggcttcctagggtttatcgtgtgagcacaccatatatttacagtaggaatagacgtagacacacgagcatatttcacctccgctaccataatcatcgctatccccaccggcgtcaaagtatttagctgactcgccacactccacggaagcaatatgaaatgatctgctgcagtgctctgagccctaggattcatctttcttttcaccgtaggtggcctgactggcattgtattagcaaactcatcactagacatcgtactacacgacacgtactacgttgtagctcacttccactatgtcctatcaataggagctgtatttgccatcataggaggcttcattcactgatttcccctattctcaggctacaccctagaccaaacctacgccaaaatccatttcactatcatattcatcggcgtaaatctaactttcttcccacaacactttctcggcctatccggaatgccccgacgttactcggactaccccgatgcatacaccacatgaaacatcctatcatctgtaggctcattcatttctctaacagcagtaatattaataattttcatgatttgagaagccttcgcttcgaagcgaaaagtcctaatagtagaagaaccctccataaacctggagtgactatatggatgccccccaccctaccacacattcgaagaacccgtatacataaaatctagacaaaaaaggaaggaatcgaaccccccaaagctggtttcaagccaaccccatggcctccatgactttttcaaaaaggtattagaaaaaccatttcataactttgtcaaagttaaattataggctaaatcctatatatcttaatggcacatgcagcgcaagtaggtctacaagacgctacttcccctatcatagaagagcttatcacctttcatgatcacgccctcataatcattttccttatctgcttcctagtcctgtatgcccttttcctaacactcacaacaaaactaactaatactaacatctcagacgctcaggaaatagaaaccgtctgaactatcctgcccgccatcatcctagtcctcatcgccctcccatccctacgcatcctttacataacagacgaggtcaacgatccctcccttaccatcaaatcaattggccaccaatggtactgaacctacgagtacaccgactacggcggactaatcttcaactcctacatacttcccccattattcctagaaccaggcgacctgcgactccttgacgttgacaatcgagtagtactcccgattgaagcccccattcgtataataattacatcacaagacgtcttgcactcatgagctgtccccacattaggcttaaaaacagatgcaattcccggacgtctaaaccaaaccactttcaccgctacacgaccgggggtatactacggtcaatgctctgaaatctgtggagcaaaccacagtttcatgcccatcgtcctagaattaattcccctaaaaatctttgaaatagggcccgtatttaccctatagcaccccctctaccccctctagagcccactgtaaagctaacttagcattaaccttttaagttaaagattaagagaaccaacacctctttacagtgaaatgccccaactaaatactaccgtatggtccaccataattacccccatactccttacactattcctcatcacccaactaaaaatattaaacacaaactaccacctacctccctcaccaaagcccataaaaataaaaaattataacaaaccctgagaaccaaaatgaacgaaaatctgttcgcttcattcattgcccccacaatcctaggcctacccgccgcagtactgatcattctatttccccctctattgatccccacctccaaatatctcatcaacaaccgactaatcaccacccaacaatgactaatcaaactaacctcaaaacaaatgataaccatacacaacactaaaggacgaacctgatctcttatactagtatccttaatcatttttattgccacaactaacctcctcggactcctgcctcactcatttacaccaaccacccaactatctataaacctagccatggccatccccttatgagcgggcgcagtgattataggctttcgctctaagattaaaaatgccctagcccacttcttaccacaaggcacacctacaccccttatccccatactagttattatcgaaaccatcagcctactcattcaaccaatagccctggccgtacgcctaaccgctaacattactgcaggccacctactcatgcacctaattggaagcgccaccctagcaatatcaaccattaaccttccctctacacttatcatcttcacaattctaattctactgactatcctagaaatcgctgtcgccttaatccaagcctacgttttcacacttctagtaagcctctacctgcacgacaacacataatgacccaccaatcacatgcctatcatatagtaaaacccagcccatgacccctaacaggggccctctcagccctcctaatgacctccggcctagccatgtgatttcacttccactccataacgctcctcatactaggcctactaaccaacacactaaccatataccaatgatggcgcgatgtaacacgagaaagcacataccaaggccaccacacaccacctgtccaaaaaggccttcgatacgggataatcctatttattacctcagaagtttttttcttcgcaggatttttctgagccttttaccactccagcctagcccctaccccccaattaggagggcactggcccccaacaggcatcaccccgctaaatcccctagaagtcccactcctaaacacatccgtattactcgcatcaggagtatcaatcacctgagctcaccatagtctaatagaaaacaaccgaaaccaaataattcaagcactgcttattacaattttactgggtctctattttaccctcctacaagcctcagagtacttcgagtctcccttcaccatttccgacggcatctacggctcaacattttttgtagccacaggcttccacggacttcacgtcattattggctcaactttcctcactatctgcttcatccgccaactaatatttcactttacatccaaacatcactttggcttcgaagccgccgcctgatactggcattttgtagatgtggtttgactatttctgtatgtctccatctattgatgagggtcttactcttttagtataaatagtaccgttaacttccaattaactagttttgacaacattcaaaaaagagtaataaacttcgccttaattttaataatcaacaccctcctagccttactactaataattattacattttgactaccacaactcaacggctacatagaaaaatccaccccttacgagtgcggcttcgaccctatatcccccgcccgcgtccctttctccataaaattcttcttagtagctattaccttcttattatttgatctagaaattgccctccttttacccctaccatgagccctacaaacaactaacctgccactaatagttatgtcatccctcttattaatcatcatcctagccctaagtctggcctatgagtgactacaaaaaggattagactgaaccgaattggtatatagtttaaacaaaacgaatgatttcgactcattaaattatgataatcatatttaccaaatgcccctcatttacataaatattatactagcatttaccatctcacttctaggaatactagtatatcgctcacacctcatatcctccctactatgcctagaaggaataatactatcgctgttcattatagctactctcataaccctcaacacccactccctcttagccaatattgtgcctattgccatactagtctttgccgcctgcgaagcagcggtgggcctagccctactagtctcaatctccaacacatatggcctagactacgtacataacctaaacctactccaatgctaaaactaatcgtcccaacaattatattactaccactgacatgactttccaaaaaacacataatttgaatcaacacaaccacccacagcctaattattagcatcatccctctactattttttaaccaaatcaacaacaacctatttagctgttccccaaccttttcctccgaccccctaacaacccccctcctaatactaactacctgactcctacccctcacaatcatggcaagccaacgccacttatccagtgaaccactatcacgaaaaaaactctacctctctatactaatctccctacaaatctccttaattataacattcacagccacagaactaatcatattttatatcttcttcgaaaccacacttatccccaccttggctatcatcacccgatgaggcaaccagccagaacgcctgaacgcaggcacatacttcctattctacaccctagtaggctcccttcccctactcatcgcactaatttacactcacaacaccctaggctcactaaacattctactactcactctcactgcccaagaactatcaaactcctgagccaacaacttaatatgactagcttacacaatagcttttatagtaaagatacctctttacggactccacttatgactccctaaagcccatgtcgaagcccccatcgctgggtcaatagtacttgccgcagtactcttaaaactaggcggctatggtataatacgcctcacactcattctcaaccccctgacaaaacacatagcctaccccttccttgtactatccctatgaggcataattataacaagctccatctgcctacgacaaacagacctaaaatcgctcattgcatactcttcaatcagccacatagccctcgtagtaacagccattctcatccaaaccccctgaagcttcaccggcgcagtcattctcataatcgcccacggacttacatcctcattactattctgcctagcaaactcaaactacgaacgcactcacagtcgcatcataatcctctctcaaggacttcaaactctactcccactaatagctttttgatgacttctagcaagcctcgctaacctcgccttaccccccactattaacctactgggagaactctctgtgctagtaaccacgttctcctgatcaaatatcactctcctacttacaggactcaacatactagtcacagccctatactccctctacatatttaccacaacacaatggggctcactcacccaccacattaacaacataaaaccctcattcacacgagaaaacaccctcatgttcatacacctatcccccattctcctcctatccctcaaccccgacatcattaccgggttttcctcttgtaaatatagtttaaccaaaacatcagattgtgaatctgacaacagaggcttacgaccccttatttaccgagaaagctcacaagaactgctaactcatgcccccatgtctaacaacatggctttctcaacttttaaaggataacagctatccattggtcttaggccccaaaaattttggtgcaactccaaataaaagtaataaccatgcacactactataaccaccctaaccctgacttccctaattccccccatccttaccaccctcgttaaccctaacaaaaaaaactcatacccccattatgtaaaatccattgtcgcatccacctttattatcagtctcttccccacaacaatattcatgtgcctagaccaagaagttattatctcgaactgacactgagccacaacccaaacaacccagctctccctaagcttcaaactagactacttctccataatattcatccctgtagcattgttcgttacatggtccatcatagaattctcactgtgatatataaactcagacccaaacattaatcagttcttcaaatatctactcattttcctaattaccatactaatcttagttaccgctaacaacctattccaactgttcatcggctgagagggcgtaggaattatatccttcttgctcatcagttgatgatacgcccgagcagatgccaacacagcagccattcaagcaatcctatacaaccgtatcggcgatatcggtttcatcctcgccttagcatgatttatcctacactccaactcatgagacccacaacaaatagcccttctaaacgctaatccaagcctcaccccactactaggcctcctcctagcagcagcaggcaaatcagcccaattaggtctccacccctgactcccctcagccatagaaggccccaccccagtctcagccctactccactcaagcactatagttgtagcaggaatcttcttactcatccgcttccaccccctagcagaaaatagcccactaatccaaactctaacactatgcttaggcgctatcaccactctgttcgcagcagtctgcgcccttacacaaaatgacatcaaaaaaatcgtagccttctccacttcaagtcaactaggactcataatagttacaatcggcatcaaccaaccacacctagcattcctgcacatctgtacccacgccttcttcaaagccatactatttatgtgctccgggtccatcatccacaaccttaacaatgaacaagatattcgaaaaataggaggactactcaaaaccatacctctcacttcaacctccctcaccattggcagcctagcattagcaggaatacctttcctcacaggtttctactccaaagaccacatcatcgaaaccgcaaacatatcatacacaaacgcctgagccctatctattactctcatcgctacctccctgacaagcgcctatagcactcgaataattcttctcaccctaacaggtcaacctcgcttccccacccttactaacattaacgaaaataaccccaccctactaaaccccattaaacgcctgacagccggaagcctattcgcaggatttctcattactaacaacatttcccccgcatcccccttccaaacaacaatccccctctacctaaaactcacagccctcgctgtcactttcctaggacttctaacagccctagacctcaactacctaaccaacaaacttaaaataaaatccccactatgcacattttatttctccaacatactcggattctaccctagcatcacacaccgcacaatcccctatctaggccttcttgcgagccaaaacctgcccctactcctcctagacctaacctgactagaaaagctattacctaaaacaatttcacagcaccaaatctccacctccatcatcacctcaacccaaaaaggcataattaaactttacttcctctctttcttcttcccactcatcctaaccctactcctaatcacataacctattcccccgagcaatctcaattacaatatatacaccaacaaacaatgttcaaccagtaactactactaatcaacgcccataatcatacaaagcccccgcaccaataggatcctcccgaatcaaccctgacccctctccttcataaattattcagcttcctacactattaaagtttaccacaaccaccaccccatcatactctttcacccacagcaccaatcctacctccatcgctaaccccactaaaacactcaccaagacctcaacccctgacccccatgcctcaggatactcctcaatagccatcgctgtagtatacccaaagacaaccatcattccccctaaataaattaaaaaaactattaaacccatataacctcccccaaaattcagaataataacacacccgaccacaccgctaacaatcaatactaaacccccataaataggagaaggcttagaagaaaaccccacaaaccccattactaaacccacactcaacagaaacaaagcatacatcattattctcgcacggactacaaccacgaccaatgatatgaaaaaccatcgttgtatttcaactacaagaacaccaatgaccccaatacgcaaaattaaccccctaataaaattaattaaccactcattcatcgacctccccaccccatccaacatctccgcatgatgaaacttcggctcactccttggcgcctgcctgatcctccaaatcaccacaggactattcctagccatgcactactcaccagacgcctcaaccgccttttcatcaatcgcccacatcactcgagacgtaaattatggctgaatcatccgctaccttcacgccaatggcgcctcaatattctttatctgcctcttcctacacatcgggcgaggcctatattacggatcatttctctactcagaaacctgaaacatcggcattatcctcctgcttgcaactatagcaacagccttcataggctatgtcctcccgtgaggccaaatatcattctgaggggccacagtaattacaaacttactatccgccatcccatacattgggacagacctagttcaatgaatctgaggaggctactcagtagacagtcccaccctcacacgattctttacctttcacttcatcttgcccttcattattgcagccctagcagcactccacctcctattcttgcacgaaacgggatcaaacaaccccctaggaatcacctcccattccgataaaatcaccttccacccttactacacaatcaaagacgccctcggcttacttctcttccttctctccttaatgacattaacactattctcaccagacctcctaggcgacccagacaattataccctagccaaccccttaaacacccctccccacatcaagcccgaatgatatttcctattcgcctacacaattctccgatccgtccctaacaaactaggaggcgtccttgccctattactatccatcctcatcctagcaataatccccatcctccatatatccaaacaacaaagcataatatttcgcccactaagccaatcactttattgactcctagccgcagacctcctcattctaacctgaatcggaggacaaccagtaagctacccttttaccatcattggacaagtagcatccgtactatacttcacaacaatcctaatcctaataccaactatctccctaattgaaaacaaaatactcaaatgggcctgtccttgtagtataaactaatacaccagtcttgtaaaccagagatgaaaacctttttccaaggacaaatcagagaaaaagtctttaactccaccattagcacccaaagctaagattctaatttaaactattctctgttctttcatggggaagcagatttgggtaccacccaagtattgactcacccatcaacaaccgctatgtatttcgtacattactgccagccaccatgaatattgtacggtaccataaatacttgaccacctgtagtacataaaaacccaatccacatcaaaaccccctccccatgcttacaagcaagtacagcaatcaaccctcaactatcacacatcaactgcaactccaaagccacccctcacccactaggataccaacaaacctacccacccttaacagtacatagtacataaagccatttaccgtacatagcacattacagtcaaatcccttctcgtccccatggatgacccccctcagataggggtcccttgaccaccatcctccgtgaaatcaatatcccgcacaagagtgctactctcctcgctccgggcccataacacttgggggtagctaaagtgaactgtatccgacatctggttcctacttcagggtcataaagcctaaatagcccacacgttccccttaaataagacatcacgatg

SEQ ID NO: 493 - DNA, 16569 bp, Homo sapiens mitochondrial
  3107: "n" refers to a nucleotide at position 3107 of the Cambridge Reference Sequence (CRS, Anderson et al. 1981 Nature 290:457-465), later determined to be absent from the human mtDNA sequence according to the revised CRS (rCRS, Andrews et al. 1999 Nature Genetics 23:147); "n" therefore represents a single nucleotide deletion at a position corresponding to nucleotide 3107 of SEQ ID NO:1 as provided herein.
gatcacaggtctatcaccctattaaccactcacgggagctctccatgcatttggtattttcgtctggggggtatgcacgcgatagcattgcgagacgctggagccggagcaccctatgtcgcagtatctgtctttgattcctgcctcatcctattatttatcgcacctacgttcaatattacaggcgaacatacttactaaagtgtgttaattaattaatgcttgtaggacataataataacaattgaatgtctgcacagccactttccacacagacatcataacaaaaaatttccaccaaaccccccctcccccgcttctggccacagcacttaaacacatctctgccaaaccccaaaaacaaagaaccctaacaccagcctaaccagatttcaaattttatcttttggcggtatgcacttttaacagtcaccccccaactaacacattattttcccctcccactcccatactactaatctcatcaatacaacccccgcccatcctacccagcacacacacaccgctgctaaccccataccccgaaccaaccaaaccccaaagacaccccccacagtttatgtagcttacctcctcaaagcaatacactgaaaatgtttagacgggctcacatcaccccataaacaaataggtttggtcctagcctttctattagctcttagtaagattacacatgcaagcatccccattccagtgagttcaccctctaaatcaccacgatcaaaagggacaagcatcaagcacgcagcaatgcagctcaaaacgcttagcctagccacacccccacgggaaacagcagtgattaacctttagcaataaacgaaagtttaactaagctatactaaccccagggttggtcaatttcgtgccagccaccgcggtcacacgattaacccaagtcaatagaagccggcgtaaagagtgttttagatcaccccctccccaataaagctaaaactcacctgagttgtaaaaaactccagttgacacaaaatagactacgaaagtggctttaacatatctgaacacacaatagctaagacccaaactgggattagataccccactatgcttagccctaaacctcaacagttaaatcaacaaaactgctcgccagaacactacgagccacagcttaaaactcaaaggacctggcggtgcttcatatccctctagaggagcctgttctgtaatcgataaaccccgatcaacctcaccacctcttgctcagcctatataccgccatcttcagcaaaccctgatgaaggctacaaagtaagcgcaagtacccacgtaaagacgttaggtcaaggtgtagcccatgaggtggcaagaaatgggctacattttctaccccagaaaactacgatagcccttatgaaacttaagggtcgaaggtggatttagcagtaaactgagagtagagtgcttagttgaacagggccctgaagcgcgtacacaccgcccgtcaccctcctcaagtatacttcaaaggacatttaactaaaacccctacgcatttatatagaggagacaagtcgtaacatggtaagtgtactggaaagtgcacttggacgaaccagagtgtagcttaacacaaagcacccaacttacacttaggagatttcaacttaacttgaccgctctgagctaaacctagccccaaacccactccaccttactaccagacaaccttagccaaaccatttacccaaataaagtataggcgatagaaattgaaacctggcgcaatagatatagtaccgcaagggaaagatgaaaaattataaccaagcataatatagcaaggactaacccctataccttctgcataatgaattaactagaaataactttgcaaggagaaccaaagctaagacccccgaaaccagacgagctacctaagaacagctaaaagagcacacccgtctatgtagcaaaatagtgggaagatttataggtagaggcgacaaacctaccgagcctggtgatagctggttgtccaagatagaatcttagttcaactttaaatttgcccacagaaccctctaaatccccttgtaaatttaactgttagtccaaagaggaacagctctttggacactaggaaaaaaccttgtagagagagtaaaaaatttaacacccatagtaggcctaaaagcagccaccaattaagaaagcgttcaagctcaacacccactacctaaaaaatcccaaacatataactgaactcctcacacccaattggaccaatctatcaccctatagaagaactaatgttagtataagtaacatgaaaacattctcctccgcataagcctgcgtcagattaaaacactgaactgacaattaacagcccaatatctacaatcaaccaacaagtcattattaccctcactgtcaacccaacacaggcatgctcataaggaaaggttaaaaaaagtaaaaggaactcggcaaatcttaccccgcctgtttaccaaaaacatcacctctagcatcaccagtattagaggcaccgcctgcccagtgacacatgtttaacggccgcggtaccctaaccgtgcaaaggtagcataatcacttgttccttaaatagggacctgtatgaatggctccacgagggttcagctgtctcttacttttaaccagtgaaattgacctgcccgtgaagaggcgggcatgacacagcaagacgagaagaccctatggagctttaatttattaatgcaaacagtacctaacaaacccacaggtcctaaactaccaaacctgcattaaaaatttcggttggggcgacctcggagcagaacccaacctccgagcagtacatgctaagacttcaccagtcaaagcgaactactatactcaattgatccaataacttgaccaacggaacaagttaccctagggataacagcgcaatcctattctagagtccatatcaacaatagggtttacgacctcgatgttggatcaggacatcccgatggtgcagccgctattaaaggttcgtttgttcaacgattaaagtcctacgtgatctgagttcagaccggagtaatccaggtcggtttctatctacnttcaaattcctccctgtacgaaaggacaagagaaataaggcctacttcacaaagcgccttcccccgtaaatgatatcatctcaacttagtattatacccacacccacccaagaacagggtttgttaagatggcagagcccggtaatcgcataaaacttaaaactttacagtcagaggttcaattcctcttcttaacaacatacccatggccaacctcctactcctcattgtacccattctaatcgcaatggcattcctaatgcttaccgaacgaaaaattctaggctatatacaactacgcaaaggccccaacgttgtaggcccctacgggctactacaacccttcgctgacgccataaaactcttcaccaaagagcccctaaaacccgccacatctaccatcaccctctacatcaccgccccgaccttagctctcaccatcgctcttctactatgaacccccctccccatacccaaccccctggtcaacctcaacctaggcctcctatttattctagccacctctagcctagccgtttactcaatcctctgatcagggtgagcatcaaactcaaactacgccctgatcggcgcactgcgagcagtagcccaaacaatctcatatgaagtcaccctagccatcattctactatcaacattactaataagtggctcctttaacctctccacccttatcacaacacaagaacacctctgattactcctgccatcatgacccttggccataatatgatttatctccacactagcagagaccaaccgaacccccttcgaccttgccgaaggggagtccgaactagtctcaggcttcaacatcgaatacgccgcaggccccttcgccctattcttcatagccgaatacacaaacattattataataaacaccctcaccactacaatcttcctaggaacaacatatgacgcactctcccctgaactctacacaacatattttgtcaccaagaccctacttctaacctccctgttcttatgaattcgaacagcatacccccgattccgctacgaccaactcatacacctcctatgaaaaaacttcctaccactcaccctagcattacttatatgacatgtctccatacccattacaatctccagcattccccctcaaacctaagaaatatgtctgataaaagagttactttgatagagtaaataataggagcttaaacccccttatttctaggactatgagaatcgaacccatccctgagaatccaaaattctccgtgccacctatcacaccccatcctaaagtaaggtcagctaaataagctatcgggcccataccccgaaaatgttggttatacccttcccgtactaattaatcccctggcccaacccgtcatctactctaccatctttgcaggcacactcatcacagcgctaagctcgcactgattttttacctgagtaggcctagaaataaacatgctagcttttattccagttctaaccaaaaaaataaaccctcgttccacagaagctgccatcaagtatttcctcacgcaagcaaccgcatccataatccttctaatagctatcctcttcaacaatatactctccggacaatgaaccataaccaatactaccaatcaatactcatcattaataatcataatggctatagcaataaaactaggaatagccccctttcacttctgagtcccagaggttacccaaggcacccctctgacatccggcctgcttcttctcacatgacaaaaactagcccccatctcaatcatataccaaatctctccctcactagacgtaagccttctcctcactctctcaatcttatccatcatagcaggcagttgaggtggattaaaccaaacccagctacgcaaaatcttagcatactcctcaattacccacataggatgaataatagcagttctaccgtacaaccctaacataaccattcttaatttaactatttatattatcctaactactaccgcattcctactactcaacttaaactccagcaccacgaccctactactatctcgcacctgaaacaagctaacatgactaacacccttaattccatccaccctcctctccctaggaggcctgcccccgctaaccggctttttgcccaaatgggccattatcgaagaattcacaaaaaacaatagcctcatcatccccaccatcatagccaccatcaccctccttaacctctacttctacctacgcctaatctactccacctcaatcacactactccccatatctaacaacgtaaaaataaaatgacagtttgaacatacaaaacccaccccattcctccccacactcatcgcccttaccacgctactcctacctatctccccttttatactaataatcttatagaaatttaggttaaatacagaccaagagccttcaaagccctcagtaagttgcaatacttaatttctgtaacagctaaggactgcaaaaccccactctgcatcaactgaacgcaaatcagccactttaattaagctaagcccttactagaccaatgggacttaaacccacaaacacttagttaacagctaagcaccctaatcaactggcttcaatctacttctcccgccgccgggaaaaaaggcgggagaagccccggcaggtttgaagctgcttcttcgaatttgcaattcaatatgaaaatcacctcggagctggtaaaaagaggcctaacccctgtctttagatttacagtccaatgcttcactcagccattttacctcacccccactgatgttcgccgaccgttgactattctctacaaaccacaaagacattggaacactatacctattattcggcgcatgagctggagtcctaggcacagctctaagcctccttattcgagccgagctgggccagccaggcaaccttctaggtaacgaccacatctacaacgttatcgtcacagcccatgcatttgtaataatcttcttcatagtaatacccatcataatcggaggctttggcaactgactagttcccctaataatcggtgcccccgatatggcgtttccccgcataaacaacataagcttctgactcttacctccctctctcctactcctgctcgcatctgctatagtggaggccggagcaggaacaggttgaacagtctaccctcccttagcagggaactactcccaccctggagcctccgtagacctaaccatcttctccttacacctagcaggtgtctcctctatcttaggggccatcaatttcatcacaacaattatcaatataaaaccccctgccataacccaataccaaacgcccctcttcgtctgatccgtcctaatcacagcagtcctacttctcctatctctcccagtcctagctgctggcatcactatactactaacagaccgcaacctcaacaccaccttcttcgaccccgccggaggaggagaccccattctataccaacacctattctgatttttcggtcaccctgaagtttatattcttatcctaccaggcttcggaataatctcccatattgtaacttactactccggaaaaaaagaaccatttggatacataggtatggtctgagctatgatatcaattggcttcctagggtttatcgtgtgagcacaccatatatttacagtaggaatagacgtagacacacgagcatatttcacctccgctaccataatcatcgctatccccaccggcgtcaaagtatttagctgactcgccacactccacggaagcaatatgaaatgatctgctgcagtgctctgagccctaggattcatctttcttttcaccgtaggtggcctgactggcattgtattagcaaactcatcactagacatcgtgctacacgacacgtactacgttgtagctcacttccactatgtcctatcaataggagctgtatttgccatcataggaggcttcattcactgatttcccctattctcaggctacaccctagaccaaacctacgccaaaatccatttcactatcatattcatcggcgtaaatctaactttcttcccacaacactttctcggcctatccggaatgccccgacgttactcggactaccccgatgcatacaccacatgaaacatcctatcatctgtaggctcattcatttctctaacagcagtaatattaataattttcatgatttgagaagccttcgcttcgaagcgaaaagtcctaatagtagaagaaccctccataaacctggagtgactatatggatgccccccaccctaccacacattcgaagaacccgtatacataaaatctagacaaaaaaggaaggaatcgaaccccccaaagctggtttcaagccaaccccatggcctccatgactttttcaaaaaggtattagaaaaaccatttcataactttgtcaaagttaaattataggctaaatcctatatatcttaatggcacatgcagcgcaagtaggtctacaagacgctacttcccctatcatagaagagcttatcacctttcatgatcacgccctcataatcattttccttatctgcttcctagtcctgtatgcccttttcctaacactcacaacaaaactaactaatactaacatctcagacgctcaggaaatagaaaccgtctgaactatcctgcccgccatcatcctagtcctcatcgccctcccatccctacgcatcctttacataacagacgaggtcaacgatccctcccttaccatcaaatcaattggccaccaatggtactgaacctacgagtacaccgactacggcggactaatcttcaactcctacatacttcccccattattcctagaaccaggcgacctgcgactccttgacgttgacaatcgagtagtactcccgattgaagcccccattcgtataataattacatcacaagacgtcttgcactcatgagctgtccccacattaggcttaaaaacagatgcaattcccggacgtctaaaccaaaccactttcaccgctacacgaccgggggtatactacggtcaatgctctgaaatctgtggagcaaaccacagtttcatgcccatcgtcctagaattaattcccctaaaaatctttgaaatagggcccgtatttaccctatagcaccccctctaccccctctagagcccactgtaaagctaacttagcattaaccttttaagttaaagattaagagaaccaacacctctttacagtgaaatgccccaactaaatactaccgtatggcccaccataattacccccatactccttacactattcctcatcacccaactaaaaatattaaacacaaactaccacctacctccctcaccaaagcccataaaaataaaaaattataacaaaccctgagaaccaaaatgaacgaaaatctgttcgcttcattcattgcccccacaatcctaggcctacccgccgcagtactgatcattctatttccccctctattgatccccacctccaaatatctcatcaacaaccgactaatcaccacccaacaatgactaatcaaactaacctcaaaacaaataataaccatacacaacactaaaggacgaacctgatctcttatactagtatccttaatcatttttattgccacaactaacctcctcggactcctgcctcactcatttacaccaaccacccaactatctataaacctagccatggccatccccttatgagcgggcgcagtgattataggctttcgctctaagattaaaaatgccctagcccacttcttaccacaaggcacacctacaccccttatccccatactagttattatcgaaaccatcagcctactcattcaaccaatagccctggccgtacgcctaaccgctaacattactgcaggccacctactcatgcacctaattggaagcgccaccctagcaatatcaaccattaaccttccctctacacttatcatcttcacaattctaattctactgactatcctagaaatcgctgtcgccttaatccaagcctacgttttcacacttctagtaagcctctacctgcacgacaacacataatgacccaccaatcacatgcctatcatatagtaaaacccagcccatgacccctaacaggagccctctcagccctcctaatgacctccggcctagccatgtgatttcacttccactccataacgctcctcatactaggcctactaaccaacacactaaccatataccaatgatggcgcgatgtaacacgagaaagcacataccaaggccaccacacaccacctgtccaaaaaggccttcgatacgggataatcctatttattacctcagaagtttttttcttcgcaggatttttctgagccttttaccactccagcctagcccctaccccccaattaggagggcactggcccccaacaggcatcaccccgctaaatcccctagaagtcccactcctaaacacatccgtattactcgcatcaggagtatcaatcacctgagctcaccatagtctaatagaaaacaaccgaaaccaaataattcaagcactgcttattacaattttactgggtctctattttaccctcctacaagcctcagagtacttcgagtctcccttcaccatttccgacggcatctacggctcaacattttttgtagccacaggcttccacggacttcacgtcattattggctcaactttcctcactatctgcttcatccgccaactaatatttcactttacatccaaacatcactttggcttcgaagccgccgcctgatactggcattttgtagatgtggtttgactatttctgtatgtctccatctattgatgagggtcttactcttttagtataaatagtaccgttaacttccaattaactagttttgacaacattcaaaaaagagtaataaacttcgccttaattttaataatcaacaccctcctagccttactactaataattattacattttgactaccacaactcaacggctacatagaaaaatccaccccttacgagtgcggcttcgaccctatatcccccgcccgcgtccctttctccataaaattcttcttagtagctattaccttcttattatttgatctagaaattgccctccttttacccctaccatgagccctacaaacaactaacctgccactaatagttatgtcatccctcttattaatcatcatcctagccctaagtctggcctatgagtgactacaaaaaggattagactgaaccgaattggtatatagtttaaacaaaacgaatgatttcgactcattaaattatgataatcatatctaccaaatgcccctcatttacataaatattatactagcatttaccatctcacttctaggaatactagtatatcgctcacacctcatatcctccctactatgcctagaaggaataatactatcgctgttcattatagctactctcataaccctcaacacccactccctcttagccaatattgtgcctattgccatactagtctttgccgcctgcgaagcagcggtgggcctagccctactagtctcaatctccaacacatatggcctagactacgtacataacctaaacctactccaatgctaaaactaatcgtcccaacaattatattactaccactgacatgactttccaaaaaacacataatttgaatcaacacaaccacccacagcctaattattagcatcatccctctactattttttaaccaaatcaacaacaacctatttagctgttccccaaccttttcctccgaccccctaacaacccccctcctaatactaactacctgactcctacccctcacaatcatggcaagccaacgccacttatccagtgaaccactatcacgaaaaaaactctacctctctatactaatctccctacaaatctccttaattataacattcacagccacagaactaatcatattttatatcttcttcgaaaccacacttatccccaccttggctatcatcacccgatgaggcaaccagccagaacgcctgaacgcaggcacatacttcctattctacaccctagtaggctcccttcccctactcatcgcactgatttacactcacaacaccctaggctcactaaacattctactactcactctcactgcccaagaactatcaaactcctgagccaacaacttaatatgactagcttacacaatagcttttatagtaaagatacctctttacggactccacttatgactccctaaagcccatgtcgaagcccccatcgctgggtcaatagtacttgccgcagtactcttaaaactaggcggctatggtataatacgcctcacactcattctcaaccccctgacaaaacacatagcctaccccttccttgtactatccctatgaggcataattataacaagctccatctgcctacgacaaacagacctaaaatcgctcattgcatactcttcaatcagccacatagccctcgtagtaacagccattctcatccaaaccccctgaagcttcaccggcgcagtcattctcataatcgcccacggacttacatcctcattactattctgcctagcaaactcaaactacgaacgcactcacagtcgcatcataatcctctctcaaggacttcaaactctactcccactaatagctttttgatgacttctagcaagcctcgctaacctcgccttaccccccactattaacctactgggagaactctctgtgctagtaaccacgttctcctgatcaaatatcactctcctacttacaggactcaacatactagtcacagccctatactccctctacatatttaccacaacacaatggggctcactcacccaccacattaacaacataaaaccctcattcacacgagaaaacaccctcatgttcatacacctatcccccattctcctcctatccctcaaccccgacatcattaccgggttttcctcttgtaaatatagtttaaccaaaacatcagattgtgaatctgacaacagaggcttacgaccccttatttaccgagaaagctcacaagaactgctaactcatgcccccatgtctaacaacatggctttctcaacttttaaaggataacagctatccattggtcttaggccccaaaaattttggtgcaactccaaataaaagtaataaccatgcacactactataaccaccctaaccctgacttccctaattccccccatccttaccaccctcgttaaccctaacaaaaaaaactcatacccccattatgtaaaatccattgtcgcatccacctttattatcagtctcttccccacaacaatattcatgtgcctagaccaagaagttattatctcgaactgacactgagccacaacccaaacaacccagctctccctaagcttcaaactagactacttctccataatattcatccctgtagcattgttcgttacatggtcaatcatagaattctcactgtgatatataaactcagacccaaacattaatcagttcttcaaatatctactcatcttcctaattaccatactaatcttagttaccgctaacaacctattccaactgttcatcggctgagagggcgtaggaattatatccttcttgctcatcagttgatgatacgcccgagcagatgccaacacagcagccattcaagcaatcctatacaaccgtatcggcgatatcggtttcatcctcgccttagcatgatttatcctacactccaactcatgagacccacaacaaatagcccttctaaacgctaatccaagcctcaccccactactaggcctcctcctagcagcagcaggcaaatcagcccaattaggtctccacccctgactcccctcagccatagaaggccccaccccagtctcagccctactccactcaagcactatagttgtagcaggaatcttcttactcatccgcttccaccccctagcagaaaatagcccactaatccaaactctaacactatgcttaggcgctatcaccactctgttcgcagcagtctgcgcccttacacaaaatgacatcaaaaaaatcgtagccttctccacttcaagtcaactaggactcataatagttacaatcggcatcaaccaaccacacctagcattcctgcacatctgtacccacgccttcttcaaagccatactatttatgtgctccggatccatcatccacaaccttaacaatgaacaagatattcgaaaaataggaggactactcaaaaccatacctctcacttcaacctccctcaccattggcagcctagcattagcaggaatacctttcctcacaggtttctactccaaagaccacatcatcgaaaccgcaaacatatcatacacaaacgcctgagccctatctattactctcatcgctacctccctgacaagcgcctatagcactcgaataattcttctcaccctaacaggtcaacctcgcttccccacccttactaacattaacgaaaataaccccaccctactaaaccccattaaacgcctggcagccggaagcctattcgcaggatttctcattactaacaacatttcccccgcatcccccttccaaacaacaatccccctctacctaaaactcacagccctcgctgtcactttcctaggacttctaacagccctagacctcaactacctaaccaacaaacttaaaataaaatccccactatgcacattttatttctccaacatactcggattctaccctagcatcacacaccgcacaatcccctatctaggccttcttacgagccaaaacctgcccctactcctcctagacctaacctgactagaaaagctattacctaaaacaatttcacagcaccaaatctccacctccatcatcacctcaacccaaaaaggcataattaaactttacttcctctctttcttcttcccactcatcctaaccctactcctaatcacataacctattcccccgagcaatctcaattacaatatatacaccaacaaacaatgttcaaccagtaactactactaatcaacgcccataatcatacaaagcccccgcaccaataggatcctcccgaatcaaccctgacccctctccttcataaattattcagcttcctacactattaaagtttaccacaaccaccaccccatcatactctttcacccacagcaccaatcctacctccatcgctaaccccactaaaacactcaccaagacctcaacccctgacccccatgcctcaggatactcctcaatagccatcgctgtagtatatccaaagacaaccatcattccccctaaataaattaaaaaaactattaaacccatataacctcccccaaaattcagaataataacacacccgaccacaccgctaacaatcaatactaaacccccataaataggagaaggcttagaagaaaaccccacaaaccccattactaaacccacactcaacagaaacaaagcatacatcattattctcgcacggactacaaccacgaccaatgatatgaaaaaccatcgttgtatttcaactacaagaacaccaatgaccccaatacgcaaaattaaccccctaataaaattaattaaccactcattcatcgacctccccaccccatccaacatctccgcatgatgaaacttcggctcactccttggcgcctgcctgatcctccaaatcaccacaggactattcctagccatacactactcaccagacgcctcaaccgccttttcatcaatcgcccacatcactcgagacgtaaattatggctgaatcatccgctaccttcacgccaatggcgcctcaatattctttatctgcctcttcctacacatcgggcgaggcctatattacggatcatttctctactcagaaacctgaaacatcggcattatcctcctgcttgcaactatagcaacagccttcataggctatgtcctcccgtgaggccaaatatcattctgaggggccacagtaattacaaacttactatccgccatcccatacattgggacagacctagttcaatgaatctgaggaggctactcagtagacagtcccaccctcacacgattctttacctttcacttcatcttgcccttcattattgcagccctagcagcactccacctcctattcttgcacgaaacgggatcaaacaaccccctaggaatcacctcccattccgataaaatcaccttccacccttactacacaatcaaagacgccctcggcttacttctcttcattctctccttaatgacattaacactattctcaccagacctcctaggcgacccagacaattataccctagccaaccccttaaacacccctccccacatcaagcccgaatgatatttcctattcgcctacacaattctccgatccgtccctaacaagctaggaggcgtccttgccctattactatccatcctcatcctagcaataatccccatcctccatatatccaaacaacaaagcataatatttcgcccactaagccaatcactttattgactcctagccgcagacctcctcattctaacctgaatcggaggacaaccagtaagctacccttttaccatcattggacaagtagcatccgtactatacttcacaacaatcctaatcctaataccaactatctccctaattgaaaacaaaatactcaaatgggcctgtccttgtagtataaactaatacaccagtcttgtaaaccgaagatgaaaacctttttccaaggacaaatcagagaaaaagtctttaactccaccattagcacccaaagctaagattctaatttaaactattctctgttctttcatggggaagcagatttgggtaccacccaagtattgactcacccatcaacaaccgctatgtatttcgtacattactgccagccaccatgaatattgtacggtaccataaatacttgaccacctgtagtacataaaaacccaatccacatcaaaaccccctccccatgcttacaagcaagtacagcaatcaaccctcaactatcacacatcaactgcaactccaaagccacccctcacccactaggataccaacaaacctacccacccttaacagtacatagtacataaagccatttaccgtacatagcacattacagtcaaatcccttctcgtccccatggatgacccccctcagataggggtcccttgaccaccatcctccgtgaaatcaatatcccgcacaagagtgctactctcctcgctccgggcccataacacttgggggtagctaaagtgaactgtatccgacatctggttcctacttcagggtcataaagcctaaatagcccacacgttccccttaaataagacatcacgatg

SEQ ID NO: 494 - DNA, 16569 bp, Homo sapiens mitochondrial
  3107: "n" refers to a nucleotide at position 3107 of the Cambridge Reference Sequence (CRS, Anderson et al. 1981 Nature 290:457-465), later determined to be absent from the human mtDNA sequence according to the revised CRS (rCRS, Andrews et al. 1999 Nature Genetics 23:147); "n" therefore represents a single nucleotide deletion at a position corresponding to nucleotide 3107 of SEQ ID NO:1 as provided herein.
gatcacaggtctatcaccctattaaccactcacgggagctctccatgcatttggtattttcgtctggggggtatgcacgcgatagcattgcgagacgctggagccggagcaccctatgtcgcagtatctgtctttgattcctgcctcatcctattatttatcgcacctacgttcaatattacaggcgaacatacttactaaagtgtgttaattaattaatgcttgtaggacataataataacaattgaatgtctgcacagccactttccacacagacatcataacaaaaaatttccaccaaaccccccctcccccgcttctggccacagcacttaaacacatctctgccaaaccccaaaaacaaagaaccctaacaccagcctaaccagatttcaaattttatcttttggcggtatgcacttttaacagtcaccccccaactaacacattattttcccctcccactcccatactactaatctcatcaatacaacccccgcccatcctacccagcacacacacaccgctgctaaccccataccccgaaccaaccaaaccccaaagacaccccccacagtttatgtagcttacctcctcaaagcaatacactgaaaatgtttagacgggctcacatcaccccataaacaaataggtttggtcctagcctttctattagctcttagtaagattacacatgcaagcatccccgttccagtgagttcaccctctaaatcaccacgatcaaaagggacaagcatcaagcacgcagcaatgcagctcaaaacgcttagcctagccacacccccacgggaaacagcagtgattaacctttagcaataaacgaaagtttaactaagctatactaaccccagggttggtcaatttcgtgccagccaccgcggtcacacgattaacccaagtcaatagaagccggcgtaaagagtgttttagatcacccccgccccaataaagctaaaactcacctgagttgtaaaaaactccagttgacacaaaatagactacgaaagtggctttaacatatctgaacacacaatagctaagacccaaactgggattagataccccactatgcttagccctaaacctcaacagttaaatcaacaaaactgctcgccagaacactacgagccacagcttaaaactcaaaggacctggcggtgcttcatatccctctagaggagcctgttctgtaatcgataaaccccgatcaacctcaccacctcttgctcagcctatataccgccatcttcagcaaaccctgatgaaggctacaaagtaagcgcaagtacccacgtaaagacgttaggtcaaggtgtagcccatgaggtggcaagaaatgggctacattttctaccccagaaaactacgatagcccttatgaaacttaagggtcgaaggtggatttagcagtaaactgagagtagagtgcttagttgaacagggccctgaagcgcgtacacaccgcccgtcaccctcctcaagtatacttcaaaggacatttaactaaaacccctacgcatttatatagaggagacaagtcgtaacatggtaagtgtactggaaagtgcacttggacgaaccagagtgtagcttaacacaaagcacccaacttacacttaggagatttcaacttaacttgaccgctctgagctaaacctagccccaaacccactccaccttactaccagacaaccttagccaaaccatttacccaaataaagtataggcgatagaaattgaaacctggcgcaatagatatagtaccgcaagggaaagatgaaaaattataaccaagcataatatagcaaggactaacccctataccttctgcataatgaattaactagaaataactttgcaaggagagccaaagctaagacccccgaaaccagacgagctacctaagaacagctaaaagagcacacccgtctatgtagcaaaatagtgggaagatttataggtagaggcgacaaacctaccgagcctggtgatagctggttgtccaagatagaatcttagttcaactttaaatttgcccacagaaccctctaaatccccttgtaaatttaactgttagtccaaagaggaacagctctttggacactaggaaaaaaccttgtagagagagtaaaaaatttaacacccatagtaggcctaaaagcagccaccaattaagaaagcgttcaagctcaacacccactacctaaaaaatcccaaacatataactgaactcctcacacccaattggaccaatctatcaccctatagaagaactaatgttagtataagtaacatgaaaacattctcctccgcataagcctgcgtcagattaaaacactgaactgacaattaacagcccaatatctacaatcaaccaacaagtcattattaccctcactgtcaacccaacacaggcatgctcataaggaaaggttaaaaaaagtaaaaggaactcggcaaatcttaccccgcctgtttaccaaaaacatcacctctagcatcaccagtattagaggcaccgcctgcccagtgacacatgtttaacggccgcggtaccctaaccgtgcaaaggtagcataatcacttgttccttaaatagggacctgtatgaatggctccacgagggttcagctgtctcttacttttaaccagtgaaattgacctgcccgtgaagaggcgggcataacacagcaagacgagaagaccctatggagctttaatttattaatgcaaacagtacctaacaaacccacaggtcctaaactaccaaacctgcattaaaaatttcggttggggcgacctcggagcagaacccaacctccgagcagtacatgctaagacttcaccagtcaaagcgaactactatactcaattgatccaataacttgaccaacggaacaagttaccctagggataacagcgcaatcctattctagagtccatatcaacaatagggtttacgacctcgatgttggatcaggacatcccgatggtgcagccgctattaaaggttcgtttgttcaacgattaaagtcctacgtgatctgagttcagaccggagtaatccaggtcggtttctatctacnttcaaattcctccctgtacgaaaggacaagagaaataaggcctacttcacaaagcgccttcccccgtaaatgatatcatctcaacttagtattatacccacacccacccaagaacagggtttgttaagatggcagagcccggtaatcgcataaaacttaaaactttacagtcagaggttcaattcctcttcttaacaacatacccatggccaacctcctactcctcattgtacccattctaatcgcaatggcattcctaatgcttaccgaacgaaaaattctaggctatatacaactacgcaaaggccccaacgttgtaggcccctacgggctactacaacccttcgctgacgccataaaactcttcaccaaagagcccctaaaacccgccacatctaccatcaccctctacatcaccgccccgaccttagctctcaccatcgctcttctactatgaacccccctccccatacccaaccccctggtcaacctcaacctaggcctcctatttattctagccacctctagcctagccgtttactcaatcctctgatcagggtgagcatcaaactcaaactacgccctgatcggcgcactgcgagcagtagcccaaacaatctcatatgaagtcaccctagccatcattctactatcaacattactaataagtggctcctttaacctctccacccttatcacaacacaagaacacctctgattactcctgccatcatgacccttggccataatatgatttatctccacactagcagagaccaaccgaacccccttcgaccttgccgaaggggagtccgaactagtctcaggcttcaacatcgaatacgccgcaggccccttcgccctattcttcatagccgaatacacaaacattattataataaacaccctcaccactacaatcttcctaggaacaacatatgacgcactctcccctgaactctacacaacatattttgtcaccaagaccctacttctaacctccctgttcttatgaattcgaacagcatacccccgattccgctacgaccaactcatacacctcctatgaaaaaacttcctaccactcaccctagcattacttatatgatatgtctccatacccattacaatctccagcattccccctcaaacctaagaaatatgtctgataaaagagttactttgatagagtaaataataggagcttaaacccccttatttctaggactatgagaatcgaacccatccctgagaatccaaaattctccgtgccacctatcacaccccatcctaaagtaaggtcagctaaataagctatcgggcccataccccgaaaatgttggttatacccttcccgtactaattaatcccctggcccaacccgtcatctactctaccatctttgcaggcacactcatcacagcgctaagctcgcactgattttttacctgagtaggcctagaaataaacatgctagcttttattccagttctaaccaaaaaaataaaccctcgttccacagaagctgccatcaagtatttcctcacgcaagcaaccgcatccataatccttctaatagctatcctcttcaacaatatactctccggacaatgaaccataaccaatactaccaatcaatactcatcattaataatcataatggctatagcaataaaactaggaatagccccctttcacttctgagtcccagaggttacccaaggcacccctctgacatccggcctgcttcttctcacatgacaaaaactagcccccatctcaatcatataccaaatctctccctcactaaacgtaagccttctcctcactctctcaatcttatccatcatagcaggcagttgaggtggattaaaccaaacccagctacgcaaaatcttagcatactcctcaattacccacataggatgaataatagcagttctaccgtacaaccctaacataaccattcttaatttaactatttatattatcctaactactaccgcattcctactactcaacttaaactccagcaccacgaccctactactatctcgcacctgaaacaagctaacatgactaacacccttaattccatccaccctcctctccctaggaggcctgcccccgctaaccggctttttgcccaaatgggccattatcgaagaattcacaaaaaacaatagcctcatcatccccaccatcatagccaccatcaccctccttaacctctacttctacctacgcctaatctactccacctcaatcacactactccccatatctaacaacgtaaaaataaaatgacagtttgaacatacaaaacccaccccattcctccccacactcatcgcccttaccacgctactcctacctatctccccttttatactaataatcttatagaaatttaggttaaatacagaccaagagccttcaaagccctcagtaagttgcaatacttaatttctgtaacagctaaggactgcaaaaccccactctgcatcaactgaacgcaaatcagccactttaattaagctaagcccttactagaccaatgggacttaaacccacaaacacttagttaacagctaagcaccctaatcaactggcttcaatctacttctcccgccgccgggaaaaaaggcgggagaagccccggcaggtttgaagctgcttcttcgaatttgcaattcaatatgaaaatcacctcggagctggtaaaaagaggcctaacccctgtctttagatttacagtccaatgcttcactcagccattttacctcacccccactgatgttcgccgaccgttgactattctctacaaaccacaaagacattggaacactatacctattattcggcgcatgagctggagtcctaggcacagctctaagcctccttattcgagccgagctgggccagccaggcaaccttctaggtaacgaccacatctacaacgttatcgtcacagcccatgcatttgtaataatcttcttcatagtaatacccatcataatcggaggctttggcaactgactagttcccctaataatcggtgcccccgatatggcgtttccccgcataaacaacataagcttctgactcttacctccctctctcctactcctgctcgcatctgctatagtggaggccggagcaggaacaggttgaacagtctaccctcccttagcagggaactactcccaccctggagcctccgtagacctaaccatcttctccttacacctagcaggtgtctcctctatcttaggggccatcaatttcatcacaacaattatcaatataaaaccccctgccataacccaataccaaacgcccctcttcgtctgatccgtcctaatcacagcagtcctacttctcctatctctcccagtcctagctgctggcatcactatactactaacagaccgcaacctcaacaccaccttcttcgaccccgccggaggaggagaccccattctataccaacacctattctgatttttcggtcaccctgaagtttatattcttatcctaccaggcttcggaataatctcccatattgtaacttactactccggaaaaaaagaaccatttggatacataggtatggtctgagctatgatatcaattggcttcctagggtttatcgtgtgagcacaccatatatttacagtaggaatagacgtagacacacgagcatatttcacctccgctaccataatcatcgctatccccaccggcgtcaaagtatttagctgactcgccacactccacggaagcaatatgaaatgatctgctgcagtgctctgagccctaggattcatctttcttttcaccgtaggtggcctgactggcattgtattagcaaactcatcactagacatcgtactacacgacacgtactacgttgtagcccacttccactatgtcctatcaataggagctgtatttgccatcataggaggcttcattcactgatttcccctattctcaggctacaccctagaccaaacctacgccaaaatccatttcactatcatattcatcggcgtaaatctaactttcttcccacaacactttctcggcctatccggaatgccccgacgttactcggactaccccgatgcatacaccacatgaaacatcctatcatctgtaggctcattcatttctctaacagcagtaatattaataattttcatgatttgagaagccttcgcttcgaagcgaaaagtcctaatagtagaagaaccctccataaacctggagtgactatatggatgccccccaccctaccacacattcgaagaacccgtatacataaaatctagacaaaaaaggaaggaatcgaaccccccaaagctggtttcaagccaaccccatggcctccatgactttttcaaaaaggtattagaaaaaccatttcataactttgtcaaagttaaattataggctaaatcctatatatcttaatggcacatgcagcgcaagtaggtctacaagacgctacttcccctatcatagaagagcttatcacctttcatgatcacgccctcataatcattttccttatctgcttcctagtcctgtatgcccttttcctaacactcacaacaaaactaactaatactaacatctcagacgctcaggaaatagaaaccgtctgaactatcctgcccgccatcatcctagtcctcatcgccctcccatccctacgcatcctttacataacagacgaggtcaacgatccctcccttaccatcaaatcaattggccaccaatggtactgaacctacgagtacaccgactacggcggactaatcttcaactcctacatacttcccccattattcctagaaccaggcgacctgcgactccttgacgttgacaatcgagtagtactcccgattgaagcccccattcgtataataattacatcacaagacgtcttgcactcatgagctgtccccacattaggcttaaaaacagatgcaattcccggacgtctaaaccaaaccactttcaccgctacacgaccgggggtatactacggtcaatgctctgaaatctgtggagcaaaccacagtttcatgcccatcgtcctagaattaattcccctaaaaatctttgaaatagggcccgtatttaccctatagcaccccctctaccccctctagagcccactgtaaagctaacttagcattaaccttttaagttaaagattaagagaaccaacacctctttacagtgaaatgccccaactaaatactaccgtatggcccaccataattacccccatactccttacactattcctcatcacccaactaaaaacattaaacacaaactaccacctacctccctcaccaaagcccataaaaataaaaaattataacaaaccctgagaaccaaaatgaacgaaaatctgttcgcttcattcattgcccccacaatcctaggcctacccgccgcagtactgatcattctatttccccctctattgatccccacctccaaatatctcatcaacaaccgactaatcaccacccaacaatgactaatcaaactaacctcaaaacaaatgataaccatacacaacactaaaggacgaacctgatctcttatactagtatccttaatcatttttattgccacaactaacctcctcggactcctgcctcactcatttacaccaaccacccaactatctataaacctagccatggccatccccttatgagcgggcgcagtgattataggctttcgctctaagattaaaaatgccctagcccacttcttaccacaaggcacacctacaccccttatccccatactagttattatcgaaaccatcagcctactcattcaaccaatagccctggccgtacgcctaaccgctaacattactgcaggccacctactcatgcacctaattggaagcgccaccctagcaatatcaaccattaaccttccctctacacttatcatcttcacaattctaattctactgactatcctagaaatcgctgtcgccttaatccaagcctacgttttcacacttctagtaagcctctacctgcacgacaacacataatgacccaccaatcacatgcctatcatatagtaaaacccagcccatgacccctaacaggggccctctcagccctcctaatgacctccggcctagccatgtgatttcacttccactccataacgctcctcatactaggcctactaaccaacacactaaccatataccaatgatggcgcgatgtaacacgagaaagcacataccaaggccaccacacaccacctgtccaaaaaggccttcgatacgggataatcctatttattacctcagaagtttttttcttcgcaggatttttctgagccttttaccactccagcctagcccctaccccccaattaggagggcactggcccccaacaggcatcaccccgctaaatcccctagaagtcccactcctaaacacatccgtattactcgcatcaggagtatcaatcacctgagctcaccatagtctaatagaaaacaaccgaaaccaaataattcaagcactgcttattacaattttactgggtctctattttaccctcctacaagcctcagagtacttcgagtctcccttcaccatttccgacggcatctacggctcaacattttttgtagccacaggcttccacggacttcacgtcattattggctcaactttcctcactatctgcttcatccgccaactaatatttcactttacatccaaacatcactttggcttcgaagccgccgcctgatactggcattttgtagatgtggtttgactatttctgtatgtctccatctattgatgagggtcttactcttttagtataaatagtaccgttaacttccaattaactagttttgacaacattcaaaaaagagtaataaacttcgccttaattttaataatcaacaccctcctagccttactactaataattattacattttgactaccacaactcaacggctacatagaaaaatccaccccttacgagtgcggcttcgaccctatatcccccgcccgcgtccctttctccataaaattcttcttagtagctattaccttcttattatttgatctagaaattgccctccttttacccctaccatgagccctacaaacaactaacctgccactaatagttatgtcatccctcttattaatcatcatcctagccctaagtctggcctatgagtgactacaaaaaggattagactgaaccgaattggtatatagtttaaacaaaacgaatgatttcgactcattaaattatgataatcatatttaccaaatgcccctcatttacataaatattatactagcatttaccatctcacttctaggaatactagtatatcgctcacacctcatatcctccctactatgcctagaaggaataatactatcgctgttcattatagctactctcataaccctcaacacccactccctcttagccaatattgtgcctattgccatactagtctttgccgcctgcgaagcagcggtgggcctagccctactagtctcaatctccaacacatatggcctagactacgtacataacctaaacctactccaatgctaaaactaatcgtcccaacaattatattactaccactgacatgactttccaaaaaacacataatttgaatcaacacaaccacccacagcctaattattagcatcatccctctactattttttaaccaaatcaacaacaacctatttagctgttccccaaccttttcctccgaccccctaacaacccccctcctaatactaactacctgactcctacccctcacaatcatggcaagccaacgccacttatccagtgaaccactatcacgaaaaaaactctacctctctatactaatctccctacaaatctccttaattataacattcacagccacagaactaatcatattttatatcttcttcgaaaccacacttatccccaccttggctatcatcacccgatgaggcaaccagccagaacgcctgaacgcaggcacatacttcctattctacaccctagtaggctcccttcccctactcatcgcactaatttacactcacaacaccctaggctcactaaacattctactactcactctcactgcccaagaactatcaaactcctgagccaacaacttaatatgactagcttacacaatagcttttatagtaaagatacctctttacggactccacttatgactccctaaagcccatgtcgaagcccccatcgctgggtcaatagtacttgccgcagtactcttaaaactaggcggctatggtataatacgcctcacactcattctcaaccccctgacaaaacacatagcctaccccttccttgtactatccctatgaggcataattataacaagctccatctgcctacgacaaacagacctaaaatcgctcattgcatactcttcaatcagccacatagccctcgtagtaacagccattctcatccaaaccccctgaagcttcaccggcgcagtcattctcataatcgcccacgggcttacatcctcattactattctgcctagcaaactcaaactacgaacgcactcacagtcgcatcataatcctctctcaaggacttcaaactctactcccactaatagctttttgatgacttctagcaagcctcgctaacctcgccttaccccccactattaacctactgggagaactctctgtgctagtaaccacgttctcctgatcaaatatcactctcctacttacaggactcaacatactagtcacagccctatactccctctacatatttaccacaacacaatggggctcactcacccaccacattaacaacataaaaccctcattcacacgagaaaacaccctcatgttcatacacctatcccccattctcctcctatccctcaaccccgacatcattaccgggttttcctcttgtaaatatagtttaaccaaaacatcagattgtgaatctgacaacagaggcttacgaccccttatttaccgagaaagctcacaagaactgctaactcatgcccccatgtctaacaacatggctttctcaacttttaaaggataacagctatccattggtcttaggccccaaaaattttggtgcaactccaaataaaagtaataaccatgcacactactataaccaccctaaccctgacttccctaattccccccatccttaccaccctcgttaaccctaacaaaaaaaactcatacccccattatgtaaaatccattgtcgcatccacctttattatcagtctcttccccacaacaatattcatgtgcctagaccaagaagttattatctcgaactgacactgagccacaacccaaacaacccagctctccctaagcttcaaactagactacttctccataatattcatccctgtagcattgttcgttacatggtccatcatagaattctcactgtgatatataaactcagacccaaacattaatcagttcttcaaatatctactcatcttcctaattaccatactaatcttagttaccgctaacaacctattccaactgttcatcggctgagagggcgtaggaattatatccttcttgctcatcagttgatgatacgcccgagcagatgccaacacagcagccattcaagcaatcctatacaaccgtatcggcgatatcggtttcatcctcgccttagcatgatttatcctacactccaactcatgagacccacaacaaatagcccttctaaacgctaatccaagcctcaccccactactaggcctcctcctagcagcagcaggcaaatcagcccaattaggtctccacccctgactcccctcagccatagaaggccccaccccagtctcagccctactccactcaagcactatagttgtagcaggaatcttcttactcatccgcttccaccccctagcagaaaatagcccactaatccaaactctaacactatgcttaggcgctatcaccactctgttcgcagcagtctgcgcccttacacaaaatgacatcaaaaaaatcgtagccttctccacttcaagtcaactaggactcataatagttacaatcggcatcaaccaaccacacctagcattcctgcacatctgtacccacgccttcttcaaagccatactatttatgtgctccgggtccatcatccacaaccttaacaatgaacaagatattcgaaaaataggaggactactcaaaaccatacctctcacttcaacctccctcaccattggcagcctagcattagcaggaatacctttcctcacaggtttctactccaaagaccacatcatcgaaaccgcaaacatatcatacacaaacgcctgagccctatctattactctcatcgctacctccctgacaagcgcctatagcactcgaataattcttctcaccctaacaggtcaacctcgcttccccacccttactaacattaacgaaaataaccccaccctactaaaccccattaaacgcctggcagccggaagcctattcgcaggatttctcattactaacaacatttcccccacatcccccttccaaacaacaatccccctctacctaaaactcacagccctcgctgtcactttcctaggacttctaacagccctagacctcaactacctaaccaacaaacttaaaataaaatccccactatgcacattttatttctccaacatactcggattctaccctagcatcacacaccgcacaatcccctatctaggccttcttacgagccaaaacctgcccctactcctcctagacctaacctgactagaaaagctattacctaaaacaatttcacagcaccaaatctccacctccatcatcacctcaacccaaaaaggcataattaaactttacttcctctctttcttcttcccactcatcctaaccctactcctaatcacataacctattcccccgagcaatctcaattacaatatatacaccaacaaacaatgttcaaccagtaactactactaatcaacgcccataatcatacaaagcccccgcaccaataggatcctcccgaatcaaccctgacccctctccttcataaattattcagcttcctacactattaaagtttaccacaaccaccaccccatcatactctttcacccacagcaccaatcctacctccatcgctaaccccactaaaacactcaccaagacctcaacccctgacccccatgcctcaggatactcctcaatagccatcgctgtagtatatccaaagacaaccatcattccccctaaataaattaaaaaaactattaaacccatataacctcccccaaaattcagaataataacacacccgaccacaccgctaacaatcaatactaaacccccataaataggagaaggcttagaagaaaaccccacaaaccccattactaaacccacactcaacagaaacaaagcatacatcattattctcgcacggactacaaccacgaccaatgatatgaaaaaccatcgttgtatttcaactacaagaacaccaatgaccccaatacgcaaaactaaccccctaataaaattaattaaccactcattcatcgacctccccaccccatccaacatctccgcatgatgaaacttcggctcactccttggcgcctgcctgatcctccaaatcaccacaggactattcctagccatgcactactcaccagacgcctcaaccgccttttcatcaatcgcccacatcactcgagacgtaaattatggctgaatcatccgctaccttcacgccaatggcgcctcaatattctttatctgcctcttcctacacatcgggcgaggcctatattacggatcatttctctactcagaaacctgaaacatcggcattatcctcctgcttgcaactatagcaacagccttcataggctatgtcctcccgtgaggccaaatatcattctgaggggccacagtaattacaaacttactatccgccatcccatacattgggacagacctagttcaatgaatctgaggaggctactcagtagacagtcccaccctcacacgattctttacctttcacttcatcttgcccttcattattgcagccctagcagcactccacctcctattcttgcacgaaacgggatcaaacaaccccctaggaatcacctcccattccgataaaatcaccttccacccttactacacaatcaaagacgccctcggcttacttctcttccttctctccttaatgacattaacactattctcaccagacctcctaggcgacccagacaattataccctagccaaccccttaaacacccctccccacatcaagcccgaatgatatttcctattcgcctacacaattctccgatccgtccctaacaaactaggaggcgtccttgccctattactatccatcctcatcctagcaataatccccatcctccatatatccaaacaacaaagcataatatttcgcccactaagccaatcactttattgactcctagccgcagacctcctcattctaacctgaatcggaggacaaccagtaagctacccttttaccatcattggacaagtagcatccgtactatacttcacaacaatcctaatcctaataccaactatctccctaattgaaaacaaaatactcaaatgggcctgtccttgtagtataaactaatacaccagtcttgtaaaccggagatgaaaacctttttccaaggacaaatcagagaaaaagtctttaactccaccattagcacccaaagctaagattctaatttaaactattctctgttctttcatggggaagcagatttgggtaccacccaagtattgactcacccatcaacaaccgctatgtatttcgtacattactgccagccaccatgaatattgtacggtaccataaatacttgaccacctgtagtacataaaaacccaatccacatcaaaaccccctccccatgcttacaagcaagtacagcaatcaaccctcaactatcacacatcaactgcaactccaaagccacccctcacccactaggataccaacaaacctacccacccttaacagtacatagtacataaagccatttaccgtacatagcacattacagtcaaatcccttctcgtccccatggatgacccccctcagataggggtcccttgaccaccatcctccgtgaaatcaatatcccgcacaagagtgctactctcctcgctccgggcccataacacttgggggtagctaaagtgaactgtatccgacatctggttcctacttcagggtcataaagcctaaatagcccacacgttccccttaaataagacatcacgatg

SEQ ID NO: 495 - DNA, 16569 bp, Homo sapiens mitochondrial
  3107: "n" refers to a nucleotide at position 3107 of the Cambridge Reference Sequence (CRS, Anderson et al. 1981 Nature 290:457-465), later determined to be absent from the human mtDNA sequence according to the revised CRS (rCRS, Andrews et al. 1999 Nature Genetics 23:147); "n" therefore represents a single nucleotide deletion at a position corresponding to nucleotide 3107 of SEQ ID NO:1 as provided herein.
gatcacaggtctatcaccctattaaccactcacgggagctctccatgcatttggtattttcgtctggggggtatgcacgcgatagcattgcgagacgctggagccggagcaccctatgtcgcagtatctgtctttgattcctgcctcatcctattatttatcgcacctacgttcaatattacaggcgaacatacttactaaagtgtgttaattaattaatgcttgtaggacataataataacaattgaatgtctgcacagccactttccacacagacatcataacaaaaaatttccaccaaaccccccctcccccgcttctggccacagcacttaaacacatctctgccaaaccccaaaaacaaagaaccctaacaccagcctaaccagatttcaaattttatcttttggcggtatgcacttttaacagtcaccccccaactaacacattattttcccctcccactcccatactactaatctcatcaatacaacccccgcccatcctacccagcacacacacaccgctgctaaccccataccccgaaccaaccaaaccccaaagacaccccccacagtttatgtagcttacctcctcaaagcaatacactgaaaatgtttagacgggctcacatcaccccataaacaaataggtttggtcctagcctttctattagctcttagtaagattacacatgcaagcatccccgttccagtgagttcaccctctaaatcaccacgatcaaaagggacaagcatcaagcacgcagcaatgcagctcaaaacgcttagcctagccacacccccacgggaaacagcagtgattaacctttagcaataaacgaaagtttaactaagctatactaaccccagggttggtcaatttcgtgccagccaccgcggtcacacgattaacccaagtcaatagaagccggcgtaaagagtgttttagatcaccccctccccaataaagctaaaactcacctgagttgtaaaaaactccagttgacacaaaatagactacgaaagtggctttaacatatctgaacacacaatagctaagacccaaactgggattagataccccactatgcttagccctaaacctcaacagttaaatcaacaaaactgctcgccagaacactacgagccacagcttaaaactcaaaggacctggcggtgcttcatatccctctagaggagcctgttctgtaatcgataaaccccgatcaacctcaccacctcttgctcagcctatataccgccatcttcagcaaaccctgatgaaggctacaaagtaagcgcaagtacccacgtaaagacgttaggtcaaggtgtagcccatgaggtggcaagaaatgggctacattttctaccccagaaaactacgatagcccttatgaaacttaagggtcgaaggtggatttagcagtaaactgagagtagagtgcttagttgaacagggccctgaagcgcgtacacaccgcccgtcaccctcctcaagtatacttcaaaggacatttaactaaaacccctacgcatttatatagaggagacaagtcgtaacatggtaagtgtactggaaagtgcacttggacgaaccagagtgtagcttaacacaaagcacccaacttacacttaggagatttcaacttaacttgaccgctctgagctaaacctagccccaaacccactccaccttactaccagacaaccttagccaaaccatttacccaaataaagtataggcgatagaaattgaaacctggcgcaatagatatagtaccgcaagggaaagatgaaaaattataaccaagcataatatagcaaggactaacccctataccttctgcataatgaattaactagaaataactttgcaaggagagccaaagctaagacccccgaaaccagacgagctacctaagaacagctaaaagagcacacccgtctatgtagcaaaatagtgggaagatttataggtagaggcgacaaacctaccgagcctggtgatagctggttgtccaagatagaatcttagttcaactttaaatttgcccacagaaccctctaaatccccttgtaaatttaactgttagtccaaagaggaacagctctttggacactaggaaaaaaccttgtagagagagtaaaaaatttaacacccatagtaggcctaaaagcagccaccaattaagaaagcgttcaagctcaacacccactacctaaaaaatcccaaacatataactgaactcctcacacccaattggaccaatctatcaccctatagaagaactaatgttagtataagtaacatgaaaacattctcctccgcataagcctgcgtcagattaaaacactgaactgacaattaacagcccaatatctacaatcaaccaacaagtcattattaccctcactgtcaacccaacacaggcatgctcataaggaaaggttaaaaaaagtaaaaggaactcggcaaatcttaccccgcctgtttaccaaaaacatcacctctagcatcaccagtattagaggcaccgcctgcccagtgacacatgtttaacggccgcggtaccctaaccgtgcaaaggtagcataatcacttgttccttaaatagggacctgtatgaatggctccacgagggttcagctgtctcttacttttaaccagtgaaattgacctgcccgtgaagaggcgggcatgacacagcaagacgagaagaccctatggagctttaatttattaatgcaaacagtacctaacaaacccacaggtcctaaactaccaaacctgcattaaaaatttcggttggggcgacctcggagcagaacccaacctccgagcagtacatgctaagacttcaccagtcaaagcgaactactatactcaattgatccaataacttgaccaacggaacaagttaccctagggataacagcgcaatcctattctagagtccatatcaacaatagggtttacgacctcgatgttggatcaggacatcccaatggtgcagccgctattaaaggttcgtttgttcaacgattaaagtcctacgtgatctgagttcagaccggagtaatccaggtcggtttctatctacnttcaaattcctccctgtacgaaaggacaagagaaataaggcctacttcacaaagcgccttcccccgtaaatgatatcatctcaacttagtattatacccacacccacccaagaacagggtttgttaagatggcagagcccggtaatcgcataaaacttaaaactttacagtcagaggttcaattcctcttcttaacaacatacccatggccaacctcctactcctcattgtacccattctaatcgcaatggcattcctaatgcttaccgaacgaaaaattctaggccatatacaactacgcaaaggccccaacgttgtaggcccctacgggctactacaacccttcgctgacgccataaaactcttcaccaaagagcccctaaaacccgccacatctaccatcaccctctacatcaccgccccgaccttagctctcaccatcgctcttctactatgaacccccctccccatacccaaccccctggtcaacctcaacctaggcctcctatttattctagccacctctagcctagccgtttactcaatcctctgatcagggtgagcatcaaactcaaactacgccctgatcggcgcactgcgagcagtagcccaaacaatctcatatgaagtcaccctagccatcattctactatcaacattactaataagtggctcctttaacctctccacccttatcacaacacaagaacacctctgattactcctgccatcatgacccttggccataatatgatttatctccacactagcagagaccaaccgaacccccttcgaccttgccgaaggggagtccgaactagtctcaggcttcaacatcgaatacgccgcaggccccttcgccctattcttcatagccgaatacacaaacattattataataaacaccctcaccactacaatcttcctaggaacaacatatgacgcactctcccctgaactctacacaacatattttgtcaccaagaccctacttctaacctccctgttcttatgaattcgaacagcatacccccgattccgctacgaccaactcatacacctcctatgaaaaaacttcctaccactcaccctagcattacttatatgacatgtctccatacccattacaatctccagcattccccctcaaacctaagaaatatgtctgataaaagagttactttgatagagtaaataataggagcttaaacccccttatttctaggactatgagaatcgaacccatccctgagaatccaaaattctccgtgccacctatcacaccccatcctaaagtaaggtcagctaaataagctatcgggcccataccccgaaaatgttggttatacccttcccgtactaattaatcccctggcccaacccgtcatctactctaccatctttgcaggcacactcatcacagcgctaagctcgcactgattttttacctgagtaggcctagaaataaacatgctagcttttattccagttctaaccaaaaaaataaaccctcgttccacagaagctgccatcaagtatttcctcacgcaagcaaccgcatccataatccttctaatagctatcctcttcaacaatatactctccggacaatgaaccataaccaatactaccaatcaatactcatcattaataatcataatggctatagcaataaaactaggaatagccccctttcacttctgagtcccagaggttacccaaggcacccctctgacatccggcctgcttcttctcacatgacaaaaactagcccccatctcaatcatataccaaatctctccctcactaaacgtaagccttctcctcactctctcaatcttatccatcatagcaggcagttgaggtggattaaaccaaacccagctacgcaaaatcttagcatactcctcaattacccacataggatgaataatagcagttctaccgtacaaccctaacataaccattcttaatttaactatttatattatcctaactactaccgcattcctactactcaacttaaactccagcaccacgaccctactactatctcgcacctgaaacaagctaacatgactaacacccttaattccatccaccctcctctccctaggaggcctgcccccgctaaccggctttttgcccaaatgggccattatcgaagaattcacaaaaaacaatagcctcatcatccccaccatcatagccaccatcaccctccttaacctctacttctacctacgcctaatctactccacctcaatcacactactccccatatctaacaacgtaaaaataaaatgacagtttgaacatacaaaacccaccccattcctccccacactcatcgcccttaccacgctactcctacctatctccccttttatactaataatcttatagaaatttaggttaaatacagaccaagagccttcaaagccctcagtaagttgcaatacttaatttctgtaacagctaaggactgcaaaaccccactctgcatcaactgaacgcaaatcagccactttaattaagctaagcccttactagaccaatgggacttaaacccacaaacacttagttaacagctaagcaccctaatcaactggcttcaatctacttctcccgccgccgggaaaaaaggcgggagaagccccggcaggtttgaagctgcttcttcgaatttgcaattcaatatgaaaatcacctcggagctggtaaaaagaggcctaacccctgtctttagatttacagtccaatgcttcactcagccattttacctcacccccactgatgttcgccgaccgttgactattctctacaaaccacaaagacattggaacactatacctattattcggcgcatgagctggagtcctaggcacagctctaagcctccttattcgagccgagctgggccagccaggcaaccttctaggtaacgaccacatctacaacgttatcgtcacagcccatgcatttgtaataatcttcttcatagtaatacccatcataatcggaggctttggcaactgactagttcccctaataatcggtgcccccgatatggcgtttccccgcataaacaacataagcttctgactcttacctccctctctcctactcctgctcgcatctgctatagtggaggccggagcaggaacaggttgaacagtctaccctcccttagcagggaactactcccaccctggagcctccgtagacctaaccatcttctccttacacctagcaggtgtctcctctatcttaggggccatcaatttcatcacaacaattatcaatataaaaccccctgccataacccaataccaaacgcccctcttcgtctgatccgtcctaatcacagcagtcctacttctcctatctctcccagtcctagctgctggcatcactatactactaacagaccgcaacctcaacaccaccttcttcgaccccgccggaggaggagaccccattctataccaacacctattctgatttttcggtcaccctgaagtttatattcttatcctaccaggcttcggaataatctcccatattgtaacttactactccggaaaaaaagaaccatttggatacataggtatggtctgagctatgatatcaattggcttcctagggtttatcgtgtgagcacaccatatatttacagtaggaatagacgtagacacacgagcatatttcacctccgctaccataatcatcgctatccccaccggcgtcaaagtatttagctgactcgccacactccacggaagcaatatgaaatgatctgctgcagtgctctgagccctaggattcatctttcttttcaccgtaggtggcctgactggcattgtattagcaaactcatcactagacatcgtactacacgacacgtactacgttgtagctcacttccactatgtcctatcaataggagctgtatttgccatcataggaggcttcattcactgatttcccctattctcaggctacaccctagaccaaacctacgccaaaatccatttcactatcatattcatcggcgtaaatctaactttcttcccacaacactttctcggcctatccggaatgccccgacgttactcggactaccccgatgcatacaccacatgaaacatcctatcatctgtaggctcattcatttctctaacagcagtaatattaataattttcatgatttgagaagccttcgcttcgaagcgaaaagtcctaatagtagaagaaccctccataaacctggagtgactatatggatgccccccaccctaccacacattcgaagaacccgtatacataaaatctagacaaaaaaggaaggaatcgaaccccccaaagctggtttcaagccaaccccatggcctccatgactttttcaaaaaggtattagaaaaaccatttcataactttgtcaaagttaaattataggctaaatcctatatatcttaatggcacatgcagcgcaagtaggtctacaagacgctacttcccctatcatagaagagcttatcacctttcatgatcacgccctcataatcattttccttatctgcttcctagtcctgtatgcccttttcctaacactcacaacaaaactaactaatactaacatctcagacgctcaggaaatagaaaccgtctgaactatcctgcccgccatcatcctagtcctcatcgccctcccatccctacgcatcctttacataacagacgaggtcaacgatccctcccttaccatcaaatcaattggccaccaatggtactgaacctacgagtacaccgactacggcggactaatcttcaactcctacatacttcccccattattcctagaaccaggcgacctgcgactccttgacgttgacaatcgagtagtactcccgattgaagcccccattcgtataataattacatcacaagacgtcttgcactcatgagctgtccccacattaggcttaaaaacagatgcaattcccggacgtctaaaccaaaccactttcaccgctacacgaccgggggtatactacggtcaatgctctgaaatctgtggagcaaaccacagtttcatgcccatcgtcctagaattaattcccctaaaaatctttgaaatagggcccgtatttaccctatagcaccccctctaccccctctagagcccactgtaaagctaacttagcattaaccttttaagttaaagattaagagaaccaacacctctttacagtgaaatgccccaactaaatactaccgtatggcccaccataattacccccatactccttacactattcctcatcacccaactaaaaatattaaacacaaactaccacctacctccctcaccaaagcccataaaaataaaaaattataacaaaccctgagaaccaaaatgaacgaaaatctgttcgcttcattcattgcccccacaatcctaggcctacccgccgcagtactgatcattctatttccccctctattgatccccacctccaaatatctcatcaacaaccgactaatcaccacccaacaatgactaatcaaactaacctcaaaacaaatgataaccatacacaacactaaaggacgaacctgatctcttatactagtatccttaatcatttttattgccacaactaacctcctcggactcctgcctcactcatttacaccaaccacccaactatctataaacctagccatggccatccccttatgagcgggcgcagtgattataggctttcgctctaagattaaaaatgccctagcccacttcttaccacaaggcacacctacaccccttatccccatactagttattatcgaaaccatcagcctactcattcaaccaatagccctggccgtacgcctaaccgctaacattactgcaggccacctactcatgcacctaattggaagcgccaccctagcaatatcaaccattaaccttccctctacacttatcatcttcacaattctaattctactgactatcctagaaatcgctgtcgccttaatccaagcctacgttttcacacttctagtaagcctctacctgcacgacaacacataatgacccaccaatcacatgcctatcatatagtaaaacccagcccatgacccctaacaggggccctctcagccctcctaatgacctccggcctagccatgtgatttcacttccactccataacgctcctcatactaggcctactaaccaacacactaaccatataccaatgatggcgcgatgtaacacgagaaagcacataccaaggccaccacacaccacctgtccaaaaaggccttcgatacgggataatcctatttattacctcagaagtttttttcttcgcaggatttttctgagccttttaccactccagcctagcccctaccccccaattaggagggcactggcccccaacaggcatcaccccgctaaatcccctagaagtcccactcctaaacacatccgtattactcgcatcaggagtatcaatcacctgagctcaccatagtctaatagaaaacaaccgaaaccaaataattcaagcactgcttattacaattttactgggtctctattttaccctcctacaagcctcagagtacttcgagtctcccttcaccatttccgacggcatctacggctcaacattttttgtagccacaggcttccacggacttcacgtcattattggctcaactttcctcactatctgcttcatccgccaactaatatttcactttacatccaaacatcactttggcttcgaagccgccgcctgatactggcattttgtagatgtggtttgactatttctgtatgtctccatctattgatgagggtcttactcttttagtataaatagtaccgttaacttccaattaactagttttgacaacattcaaaaaagagtaataaacttcgccttaattttaataatcaacaccctcctagccttactactaataattattacattttgactaccacaactcaacggctacatagaaaaatccaccccttacgagtgcggcttcgaccctatatcccccgcccgcgtccctttctccataaaattcttcttagtagctattaccttcttattatttgatctagaaattgccctccttttacccctaccatgagccctacaaacaactaacctgccactaatagttatgtcatccctcttattaatcatcatcctagccctaagtctggcctatgagtgactacaaaaaggattagactgagccgaattggtatatagtttaaacaaaacgaatgatttcgactcattaaattatgataatcatatttaccaaatgcccctcatttacataaatattatactagcatttaccatctcacttctaggaatactagtatatcgctcacacctcatatcctccctactatgcctagaaggaataatactatcgctgttcattatagctactctcataaccctcaacacccactccctcttagccaatattgtgcctattgccatactagtctttgccgcctgcgaagcagcggtgggcctagccctactagtctcaatctccaacacatatggcctagactacgtacataacctaaacctactccaatgctaaaactaatcgtcccaacaattatattactaccactgacatgactttccaaaaaacacataatttgaatcaacacaaccacccacagcctaattattagcatcatccctctactattttttaaccaaatcaacaacaacctatttagctgttccccaaccttttcctccgaccccctaacaacccccctcctaatactaactacctgactcctacccctcacaatcatggcaagccaacgccacttatccagtgaaccactatcacgaaaaaaactctacctctctatactaatctccctacaaatctccttaattataacattcacagccacagaactaatcatattttatatcttcttcgaaaccacacttatccccaccttggctatcatcacccgatgaggcaaccagccagaacgcctgaacgcaggcacatacttcctattctacaccctagtaggctcccttcccctactcatcgcactgatttacactcacaacaccctaggctcactaaacattctactactcactctcactgcccaagaactatcaaactcctgagccaacaacttaatatgactagcttacacaatagcttttatagtaaagatacctctttacggactccacttatgactccctaaagcccatgtcgaagcccccatcgctgggtcaatagtacttgccgcagtactcttaaaactaggcggctatggtataatacgcctcacactcattctcaaccccctgacaaaacacatagcctaccccttccttgtactatccctatgaggcataattataacaagctccatctgcctacgacaaacagacctaaaatcgctcattgcatactcttcaatcagccacatagccctcgtagtaacagccattctcatccaaaccccctgaagcttcaccggcgcagtcattctcataatcgcccacggacttacatcctcattactattctgcctagcaaactcaaactacgaacgcactcacagtcgcatcataatcctctctcaaggacttcaaactctactcccactaatagctttttgatgacttctagcaagcctcgctaacctcgccttaccccccactattaacctactgggagaactctctgtgctagtaaccacgttctcctgatcaaatatcactctcctacttacaggactcaacatactagtcacagccctatactccctctacatatttaccacaacacaatggggctcactcacccaccacattaacaacataaaaccctcattcacacgagaaaacaccctcatgttcatacacctatcccccattctcctcctatccctcaaccccgacatcattaccgggttttcctcttgtaaatatagtttaaccaaaacatcagattgtgaatctgacaacagaggcttacgaccccttatttaccgagaaagctcacaagaactgctaactcatgcccccatgtctaacaacatggctttctcaacttttaaaggataacagctatccattggtcttaggccccaaaaattttggtgcaactccaaataaaagtaataaccatgcacactactataaccaccctaaccctgacttccctaattccccccatccttaccaccctcgttaaccctaacaaaaaaaactcatacccccattatgtaaaatccattgtcgcatccacctttattatcagtctcttccccacaacaatattcatgtgcctagaccaagaagttattatctcgaactgacactgagccacaacccaaacaacccagctctccctaagcttcaaactagactacttctccataatattcatccctgtggcattgttcgttacatggtccatcatagaattctcactgtgatatataaactcagacccaaacattaatcagttcttcaaatatctactcatcttcctaattaccatactaatcttagttaccgctaacaacctattccaactgttcatcggctgagagggcgtaggaattatatccttcttgctcatcagttgatgatacgcccgagcagatgccaacacagcagccattcaagcaatcctatacaaccgtatcggcgatatcggtttcatcctcgccttagcatgatttatcctacactccaactcatgagacccacaacaaatagcccttctaaacgctaatccaagcctcaccccactactaggcctcctcctagcagcagcaggcaaatcagcccaattaggtctccacccctgactcccctcagccatagaaggccccaccccagtctcagccctactccactcaagcactatagttgtagcaggaatcttcttactcatccgcttccaccccctagcagaaaatagcccactaatccaaactctaacactatgcttaggcgctatcaccactctgttcgcagcagtctgcgcccttacacaaaatgacatcaaaaaaatcgtagccttctccacttcaagtcaactaggactcataatagttacaatcggcatcaaccaaccacacctagcattcctgcacatctgtacccacgccttcttcaaagccatactatttatgtgctccgggtccatcatccacaaccttaacaatgaacaagatattcgaaaaataggaggactactcaaaaccatacctctcacttcaacctccctcaccattggcagcctagcattagcaggaatacctttcctcacaggtttctactccaaagaccacatcatcgaaaccgcaaacatatcatacacaaacgcctgagccctatctattactctcatcgctacctccctgacaagcgcctatagcactcgaataattcttctcaccctaacaggtcaacctcgcttccccacccttactaacattaacgaaaataaccccaccctactaaaccccattaaacgcctgacagccggaagcctattcgcaggatttctcattactaacaacatttcccccgcatcccccttccaaacaacaatccccctctacctaaaactcacagccctcgctgtcactttcctaggacttctaacagccctagacctcaactacctaaccaacaaacttaaaataaaatccccactatgcacattttatttctccaacatactcggattctaccctagcatcacacaccgcacaatcccctatctaggccttcttacgagccaaaacctgcccctactcctcctagacctaacctgactagaaaagctattacctaaaacaatttcacagcaccaaatctccacctccatcatcacctcaacccaaaaaggcataattaaactttacttcctctctttcttcttcccactcatcctaaccctactcctaatcacataacctattcccccgagcaatctcaattacaatatatacaccaacaaacaatgttcaaccagtaactactactaatcaacgcccataatcatacaaagcccccgcaccaataggatcctcccgaatcaaccctgacccctctccttcataaattattcagcttcctacactattaaagtttaccacaaccaccaccccatcatactctttcacccacagcaccaatcctacctccatcgctaaccccactaaaacactcaccaagacctcaacccctgacccccatgcctcaggatactcctcaatagccatcgctgtagtatatccaaagacaaccatcattccccctaaataaattaaaaaaactattaaacccatataacctcccccaaaattcagaataataacacacccgaccacaccgctaacaatcaatactaaacccccataaataggagaaggcttagaagaaaaccccacaaaccccactactaaacccacactcaacagaaacaaagcatacatcattattctcgcacggactacaaccacgaccaatgatatgaaaaaccatcgttgtatttcaactacaagaacaccaatgaccccaatacgcaaaattaaccccctaataaaattaattaaccactcactcatcgacctccccaccccatccaacatctccgcatgatgaaacttcggctcactccttggcgcctgcctgatcctccaaatcaccacaggactattcctagccatgcactactcaccagacgcctcaaccgccttttcatcaatcgcccacatcactcgagacgtaaattatggctgaatcatccgctaccttcacgccaatggcgcctcaatattctttatctgcctcttcctacacatcgggcgaggcctatattacggatcatttctctactcagaaacctgaaacatcggcattatcctcctgcttgcaactatagcaacagccttcataggctatgtcctcccgtgaggccaaatatcattctgaggggccacagtaattacaaacttactatccgccatcccatacattgggacagacctagttcaatgaatctgaggaggctactcagtagacagtcccaccctcacacgattctttacctttcacttcatcttgcccttcattattgcagccctagcagcactccacctcctattcttgcacgaaacgggatcaaacaaccccctaggaatcacctcccattccgataaaatcaccttccacccttactacacaatcaaagacgccctcggcttacttctcttcattctctccttaatgacattaacactattctcaccagacctcctaggcgacccagacaattataccctagccaaccccttaaacacccctccccacatcaagcccgaatgatatttcctattcgcctacacaattctccgatccgtccctaacaaactaggaggcgtccttgccctattactatccatcctcatcctagcaataatccccatcctccatatatccaaacaacaaagcataatatttcgcccactaagccaatcactttattgactcctagccgcagacctcctcattctaacctgaatcggaggacaaccagtaagctacccttttaccatcattggacaagtagcatccgtactatacttcacaacaatcctaatcctaataccaactatctccctaattgaaaacaaaatactcaaatgggcctgtccttgtagtataaactaatacaccagtcttgtaaaccggagatgaaaacctttttccaaggacaaatcagagaaaaagtctttaactccaccattagcacccaaagctaagattctaatttaaactattctctgttctttcatggggaagcagatttgggtaccacccaagtattgactcacccatcaacaaccgctatgtatttcgtacattactgccagccaccatgaatattgtacggtaccataaatacttgaccacctgtagtacataaaaacccaatccacatcaaaaccccctccccatgcttacaagcaagtacagcaatcaaccctcaactatcacacatcaactgcaactccaaagccacccctcacccactaggataccaacaaacctacccacccttaacagtacatagtacataaagccatttaccgtacatagcacattacagtcaaatcccttctcgtccccatggatgacccccctcagataggggtcccttgaccaccatcctccgtgaaatcaatatcccgcacaagagtgctactctcctcgctccgggcccataacacttgggggtagctaaagtgaactgtatccgacatctggttcctacttcagggtcataaagcctaaatagcccacacgttccccttaaataagacatcacgatg

SEQ ID NO: 496 - DNA, 16569 bp, Homo sapiens mitochondrial
  3107: "n" refers to a nucleotide at position 3107 of the Cambridge Reference Sequence (CRS, Anderson et al. 1981 Nature 290:457-465), later determined to be absent from the human mtDNA sequence according to the revised CRS (rCRS, Andrews et al. 1999 Nature Genetics 23:147); "n" therefore represents a single nucleotide deletion at a position corresponding to nucleotide 3107 of SEQ ID NO:1 as provided herein.
gatcacaggtctatcaccctattaaccactcacgggagctctccatgcatttggtattttcgtctggggggtatgcacgcgatagcattgcgagacgctggagccggagcaccctatgtcgcagtatctgtctttgattcctgcctcatcctattatttatcgcacctacgttcaatattacaggcgaacatacttactaaagtgtgttaattaattaatgcttgtaggacataataataacaattgaatgtctgcacagccactttccacacagacatcataacaaaaaatttccaccaaaccccccctcccccgcttctggccacagcacttaaacacatctctgccaaaccccaaaaacaaagaaccctaacaccagcctaaccagatttcaaattttatcttttggcggtatgcacttttaacagtcaccccccaactaacacattattttcccctcccactcccatactactaatctcatcaatacaacccccgcccatcctacccagcacacacacaccgctgctaaccccataccccgaaccaaccaaaccccaaagacaccccccacagtttatgtagcttacctcctcaaagcaatacactgaaaatgtttagacgggctcacatcaccccataaacaaataggtttggtcctagcctttctattagctcttagtaagattacacatgcaagcatccccgttccagtgagttcaccctctaaatcaccacgatcaaaagggacaagcatcaagcacgcagcaatgcagctcaaaacgcttagcctagccacacccccacgggaaacagcagtgattaacctttagcaataaacgaaagtttaactaagctatactaaccccagggttggtcaatttcgtgccagccaccgcggtcacacgattaacccaagtcaatagaagccggcgtaaagagtgttttagatcaccccctccccaataaagctaaaactcacctgagttgtaaaaaactccagttgacacaaaatagactacgaaagtggctttaacatatctgaacacacaatagctaagacccaaactgggattagataccccactatgcttagccctaaacctcaacagttaaatcaacaaaactgctcgccagaacactacgagccacagcttaaaactcaaaggacctggcggtgcttcatatccctctagaggagcctgttctgtaatcgataaaccccgatcaacctcaccacctcttgctcagcctatataccgccatcttcagcaaaccctgatgaaggctacaaagtaagcgcaagtacccacgtaaagacgttaggtcaaggtgtagcccatgaggtggcaagaaatgggctacattttctaccccagaaaactacgatagcccttatgaaacttaagggtcgaaggtggatttagcagtaaactgagagtagagtgcttagttgaacagggccctgaagcgcgtacacaccgcccgtcaccctcctcaagtatacttcaaaggacatttaactaaaacccctacgcatttatatagaggagacaagtcgtaacatggtaagtgtactggaaagtgcacttggacgaaccagagtgtagcttaacacaaagcacccaacttacacttaggagatttcaacttaacttgaccgctctgagctaaacctagccccaaacccactccaccttactaccagacaaccttagccaaaccatttacccaaataaagtataggcgatagaaattgaaacctggcgcaatagatatagtaccgcaagggaaagatgaaaaattataaccaagcataatatagcaaggactaacccctataccttctgcataatgaattaactagaaataactttgcaaggagagccaaagctaagacccccgaaaccagacgagctacctaagaacagctaaaagagcacacccgtctatgtagcaaaatagtgggaagatttataggtagaggcgacaaacctaccgagcctggtgatagctggttgtccaagatagaatcttagttcaactttaaatttgcccacagaaccctctaaatccccttgtaaatttaactgttagtccaaagaggaacagctctttggacactaggaaaaaaccttgtagagagagtaaaaaatttaacacccatagtaggcctaaaagcagccaccaattaagaaagcgttcaagctcaacacccactacctaaaaaatcccaaacatataactgaactcctcacacccaattggaccaatctatcaccctatagaagaactaatgttagtataagtaacatgaaaacattctcctccgcataagcctgcgtcagattaaaacactgaactgacaattaacagcccaatatctacaatcaaccaacaagtcattattaccctcactgtcaacccaacacaggcatgctcataaggaaaggttaaaaaaagtaaaaggaactcggcaaatcttaccccgcctgtttaccaaaaacatcacctctagcatcaccagtattagaggcaccgcctgcccagtgacacatgtttaacggccgcggtaccctaaccgtgcaaaggtagcataatcacttgttccttaaatagggacctgtatgaatggctccacgagggttcagctgtctcttacttttaaccagtgaaattgacctgcccgtgaagaggcgggcataacacagcaagacgagaagaccctatggagctttaatttattaatgcaaacagtacctaacaaacccacaggtcctaaactaccaaacctgcattaaaaatttcggttggggcgacctcggagcagaacccaacctccgagcagtacatgctaagacttcaccagtcaaagcgaactactatactcaattgatccaataacttgaccaacggaacaagttaccctagggataacagcgcaatcctattctagagtccatatcaacaatagggtttacgacctcgatgttggatcaggacatcccaatggtgcagccgctattaaaggttcgtttgttcaacgattaaagtcctacgtgatctgagttcagaccggagtaatccaggtcggtttctatctacnttcaaattcctccctgtacgaaaggacaagagaaataaggcctacttcacaaagcgccttcccccgtaaatgatatcatctcaacttagtattatacccacacccacccaagaacagggtttgttaagatggcagagcccggtaatcgcataaaacttaaaactttacagtcagaggttcaattcctcttcttaacaacatacccatggccaacctcctactcctcattgtacccattctaatcgcaatggcattcctaatgcttaccgaacgaaaaattctaggctatatacaactacgcaaaggccccaacgttgtaggcccctacgggctactacaacccttcgctgacgccataaaactcttcaccaaagagcccctaaaacccgccacatctaccatcaccctctacatcaccgccccgaccttagctctcaccatcgctcttctactatgaacccccctccccatacccaaccccctggtcaacctcaacctaggcctcctatttattctagccacctctagcctagccgtttactcaatcctctgatcagggtgagcatcaaactcaaactacgccctgatcggcgcactgcgagcagtagcccaaacaatctcatatgaagtcaccctagccatcattctactatcaacattactaataagtggctcctttaacctctccacccttatcacaacacaagaacacctctgattactcctgccatcatgacccttggccataatatgatttatctccacactagcagagaccaaccgaacccccttcgaccttgccgaaggggagtccgaactagtctcaggcttcaacatcgaatacgccgcaggccccttcgccctattcttcatagccgaatacacaaacattattataataaacaccctcaccactacaatcttcctaggaacaacatatgacgcactctcccctgaactctacacaacatattttgtcaccaagaccctacttctaacctccctgttcttatgaattcgaacagcatacccccgattccgctacgaccaactcatacacctcctatgaaaaaacttcctaccactcaccctagcattacttatatgatatgtctccatacccattacaatctccagcattccccctcaaacctaagaaatatgtctgataaaagagttactttgatagagtaaataataggagcttaaacccccttatttctaggactatgagaatcgaacccatccctgagaatccaaaattctccgtgccacctatcacaccccatcctaaagtaaggtcagctaaataagctatcgggcccataccccgaaaatgttggttatacccttcccgtactaattaatcccctggcccaacccgtcatctactctaccatctttgcaggcacactcatcacagcgctaagctcgcactgattttttacctgagtaggcctagaaataaacatgctagcttttattccagttctaaccaaaaaaataaaccctcgttccacagaagctgccatcaagtatttcctcacgcaagcaaccgcatccataatccttctaatagctatcctcttcaacaatatactctccggacaatgaaccataaccaatactaccaatcaatactcatcattaataatcataatggctatagcaataaaactaggaatagccccctttcacttctgagtcccagaggttacccaaggcacccctctgacatccggcctgcttcttctcacatgacaaaaactagcccccatctcaatcatataccaaatctctccctcactaaacgtaagccttctcctcactctctcaatcttatccatcatagcaggcagttgaggtggattaaaccaaacccagctacgcaaaatcttagcatactcctcaattacccacataggatgaataatagcagttctaccgtacaaccctaacataaccattcttaatttaactatttatattatcctaactactaccgcattcctactactcaacttaaactccagcaccacgaccctactactatctcgcacctgaaacaagctaacatgactaacacccttaattccatccaccctcctctccctaggaggcctgcccccgctaaccggctttttgcccaaatgggccattatcgaagaattcacaaaaaacaatagcctcatcatccccaccatcatagccaccatcaccctccttaacctctacttctacctacgcctaatctactccacctcaatcacactactccccatatctaacaacgtaaaaataaaatgacagtttgaacatacaaaacccaccccattcctccccacactcatcgcccttaccacgctactcctacctatctccccttttatactaataatcttatagaaatttaggttaaatacagaccaagagccttcaaagccctcagtaagttgcaatacttaatttctgtaacagctaaggactgcaaaaccccactctgcatcaactgaacgcaaatcagccactttaattaagctaagcccttactagaccaatgggacttaaacccacaaacacttagttaacagctaagcaccctaatcaactggcttcaatctacttctcccgccgccgggaaaaaaggcgggagaagccccggcaggtttgaagctgcttcttcgaatttgcaattcaatatgaaaatcacctcggagctggtaaaaagaggcctaacccctgtctttagatttacagtccaatgcttcactcagccattttacctcacccccactgatgttcgccgaccgttgactattctctacaaaccacaaagacattggaacactatacctattattcggcgcatgagctggagtcctaggcacagctctaagcctccttattcgagccgagctgggccagccaggcaaccttctaggtaacgaccacatctacaacgttatcgtcacagcccatgcatttgtaataatcttcttcatagtaatacccatcataatcggaggctttggcaactgactagttcccctaataatcggtgcccccgatatggcgtttccccgcataaacaacataagcttctgactcttacctccctctctcctactcctgctcgcatctgctatagtggaggccggagcaggaacaggttgaacagtctaccctcccttagcagggaactactcccaccctggagcctccgtagacctaaccatcttctccttacacctagcaggtgtctcctctatcttaggggccatcaatttcatcacaacaattatcaatataaaaccccctgccataacccaataccaaacgcccctcttcgtctgatccgtcctaatcacagcagtcctacttctcctatctctcccagtcctagctgctggcatcactatactactaacagaccgcaacctcaacaccaccttcttcgaccccgccggaggaggagaccccattctataccaacacctattctgatttttcggtcaccctgaagtttatattcttatcctaccaggcttcggaataatctcccatattgtaacttactactccggaaaaaaagaaccatttggatacataggtatggtctgagctatgatatcaattggcttcctagggtttatcgtgtgagcacaccatatatttacagtaggaatagacgtagacacacgagcatatttcacctccgctaccataatcatcgctatccccaccggcgtcaaagtatttagctgactcgccacactccacggaagcaatatgaaatgatctgctgcagtgctctgagccctaggattcatctttcttttcaccgtaggtggcctgactggcattgtattagcaaactcatcactagacatcgtactacacgacacgtactacgttgtagcccacttccactatgtcctatcaataggagctgtatttgccatcataggaggcttcattcactgatttcccctattctcaggctacaccctagaccaaacctacgccaaaatccatttcactatcatattcatcggcgtaaatctaactttcttcccacaacactttctcggcctatccggaatgccccgacgttactcggactaccccgatgcatacaccacatgaaacatcctatcatctgtaggctcattcatttctctaacagcagtaatattaataattttcatgatttgagaagccttcgcttcgaagcgaaaagtcctaatagtagaagaaccctccataaacctggagtgactatatggatgccccccaccctaccacacattcgaagaacccgtatacataaaatctagacaaaaaaggaaggaatcgaaccccccaaagctggtttcaagccaaccccatggcctccatgactttttcaaaaaggtattagaaaaaccatttcataactttgtcaaagttaaattataggctaaatcctatatatcttaatggcacatgcagcgcaagtaggtctacaagacgctacttcccctatcatagaagagcttatcacctttcatgatcacgccctcataatcattttccttatctgcttcctagtcctgtatgcccttttcctaacactcacaacaaaactaactaatactaacatctcagacgctcaggaaatagaaaccgtctgaactatcctgcccgccatcatcctagtcctcatcgccctcccatccctacgcatcctttacataacagacgaggtcaacgatccctcccttaccatcaaatcaattggccaccaatggtactgaacctacgagtacaccgactacggcggactaatcttcaactcctacatacttcccccattattcctagaaccaggcgacctgcgactccttgacgttgacaatcgagtagtactcccgattgaagcccccattcgtataataattacatcacaagacgtcttgcactcatgagctgtccccacattaggcttaaaaacagatgcaattcccggacgtctaaaccaaaccactttcaccgctacacgaccgggggtatactacggtcaatgctctgaaatctgtggagcaaaccacagtttcatgcccatcgtcctagaattaattcccctaaaaatctttgaaatagggcccgtatttaccctatagcaccccctctaccccctctagagcccactgtaaagctaacttagcattaaccttttaagttaaagattaagagaaccaacacctctttacagtgaaatgccccaactaaatactaccgtatggcccaccataattacccccatactccttacactattcctcatcacccaactaaaaatattaaacacaaactaccacctacctccctcaccaaagcccataaaaataaaaaattataacaaaccctgagaaccaaaatgaacgaaaatctgttcgcttcattcattgcccccacaatcctaggcctacccgccgcagtactgatcattctatttccccctctattgatccccacctccaaatatctcatcaacaaccgactaatcaccacccaacaatgactaatcaaactaacctcaaaacaaatgataaccatacacaacactaaaggacgaacctgatctcttatactagtatccttaatcatttttattgccacaactaacctcctcggactcctgcctcactcatttacaccaaccacccaactatctataaacctagccatggccatccccttatgagcgggcgcagtgattataggctttcgctctaagattaaaaatgccctagcccacttcttaccacaaggcacacctacaccccttatccccatactagttattatcgaaaccatcagcctactcattcaaccaatagccctggccgtacgcctaaccgctaacattactgcaggccacctactcatgcacctaattggaagcgccaccctagcaatatcaaccattaaccttccctctacacttatcatcttcacaattctaattctactgactatcctagaaatcgctgtcgccttaatccaagcctacgttttcacacttctagtaagcctctacctgcacgacaacacataatgacccaccaatcacatgcctatcatatagtaaaacccagcccatgacccctaacaggggccctctcagccctcctaatgacctccggcctagccatgtgatttcacttccactccataacgctcctcatactaggcctactaaccaacacactaaccatataccaatgatggcgcgatgtaacacgagaaagcacataccaaggccaccacacaccacctgtccaaaaaggccttcgatacgggataatcctatttattacctcagaagtttttttcttcgcaggatttttctgagccttttaccactccagcctagcccctaccccccaattaggagggcactggcccccaacaggcatcaccccgctaaatcccctagaagtcccactcctaaacacatccgtattactcgcatcaggagtatcaatcacctgagctcaccatagtctaatagaaaacaaccgaaaccaaataattcaagcactgcttattacaattctactgggtctctattttaccctcctacaagcctcagagtacttcgagtctcccttcaccatttccgacggcatctacggctcaacattttttgtagccacaggcttccacggacttcacgtcattattggctcaactttcctcactatctgcttcatccgccaactaatatttcactttacatccaaacatcactttggcttcgaagccgccgcctgatactggcattttgtagatgtggtttgactatttctgtatgtctccatctattgatgagggtcttactcttttagtataaatagtaccgttaacttccaattaactagttttgacaacattcaaaaaagagtaataaacttcgccttaattttaataatcaacaccctcctagccttactactaataattattacattttgactaccacaactcaacggctacatagaaaaatccaccccttacgagtgcggcttcgaccctatatcccccgcccgcgtccctttctccataaaattcttcttagtagctattaccttcttattatttgatctagaaattgccctccttttacccctaccatgagccctacaaacaactaacctgccactaatagttatgtcatccctcttattaatcatcatcctagccctaagtctggcctatgagtgactacaaaaaggattagactgaaccgaattggtatatagtttaaacaaaacgaatgatttcgactcattaaattatgataatcatatttaccaaatgcccctcatttacataaatattatactagcatttaccatctcacttctaggaatactagtatatcgctcacacctcatatcctccctactatgcctagaaggaataatactatcgctgttcattatagctactctcataaccctcaacacccactccctcttagccaatattgtgcctattgccatactagtctttgccgcctgcgaagcagcggtgggcctagccctactagtctcaatctccaacacatatggcctagactacgtacataacctaaacctactccaatgctaaaactaatcgtcccaacaattatattactaccactgacatgactttccaaaaaacacataatttgaatcaacacaaccacccacagcctaattattagcatcatccctctactattttttaaccaaatcaacaacaacctatttagctgttccccaaccttttcctccgaccccctaacaacccccctcctaatactaactacctgactcctacccctcacaatcatggcaagccaacgccacttatccagtgaaccactatcacgaaaaaaactctacctctctatactaatctccctacaaatctccttaattataacattcacagccacagaactaatcatattttatatcttcttcgaaaccacacttatccccaccttggctatcatcacccgatgaggcaaccagccagaacgcctgaacgcaggcacatacttcctattctacaccctagtaggctcccttcccctactcatcgcactaatttacactcacaacaccctaggctcactaaacattctactactcactctcactgcccaagaactatcaaactcctgagccaacaacttaatatgactagcttacacaatagcttttatagtaaagatacctctttacggactccacttatgactccctaaagcccatgtcgaagcccccatcgctgggtcaatagtacttgccgcagtactcttaaaactaggcggctatggtataatacgcctcacactcattctcaaccccctgacaaaacacatagcctaccccttccttgtactatccctatgaggcataattataacaagctccatctgcctacgacaaacagacctaaaatcgctcattgcatactcttcaatcagccacatagccctcgtagtaacagccattctcatccaaaccccctgaagcttcaccggcgcagtcattctcataatcgcccacgggcttacatcctcattactattctgcctagcaaactcaaactacgaacgcactcacagtcgcatcataatcctctctcaaggacttcaaactctactcccactaatagctttttgatgacttctagcaagcctcgctaacctcgccttaccccccactattaacctactgggagaactctctgtgctagtaaccacgttctcctgatcaaatatcactctcctacttacaggactcaacatactagtcacagccctatactccctctacatatttaccacaacacaatggggctcactcacccaccacattaacaacataaaaccctcattcacacgagaaaacaccctcatgttcatacacctatcccccattctcctcctatccctcaaccccgacatcattaccgggttttcctcttgtaaatatagtttaaccaaaacatcagattgtgaatctgacaacagaggcttacgaccccttatttaccgagaaagctcacaagaactgctaactcatgcccccatgtctaacaacatggctttctcaacttttaaaggataacagctatccattggtcttaggccccaaaaattttggtgcaactccaaataaaagtaataaccatgcacactactataaccaccctaaccctgacttccctaattccccccatccttaccaccctcgttaaccctaacaaaaaaaactcatacccccattatgtaaaatccattgtcgcatccacctttattatcagtctcttccccacaacaatattcatgtgcctagaccaagaagttattatctcgaactgacactgagccacaacccaaacaacccagctctccctaagcttcaaactagactacttctccataatattcatccctgtagcattgttcgttacatggtccatcatagaattctcactgtgatatataaactcagacccaaacattaatcagttcttcaaatatctactcatcttcctaattaccatactaatcttagttaccgctaacaacctattccaactgttcatcggctgagagggcgtaggaattatatccttcttgctcatcagttgatgatacgcccgagcagatgccaacacagcagccattcaagcaatcctatacaaccgtatcggcgatatcggtttcatcctcgccttagcatgatttatcctacactccaactcatgagacccacaacaaatagcccttctaaacgctaatccaagcctcaccccactactaggcctcctcctagcagcagcaggcaaatcagcccaattaggtctccacccctgactcccctcagccatagaaggccccaccccagtctcagccctactccactcaagcactatagttgtagcaggaatcttcttactcatccgcttccaccccctagcagaaaatagcccactaatccaaactctaacactatgcttaggcgctatcaccactctgttcgcagcagtctgcgcccttacacaaaatgacatcaaaaaaatcgtagccttctccacttcaagtcaactaggactcataatagttacaatcggcatcaaccaaccacacctagcattcctgcacatctgtacccacgccttcttcaaagccatactatttatgtgctccgggtccatcatccacaaccttaacaatgaacaagatattcgaaaaataggaggactactcaaaaccatacctctcacttcaacctccctcaccattggcagcctagcattagcaggaatacctttcctcacaggtttctactccaaagaccacatcatcgaaaccgcaaacatatcatacacaaacgcctgagccctatctattactctcatcgctacctccctgacaagcgcctatagcactcgaataattcttctcaccctaacaggtcaacctcgcttccccacccttactaacattaacgaaaataaccccaccctactaaaccccattaaacgcctggcagccggaagcctattcgcaggatttctcattactaacaacatttcccccgcatcccccttccaaacaacaatccccctctacctaaaactcacagccctcgctgtcactttcctaggacttctaacagccctagacctcaactacctaaccaacaaacttaaaataaaatccccactatgcacattttatttctccaacatactcggattctaccctagcatcacacaccgcacaatcccctatctaggccttcttacgagccaaaacctgcccctactcctcctagacctaacctgactagaaaagctattacctaaaacaatttcacagcaccaaatctccacctccatcatcacctcaacccaaaaaggcataattaaactttacttcctctctttcttcttcccactcatcctaaccctactcctaatcacataacctattcccccgagcaatctcaattacaatatatacaccaacaaacaatgttcaaccagtaactactactaatcaacgcccataatcatacaaagcccccgcaccaataggatcctcccgaatcaaccctgacccctctccttcataaattattcagcttcctacactattaaagtttaccacaaccaccaccccatcatactctttcacccacagcaccaatcctacctccatcgctaaccccactaaaacactcaccaagacctcaacccctgacccccatgcctcaggatactcctcaatagccatcgctgtagtatatccaaagacaaccatcattccccctaaataaattaaaaaaactattaaacccatataacctcccccaaaattcagaataataacacacccgaccacaccgctaacaatcaatactaaacccccataaataggagaaggcttagaagaaaaccccacaaaccccattactaaacccacactcaacagaaacaaagcatacatcattattctcgcacggactacaaccacgaccaatgatatgaaaaaccatcgttgtatttcaactacaagaacaccaatgaccccaatacgcaaaactaaccccctaataaaattaattaaccactcattcatcgacctccccaccccatccaacatctccgcatgatgaaacttcggctcactccttggcgcctgcctgatcctccaaatcaccacaggactattcctagccatgcactactcaccagacgcctcaaccgccttttcatcaatcgcccacatcactcgagacgtaaattacggctgaatcatccgctaccttcacgccaatggcgcctcaatattctttatctgcctcttcctacacatcgggcgaggcctatattacggatcatttctctactcagaaacctgaaacatcggcattatcctcctgcttgcaactatagcaacagccttcataggctatgtcctcccgtgaggccaaatatcattctgaggggccacagtaattacaaacttactatccgccatcccatacattgggacagacctagttcaatgaatctgaggaggctactcagtagacagtcccaccctcacacgattctttacctttcacttcatcttgcccttcattattgcagccctagcagcactccacctcctattcttgcacgaaacgggatcaaacaaccccctaggaatcacctcccattccgataaaatcaccttccacccttactacacaatcaaagacgccctcggcttacttctcttccttctctccttaatgacattaacactattctcaccagacctcctaggcgacccagacaattataccctagccaaccccttaaacacccctccccacatcaagcccgaatgatatttcctattcgcctacacaattctccgatccgtccctaacaaactaggaggcgtccttgccctattactatccatcctcatcctagcaataatccccatcctccatatatccaaacaacaaagcataatatttcgcccactaagccaatcactttattgactcctagccgcagacctcctcattctaacctgaatcggaggacaaccagtaagctacccttttaccatcattggacaagtagcatccgtactatacttcacaacaatcctaatcctaataccaactatctccctaattgaaaacaaaatactcaaatgggcctgtccttgtagtataaactaatacaccagtcttgtaaaccggagatgaaaacctttttccaaggacaaatcagagaaaaagtctttaactccaccattagcacccaaagctaagattctaatttaaactattctctgttctttcatggggaagcagatttgggtaccacccaagtattgactcacccatcaacaaccgctatgtatttcgtacattactgccagccaccatgaatattgtacggtaccataaatacttgaccacctgtagtacataaaaacccaatccacatcaaaaccccctccccatgcttacaagcaagtacagcaatcaaccctcaactatcacacatcaactgcaactccaaagccacccctcacccactaggataccaacaaacctacccacccttaacagtacatagtacataaagccatttaccgtacatagcacattacagtcaaatcccttctcgtccccatggatgacccccctcagataggggtcccttgaccaccatcctccgtgaaatcaatatcccgcacaagagtgctactctcctcgctccgggcccataacacttgggggtagctaaagtgaactgtatccgacatctggttcctacttcagggtcataaagcctaaatagcccacacgttccccttaaataagacatcacgatg

SEQ ID NO: 497 - DNA, 16569 bp, Homo sapiens mitochondrial
  3107: "n" refers to a nucleotide at position 3107 of the Cambridge Reference Sequence (CRS, Anderson et al. 1981 Nature 290:457-465), later determined to be absent from the human mtDNA sequence according to the revised CRS (rCRS, Andrews et al. 1999 Nature Genetics 23:147); "n" therefore represents a single nucleotide deletion at a position corresponding to nucleotide 3107 of SEQ ID NO:1 as provided herein.
gatcacaggtctatcaccctattaaccactcacgggagctctccatgcatttggtattttcgtctggggggtatgcacgcgatagcattgcgagacgctggagccggagcaccctatgtcgcagtatctgtctttgattcctgcctcatcctattatttatcgcacctacgttcaatattacaggcgaacatacttactaaagtgtgttaattaattaatgcttgtaggacataataataacaattgaatgtctgcacagccactttccacacagacatcataacaaaaaatttccaccaaaccccccctcccccgcttctggccacagcacttaaacacatctctgccaaaccccaaaaacaaagaaccctaacaccagcctaaccagatttcaaattttatcttttggcggtatgcacttttaacagtcaccccccaactaacacattattttcccctcccactcccatactactaatctcatcaatacaacccccgcccatcctacccagcacacacacaccgctgctaaccccataccccgaaccaaccaaaccccaaagacaccccccacagtttatgtagcttacctcctcaaagcaatacactgaaaatgtttagacgggctcacatcaccccataaacaaataggtttggtcctagcctttctattagctcttagtaagattacacatgcaagcatccccgttccagtgagttcaccctctaaatcaccacgatcaaaagggacaagcatcaagcacgcagcaatgcagctcaaaacgcttagcctagccacacccccacgggaaacagcagtgattaacctttagcaataaacgaaagtttaactaagctatactaaccccagggttggtcaatttcgtgccagccaccgcggtcacacgattaacccaagtcaatagaagccggcgtaaagagtgttttagatcaccccctccccaataaagctaaaactcacctgagttgtaaaaaactccagttgacacaaaatagactacgaaagtggctttaacatatctgaacacacaatagctaagacccaaactgggattagataccccactatgcttagccctaaacctcaacagttaaatcaacaaaactgctcgccagaacactacgagccacagcttaaaactcaaaggacctggcggtgcttcatatccctctagaggagcctgttctgtaatcgataaaccccgatcaacctcaccacctcttgctcagcctatataccgccatcttcagcaaaccctgatgaaggctacaaagtaagcgcaagtacccacgtaaagacgttaggtcaaggtgtagcccatgaggtggcaagaaatgggctacattttctaccccagaaaactacgatagcccttatgaaacttaagggtcgaaggtggatttagcagtaaactgagagtagagtgcttagttgaacagggccctgaagcgcgtacacaccgcccgtcaccctcctcaagtatacttcaaaggacatttaactaaaacccctacgcatttatatagaggagacaagtcgtaacatggtaagtgtactggaaagtgcacttggacgaaccagagtgtagcttaacacaaagcacccaacttacacttaggagatttcaacttaacttgaccgctctgagctaaacctagccccaaacccactccaccttactaccagacaaccttagccaaaccatttacccaaataaagtataggcgatagaaattgaaacctggcgcaatagatatagtaccgcaagggaaagatgaaaaattataaccaagcataatatagcaaggactaacccctataccttctgcataatgaattaactagaaataactttgcaaggagaaccaaagctaagacccccgaaaccagacgagctacctaagaacagctaaaagagcacacccgtctatgtagcaaaatagtgggaagatttataggtagaggcgacaaacctaccgagcctggtgatagctggttgtccaagatagaatcttagttcaactttaaatttgcccacagaaccctctaaatccccttgtaaatttaactgttagtccaaagaggaacagctctttggacactaggaaaaaaccttgtagagagagtaaaaaatttaacacccatagtaggcctaaaagcagccaccaattaagaaagcgttcaagctcaacacccactacctaaaaaatcccaaacatataactgaactcctcacacccaattggaccaatctatcaccctatagaagaactaatgttagtataagtaacatgaaaacattctcctccgcataagcctgcgtcagattaaaacactgaactgacaattaacagcccaatatctacaatcaaccaacaagtcattattaccctcactgtcaacccaacacaggcatgctcataaggaaaggttaaaaaaagtaaaaggaactcggcaaatcttaccccgcctgtttaccaaaaacatcacctctagcatcaccagtattagaggcaccgcctgcccagtgacacatgtttaacggccgcggtaccctaaccgtgcaaaggtagcataatcacttgttccttaaatagggacctgtatgaatggctccacgagggttcagctgtctcttacttttaaccagtgaaattgacctgcccgtgaagaggcgggcatgacacagcaagacgagaagaccctatggagctttaatttattaatgcaaacagtacctaacaaacccacaggtcctaaactaccaaacctgcattaaaaatttcggttggggcgacctcggagcagaacccaacctccgagcagtacatgctaagacttcaccagtcaaagcgaactactatactcaattgatccaataacttgaccaacggaacaagttaccctagggataacagcgcaatcctattctagagtccatatcaacaatagggtttacgacctcgatgttggatcaggacatcccaatggtgcagccgctattaaaggttcgtttgttcaacgattaaagtcctacgtgatctgagttcagaccggagtaatccaggtcggtttctatctacnttcaaattcctccctgtacgaaaggacaagagaaataaggcctacttcacaaagcgccttcccccgtaaatgatatcatctcaacttagtattatacccacacccacccaagaacagggtttgttaagatggcagagcccggtaatcgcataaaacttaaaactttacagtcagaggttcaattcctcttcttaacaacatacccatggccaacctcctactcctcattgtacccattctaatcgcaatggcattcctaatgcttaccgaacgaaaaattctaggctatatacaactacgcaaaggccccaacgttgtaggcccctacgggctactacaacccttcgctgacgccataaaactcttcaccaaagagcccctaaaacccgccacatctaccatcaccctctacatcaccgccccgaccttagctctcaccatcgctcttctactatgaacccccctccccatacccaaccccctggtcaacctcaacctaggcctcctatttattctagccacctctagcctagccgtttactcaatcctctgatcagggtgagcatcaaactcaaactacgccctgatcggcgcactgcgagcagtagcccaaacaatctcatatgaagtcaccctagccatcattctactatcaacattactaataagtggctcctttaacctctccacccttatcacaacacaagaacacctctgattactcctgccatcatgacccttggccataatatgatttatctccacactagcagagaccaaccgaacccccttcgaccttgccgaaggggagtccgaactagtctcaggcttcaacatcgaatacgccgcaggccccttcgccctattcttcatagccgaatacacaaacattattataataaacaccctcaccactacaatcttcctaggaacaacatatgacgcactctcccctgaactctacacaacatattttgtcaccaagaccctacttctaacctccctgttcttatgaattcgaacagcatacccccgattccgctacgaccaactcatacacctcctatgaaaaaacttcctaccactcaccctagcattacttatatgacatgtctccatacccattacaatctccagcattccccctcaaacctaagaaatatgtctgataaaagagttactttgatagagtaaataataggagcttaaacccccttatttctaggactatgagaatcgaacccatccctgagaatccaaaattctccgtgccacctatcacaccccatcctaaagtaaggtcagctaaataagctatcgggcccataccccgaaaatgttggttatacccttcccgtactaattaatcccctggcccaacccgtcatctactctaccatctttgcaggcacactcatcacagcgctaagctcgcactgattttttacctgagtaggcctagaaataaacatgctagcttttattccagttctaaccaaaaaaataaaccctcgttccacagaagctgccatcaagtatttcctcacgcaagcaaccgcatccataatccttctaatagctatcctcttcaacaatatactctccggacaatgaaccataaccaatactaccaatcaatactcatcattaataatcataatggctatagcaataaaactaggaatagccccctttcacttctgagtcccagaggttacccaaggcacccctctgacatccggcctgcttcttctcacatgacaaaaactagcccccatctcaatcatataccaaatctctccctcactaaacgtaagccttctcctcactctctcaatcttatccatcatagcaggcagttgaggtggattaaaccaaacccagctacgcaaaatcttagcatactcctcaattacccacataggatgaataatagcagttctaccgtacaaccctaacataaccattcttaatttaactatttatattatcctaactactaccgcattcctactactcaacttaaactccagcaccacgaccctactactatctcgcacctgaaacaagctaacatgactaacacccttaattccatccaccctcctctccctaggaggcctgcccccgctaaccggctttttgcccaaatgggccattatcgaagaattcacaaaaaacaatagcctcatcatccccaccatcatagccaccatcaccctccttaacctctacttctacctacgcctaatctactccacctcaatcacactactccccatatctaacaacgtaaaaataaaatgacagtttgaacatacaaaacccaccccattcctccccacactcatcgcccttaccacgctactcctacctatctccccttttatactaataatcttatagaaatttaggttaaatacagaccaagagccttcaaagccctcagtaagttgcaatacttaatttctgtaacagctaaggactgcaaaaccccactctgcatcaactgaacgcaaatcagccactttaattaagctaagcccttactagaccaatgggacttaaacccacaaacacttagttaacagctaagcaccctaatcaactggcttcaatctacttctcccgccgccgggaaaaaaggcgggagaagccccggcaggtttgaagctgcttcttcgaatttgcaattcaatatgaaaatcacctcggagctggtaaaaagaggcctaacccctgtctttagatttacagtccaatgcttcactcagccattttacctcacccccactgatgttcgccgaccgttgactattctctacaaaccacaaagacattggaacactatacctattattcggcgcatgagctggagtcctaggcacagctctaagcctccttattcgagccgagctgggccagccaggcaaccttctaggtaacgaccacatctacaacgttatcgtcacagcccatgcatttgtaataatcttcttcatagtaatacccatcataatcggaggctttggcaactgactagttcccctaataatcggtgcccccgatatggcgtttccccgcataaacaacataagcttctgactcttacctccctctctcctactcctgctcgcatctgctatagtggaggccggagcaggaacaggttgaacagtctaccctcccttagcagggaactactcccaccctggagcctccgtagacctaaccatcttctccttacacctagcaggtgtctcctctatcttaggggccatcaatttcatcacaacaattatcaatataaaaccccctgccataacccaataccaaacgcccctcttcgtctgatccgtcctaatcacagcagtcctacttctcctatctctcccagtcctagctgctggcatcactatactactaacagaccgcaacctcaacaccaccttcttcgaccccgccggaggaggagaccccattctataccaacacctattctgatttttcggtcaccctgaagtttatattcttatcctaccaggcttcggaataatctcccatattgtaacttactactccggaaaaaaagaaccatttggatacataggtatggtctgagctatgatatcaattggcttcctagggtttatcgtgtgagcacaccatatatttacagtaggaatagacgtagacacacgagcatatttcacctccgctaccataatcatcgctatccccaccggcgtcaaagtatttagctgactcgccacactccacggaagcaatatgaaatgatctgctgcagtgctctgagccctaggattcatctttcttttcaccgtaggtggcctgactggcattgtattagcaaactcatcactagacatcgtactacacgacacgtactacgttgtagctcacttccactatgtcctatcaataggagctgtatttgccatcataggaggcttcattcactgatttcccctattctcaggctacaccctagaccaaacctacgccaaaatccatttcactatcatattcatcggcgtaaatctaactttcttcccacaacactttctcggcctatccggaatgccccgacgttactcggactaccccgatgcatacaccacatgaaacatcctatcatctgtaggctcattcatttctctaacagcagtaatattaataattttcatgatttgagaagccttcgcttcgaagcgaaaagtcctaatagtagaagaaccctccataaacctggagtgactatatggatgccccccaccctaccacacattcgaagaacccgtatacataaaatctagacaaaaaaggaaggaatcgaaccccccaaagctggtttcaagccaaccccatggcctccatgactttttcaaaaaggtattagaaaaaccatttcataactttgtcaaagttaaattataggctaaatcctatatatcttaatggcacatgcagcgcaagtaggtctacaagacgctacttcccctatcatagaagagcttatcacctttcatgatcacgccctcataatcattttccttatctgcttcctagtcctgtatgcccttttcctaacactcacaacaaaactaactaatactaacatctcagacgctcaggaaatagaaaccgtctgaactatcctgcccgccatcatcctagtcctcatcgccctcccatccctacgcatcctttacataacagacgaggtcaacgatccctcccttaccatcaaatcaattggccaccaatggtactgaacctacgagtacaccgactacggcggactaatcttcaactcctacatacttcccccattattcctagaaccaggcgacctgcgactccttgacgttgacaatcgagtagtactcccgattgaagcccccattcgtataataattacatcacaagacgtcttgcactcatgagctgtccccacattaggcttaaaaacagatgcaattcccggacgtctaaaccaaaccactttcaccgctacacgaccgggggtatactacggtcaatgctctgaaatctgtggagcaaaccacagtttcatgcccatcgtcctagaattaattcccctaaaaatctttgaaatagggcccgtatttaccctatagcaccccctctaccccctctagagcccactgtaaagctaacttagcattaaccttttaagttaaagattaagagaaccaacacctctttacagtgaaatgccccaactaaatactaccgtatggcccaccataattacccccatactccttacactattcctcatcacccaactaaaaatattaaacacaaactaccacctacctccctcaccaaagcccataaaaataaaaaattataacaaaccctgagaaccaaaatgaacgaaaatctgttcgcttcattcattgcccccacaatcctaggcctacccgccgcagtactgatcattctatttccccctctattgatccccacctccaaatatctcatcaacaaccgactaatcaccacccaacaatgactaatcaaactaacctcaaaacaaatgataaccatacacaacactaaaggacgaacctgatctcttatactagtatccttaatcatttttattgccacaactaacctcctcggactcctgcctcactcatttacaccaaccacccaactatctataaacctagccatggccatccccttatgagcgggcgcagtgattataggctttcgctctaagattaaaaatgccctagcccacttcttaccacaaggcacacctacaccccttatccccatactagttattatcgaaaccatcagcctactcattcaaccaatagccctggccgtacgcctaaccgctaacattactgcaggccacctactcatgcacctaattggaagcgccaccctagcaatatcaaccattaaccttccctctacacttatcatcttcacaattctaattctactgactatcctagaaatcgctgtcgccttaatccaagcctacgttttcacacttctagtaagcctctacctgcacgacaacacataatgacccaccaatcacatgcctatcatatagtaaaacccagcccatgacccctaacaggggccctctcagccctcctaatgacctccggcctagtcatgtgatttcacttccactccataacgctcctcatactaggcctactaaccaacacactaaccatataccaatgatggcgcgatgtaacacgagaaagcacataccaaggccaccacacaccacctgtccaaaaaggccttcgatacgggataatcctatttattacctcagaagtttttttcttcgcaggatttttctgagccttttaccactccagcctagcccctaccccccaattaggagggcactggcccccaacaggcatcaccccgctaaatcccctagaagtcccactcctaaacacatccgtattactcgcatcaggagtatcaatcacctgagctcaccatagtctaatagaaaacaaccgaaaccaaataattcaagcactgcttattacaattttactgggtctctattttaccctcctacaagcctcagagtacttcgagtctcccttcaccatttccgacggcatctacggctcaacattttttgtagccacaggcttccacggacttcacgtcattattggctcaactttcctcactatctgcttcatccgccaactaatatttcactttacatccaaacatcactttggcttcgaagccgccgcctgatactggcattttgtagatgtggtttgactatttctgtatgtctccatctattgatgagggtcttactcttttagtataaatagtaccgttaacttccaattaactagttttgacaacattcaaaaaagagtaataaacttcgccttaattttaataatcaacaccctcctagccttactactaataattattacattttgactaccacaactcaacggctacatagaaaaatccaccccttacgagtgcggcttcgaccctatatcccccgcccgcgtccctttctccataaaattcttcttagtagctattaccttcttattatttgatctagaaattgccctccttttacccctaccatgagccctacaaacaactaacctgccactaatagttatgtcatccctcttattaatcatcatcctagccctaagtctggcctatgagtgactacaaaaaggattagactgagccgaattggtatatagtttaaacaaaacgaatgatttcgactcattaaattatgataatcatatttaccaaatgcccctcatttacataaatattatactagcatttaccatctcacttctaggaatactagtatatcgctcacacctcatatcctccctactatgcctagaaggaataatactatcgctgttcattatagctactctcataaccctcaacacccactccctcttagccaatattgtgcctattgccatactagtctttgccgcctgcgaagcagcggtgggcctagccctactagtctcaatctccaacacatatggcctagactacgtacataacctaaacctactccaatgctaaaactaatcgtcccaacaattatattactaccactgacatgactttccaaaaaacacataatttgaatcaacacaaccacccacagcctaattattagcatcatccctctactattttttaaccaaatcaacaacaacctatttagctgttccccaaccttttcctccgaccccctaacaacccccctcctaatactaactacctgactcctacccctcacaatcatggcaagccaacgccacttatccagtgaaccactatcacgaaaaaaactctacctctctatactaatctccctacaaatctccttaattataacattcacagccacagaactaatcatattttatatcttcttcgaaaccacacttatccccaccttggctatcatcacccgatgaggcaaccagccagaacgcctgaacgcaggcacatacttcctattctacaccctagtaggctcccttcccctactcatcgcactgatttacactcacaacaccctaggctcactaaacattctactactcactctcactgcccaagaactatcaaactcctgagccaacaacttaatatgactagcttacacaatagcttttatagtaaagatacctctttacggactccacttatgactccctaaagcccatgtcgaagcccccatcgctgggtcaatagtacttgccgcagtactcttaaaactaggcggctatggtataatacgcctcacactcattctcaaccccctgacaaaacacatagcctaccccttccttgtactatccctatgaggcataattataacaagctccatctgcctacgacaaacagacctaaaatcgctcattgcatactcttcaatcagccacatagccctcgtagtaacagccattctcatccaaaccccctgaagcttcaccggcgcagtcattctcataatcgcccacggacttacatcctcattactattctgcctagcaaactcaaactacgaacgcactcacagtcgcatcataatcctctctcaaggacttcaaactctactcccactaatagctttttgatgacttctagcaagcctcgctaacctcgccttaccccccactattaacctactgggagaactctctgtgctagtaaccacgttctcctgatcaaatatcactctcctacttacaggactcaacatactagtcacagccctatactccctctacatatttaccacaacacaatggggctcactcacccaccacattaacaacataaaaccctcattcacacgagaaaacaccctcatgttcatacacctatcccccattctcctcctatccctcaaccccgacatcattaccgggttttcctcttgtaaatatagtttaaccaaaacatcagattgtgaatctgacaacagaggcttacgaccccttatttaccgagaaagctcacaagaactgctaactcatgcccccatgtctaacaacatggctttctcaacttttaaaggataacagctatccattggtcttaggccccaaaaattttggtgcaactccaaataaaagtaataaccatgcacactactataaccaccctaaccctgacttccctaattccccccatccttaccaccctcgttaaccctaacaaaaaaaactcatacccccattatgtaaaatccattgtcgcatccacctttattatcagtctcttccccacaacaatattcatgtgcctagaccaagaagttattatctcgaactgacactgagccacaacccaaacaacccagctctccctaagcttcaaactagactacttctccataatattcatccctgtggcattgttcgttacatggtccatcatagaattctcactgtgatatataaactcagacccaaacattaatcagttcttcaaatatctactcatcttcctaattaccatactaatcttagttaccgctaacaacctattccaactgttcatcggctgagagggcgtaggaattatatccttcttgctcatcagttgatgatacgcccgagcagatgccaacacagcagccattcaagcaatcctatacaaccgtatcggcgatatcggtttcatcctcgccttagcatgatttatcctacactccaactcatgagacccacaacaaatagcccttctaaacgctaatccaagcctcaccccactactaggcctcctcctagcagcagcaggcaaatcagcccaattaggtctccacccctgactcccctcagccatagaaggccccaccccagtctcagccctactccactcaagcactatagttgtagcaggaatcttcttactcatccgcttccaccccctagcagaaaatagcccactaatccaaactctaacactatgcttaggcgctatcaccactctgttcgcagcagtctgcgcccttacacaaaatgacatcaaaaaaatcgtagccttctccacttcaagtcaactaggactcataatagttacaatcggcatcaaccaaccacacctagcattcctgcacatctgtacccacgccttcttcaaagccatactatttatgtgctccgggtccatcatccacaaccttaacaatgaacaagatattcgaaaaataggaggactactcaaaaccatacctctcacttcaacctccctcaccattggcagcctagcattagcaggaatacctttcctcacaggtttctactccaaagaccacatcatcgaaaccgcaaacatatcatacacaaacgcctgagccctatctattactctcatcgctacctccctgacaagcgcctatagcactcgaataattcttctcaccctaacaggtcaacctcgcttccccacccttactaacattaacgaaaataaccccaccctactaaaccccattaaacgcctgacagccggaagcctattcgcaggatttctcattactaacaacatttcccccgcatcccccttccaaacaacaatccccctctacctaaaactcacagccctcgctgtcactttcctaggacttctaacagccctagacctcaactacctaaccaacaaacttaaaataaaatccccactatgcacattttatttctccaacatactcggattctaccctagcatcatacaccgcacaatcccctatctaggccttcttacgagccaaaacctgcccctactcctcctagacctaacctgactagaaaagctattacctaaaacaatttcacagcaccaaatctccacctccatcatcacctcaacccaaaaaggcataattaaactttacttcctctctttcttcttcccactcatcctaaccctactcctaatcacataacctattcccccgagcaatctcaattacaatatatacaccaacaaacaatgttcaaccagtaactactactaatcaacgcccataatcatacaaagcccccgcaccaataggatcctcccgaatcaaccctgacccctctccttcataaattattcagcttcctacactattaaagtttaccacaaccaccaccccatcatactctttcacccacagcaccaatcctacctccatcgctaaccccactaaaacactcaccaagacctcaacccctgacccccatgcctcaggatactcctcaatagccatcgctgtagtatatccaaagacaaccatcattccccctaaataaattaaaaaaactattaaacccatataacctcccccaaaattcagaataataacacacccgaccacaccgctaacaatcaatactaaacccccataaataggagaaggcttagaagaaaaccccacaaaccccattactaaacccacactcaacagaaacaaagcatacatcattattctcgcacggactacaaccacgaccaatgatatgaaaaaccatcgttgtatttcaactacaagaacaccaatgaccccaatacgcaaaattaaccccctaataaaattaattaaccactcactcatcgacctccccaccccatccaacatctccgcatgatgaaacttcggctcactccttggcgcctgcctgatcctccaaatcaccacaggactattcctagccatgcactactcaccagacgcctcaaccgccttttcatcaatcgcccacatcactcgagacgtaaattatggctgaatcatccgctaccttcacgccaatggcgcctcaatattctttatctgcctcttcctacacatcgggcgaggcctatattacggatcatttctctactcagaaacctgaaacatcggcattatcctcctgcttgcaactatagcaacagccttcataggctatgtcctcccgtgaggccaaatatcattctgaggggccacagtaattacaaacttactatccgccatcccatacattgggacagacctagttcaatgaatctgaggaggctactcagtagacagtcccaccctcacacgattctttacctttcacttcatcttgcccttcattattgcagccctagcagcactccacctcctattcttgcacgaaacgggatcaaacaatcccctaggaatcacctcccattccgataaaatcaccttccacccttactacacaatcaaagacgccctcggcttacttctcttcattctctccttaatgacattaacactattctcaccagacctcctaggcgacccagacaattataccctagccaaccccttaaacacccctccccacatcaagcccgaatgatatttcctattcgcctacacaattctccgatccgtccctaacaaactaggaggcgtccttgccctattactatccatcctcatcctagcaataatccccatcctccatatatccaaacaacaaagcataatatttcgcccactaagccaatcactttattgactcctagccgcagacctcctcattctaacctgaatcggaggacaaccagtaagctacccttttaccatcattggacaagtagcatccgtactatacttcacaacaatcctaatcctaataccaactatctccctaattgaaaacaaaatactcaaatgggcctgtccttgtagtataaactaatacaccagtcttgtaaaccggagatgaaaacctttttccaaggacaaatcagagaaaaagtctttaactccaccattagcacccaaagctaagattctaatttaaactattctctgttctttcatggggaagcagatttgggtaccacccaagtattgactcacccatcaacaaccgctatgtatttcgtacattactgccagccaccatgaatattgtacggtaccataaatacttgaccacctgtagtacataaaaacccaatccacatcaaaaccccctccccatgcttacaagcaagtacagcaatcaaccctcaactatcacacatcaactgcaactccaaagccacccctcacccactaggataccaacaaacctacccacccttaacagtacatagtacataaagccatttaccgtacatagcacattacagtcaaatcccttctcgtccccatggatgacccccctcagataggggtcccttgaccaccatcctccgtgaaatcaatatcccgcacaagagtgctactctcctcgctccgggcccataacacttgggggtagctaaagtgaactgtatccgacatctggttcctacttcagggtcataaagcctaaatagcccacacgttccccttaaataagacatcacgatg

SEQ ID NO: 498 - DNA, 16569 bp, Homo sapiens mitochondrial
  3107: "n" refers to a nucleotide at position 3107 of the Cambridge Reference Sequence (CRS, Anderson et al. 1981 Nature 290:457-465), later determined to be absent from the human mtDNA sequence according to the revised CRS (rCRS, Andrews et al. 1999 Nature Genetics 23:147); "n" therefore represents a single nucleotide deletion at a position corresponding to nucleotide 3107 of SEQ ID NO:1 as provided herein.
gatcacaggtctatcaccctattaaccactcacgggagctctccatgcatttggtattttcgtctggggggtatgcacgcgatagcattgcgagacgctggagccggagcaccctatgtcgcagtatctgtctttgattcctgcctcatcctattatttatcgcacctacgttcaatattacaggcgaacatacttactaaagtgtgttaattaattaatgcttgtaggacataataataacaattgaatgtctgcacagccactttccacacagacatcataacaaaaaatttccaccaaaccccccctcccccgcttctggccacagcacttaaacacatctctgccaaaccccaaaaacaaagaaccctaacaccagcctaaccagatttcaaattttatcttttggcggtatgcacttttaacagtcaccccccaactaacacattattttcccctcccactcccatactactaatctcatcaatacaacccccgcccatcctacccagcacacacacaccgctgctaaccccataccccgaaccaaccaaaccccaaagacaccccccacagtttatgtagcttacctcctcaaagcaatacactgaaaatgtttagacgggctcacatcaccccataaacaaataggtttggtcctagcctttctattagctcttagtaagattacacatgcaagcatccccattccagtgagttcaccctctaaatcaccacgatcaaaagggacaagcatcaagcacgcagcaatgcagctcaaaacgcttagcctagccacacccccacgggaaacagcagtgattaacctttagcaataaacgaaagtttaactaagctatactaaccccagggttggtcaatttcgtgccagccaccgcggtcacacgattaacccaagtcaatagaaaccggcgtaaagagtgttttagatcaccccctccccaataaagctaaaactcacctgagttgtaaaaaactccagttgacacaaaatagactacgaaagtggctttaacatatctgaacacacaatagctaagacccaaactgggattagataccccactatgcttagccctaaacctcaacagttaaatcaacaaaactgctcgccagaacactacgagccacagcttaaaactcaaaggacctggcggtgcttcatatccctctagaggagcctgttctgtaatcgataaaccccgatcaacctcaccacctcttgctcagcctatataccgccatcttcagcaaaccctgatgaaggctacaaagtaagcgcaagtacccacgtaaagacgttaggtcaaggtgtagcccatgaggtggcaagaaatgggctacattttctaccccagaaaactacgatagcccttatgaaacttaagggtcgaaggtggatttagcagtaaactgagagtagagtgcttagttgaacagggccctgaagcgcgtacacaccgcccgtcaccctcctcaagtatacttcaaaggacatttaactaaaacccctacgcatttatatagaggagacaagtcgtaacatggtaagtgtactggaaagtgcacttggacgaaccagagtgtagcttaacacaaagcacccaacttacacttaggagatttcaacttaacttgaccgctctgagctaaacctagccccaaacccactccaccttactaccagacaaccttagccaaaccatttacccaaataaagtataggcgatagaaattgaaacctggcgcaatagatatagtaccgcaagggaaagatgaaaaattataaccaagcataatatagcaaggactaacccctataccttctgcataatgaattaactagaaataactttgcaaggagaaccaaagctaagacccccgaaaccagacgagctacctaagaacagctaaaagagcacacccgtctatgtagcaaaatagtgggaagatttataggtagaggcgacaaacctaccgagcctggtgatagctggttgtccaagatagaatcttagttcaactttaaatttgcccacagaaccctctaaatccccttgtaaatttaactgttagtccaaagaggaacagctctttggacactaggaaaaaaccttgtagagagagtaaaaaatttaacacccatagtaggcctaaaagcagccaccaattaagaaagcgttcaagctcaacacccactacctaaaaaatcccaaacatataactgaactcctcacacccaattggaccaatctatcaccctatagaagaactaatgttagtataagtaacatgaaaacattctcctccgcataagcctgcgtcagattaaaacactgaactgacaattaacagcccaatatctacaatcaaccaacaagtcattattaccctcactgtcaacccaacacaggcatgctcataaggaaaggttaaaaaaagtaaaaggaactcggcaaatcttaccccgcctgtttaccaaaaacatcacctctagcatcaccagtattagaggcaccgcctgcccagtgacacatgtttaacggccgcggtaccctaaccgtgcaaaggtagcataatcacttgttccttaaatagggacctgtatgaatggctccacgagggttcagctgtctcttacttttaaccagtgaaattgacctgcccgtgaagaggcgggcatgacacagcaagacgagaagaccctatggagctttaatttattaatgcaaacagtacctaacaaacccacaggtcctaaactaccaaacctgcattaaaaatttcggttggggcgacctcggagcagaacccaacctccgagcagtacatgctaagacttcaccagtcaaagcgaactactatactcaattgatccaataacttgaccaacggaacaagttaccctagggataacagcgcaatcctattctagagtccatatcaacaatagggtttacgacctcgatgttggatcaggacatcccgatggtgcagccgctattaaaggttcgtttgttcaacgattaaagtcctacgtgatctgagttcagaccggagtaatccaggtcggtttctatctacnttcaaattcctccctgtacgaaaggacaagagaaataaggcctacttcacaaagcgccttcccccgtaaatgatatcatctcaacttagtattatacccacacccacccaagaacagggtttgttaagatggcagagcccggtaatcgcataaaacttaaaactttacagtcagaggttcaattcctcttcttaacaacatacccatggccaacctcctactcctcattgtacccattctaatcgcaatggcattcctaatgcttaccgaacgaaaaattctaggctatatacaactacgcaaaggccccaacgttgtaggcccctacgggctactacaacccttcgctgacgccataaaactcttcaccaaagagcccctaaaacccgccacatctaccatcaccctctacatcaccgccccgaccttagctctcaccatcgctcttctactatgaacccccctccccatacccaaccccctggtcaacctcaacctaggcctcctatttattctagccacctctagcctagccgtttactcaatcctctgatcagggtgagcatcaaactcaaactacgccctgatcggcgcactgcgagcagtagcccaaacaatctcatatgaagtcaccctagccatcattctactatcaacattactaataagtggctcctttaacctctccacccttatcacaacacaagaacacctctgattactcctgccatcatgacccttggccataatatgatttatctccacactagcagagaccaaccgaacccccttcgaccttgccgaaggggagtccgaactagtctcaggcttcaacatcgaatacgccgcaggccccttcgccctattcttcatagccgaatacacaaacattattataataaacaccctcaccactacaatcttcctaggaacaacatatgacgcactctcccctgaactctacacaacatattttgtcaccaagaccctacttctaacctccctgttcttatgaattcgaacagcatacccccgattccgctacgaccaactcatacacctcctatgaaaaaacttcctaccactcaccctagcattacttatatgacatgtctccatacccattacaatctccagcattccccctcaaacctaagaaatatgtctgataaaagagttactttgatagagtaaataataggagcttaaacccccttatttctaggactatgagaatcgaacccatccctgagaatccaaaattctccgtgccacctatcacaccccatcctaaagtaaggtcagctaaataagctatcgggcccataccccgaaaatgttggttatacccttcccgtactaattaatcccctggcccaacccgtcatctactctaccatctttgcaggcacactcatcacagcgctaagctcgcactgattttttacctgagtaggcctagaaataaacatgctagcttttattccagttctaaccaaaaaaataaaccctcgttccacagaagctgccatcaagtatttcctcacgcaagcaaccgcatccataatccttctaatagctatcctcttcaacaatatactctccggacaatgaaccataaccaatactaccaatcaatactcatcattaataatcataatggctatagcaataaaactaggaatagccccctttcacttctgagtcccagaggttacccaaggcacccctctgacatccggcctgcttcttctcacatgacaaaaactagcccccatctcaatcatataccaaatctctccctcactagacgtaagccttctcctcactctctcaatcttatccatcatagcaggcagttgaggtggattaaaccaaacccagctacgcaaaatcttagcatactcctcaattacccacataggatgaataatagcagttctaccgtacaaccctaacataaccattcttaatttaactatttatattatcctaactactaccgcattcctactactcaacttaaactccagcaccacaaccctactactatctcgcacctgaaacaagctaacatgactaacacccttaattccatccaccctcctctccctaggaggcctgcccccgctaaccggctttttgcccaaatgggccattatcgaagaattcacaaaaaacaatagcctcatcatccccaccatcatagccaccatcaccctccttaacctctacttctacctacgcctaatctactccacctcaatcacactactccccatatctaacaacgtaaaaataaaatgacagtttgaacatacaaaacccaccccattcctccccacactcatcgcccttaccacgctactcctacctatctccccttttatactaataatcttatagaaatttaggttaaatacagaccaagagccttcaaagccctcagtaagttgcaatacttaatttctgtaacagctaaggactgcaaaaccccactctgcatcaactgaacgcaaatcagccactttaattaagctaagcccttactagaccaatgggacttaaacccacaaacacttagttaacagctaagcaccctaatcaactggcttcaatctacttctcccgccgccgggaaaaaaggcgggagaagccccggcaggtttgaagctgcttcttcgaatttgcaattcaatatgaaaatcacctcggagctggtaaaaagaggcctaacccctgtctttagatttacagtccaatgcttcactcagccattttacctcacccccactgatgttcgccgaccgttgactattctctacaaaccacaaagacattggaacactatacctattattcggcgcatgagctggagtcctaggcacagctctaagcctccttattcgagccgagctgggccagccaggcaaccttctaggtaacgaccacatctacaacgttatcgtcacagcccatgcatttgtaataatcttcttcatagtaatacccatcataatcggaggctttggcaactgactagttcccctaataatcggtgcccccgatatggcgtttccccgcataaacaacataagcttctgactcttacctccctctctcctactcctgctcgcatctgctatagtggaggccggagcaggaacaggttgaacagtctaccctcccttagcagggaactactcccaccctggagcctccgtagacctaaccatcttctccttacacctagcaggtgtctcctctatcttaggggccatcaatttcatcacaacaattatcaatataaaaccccctgccataacccaataccaaacgcccctcttcgtctgatccgtcctaatcacagcagtcctacttctcctatctctcccagtcctagctgctggcatcactatactactaacagaccgcaacctcaacaccaccttcttcgaccccgccggaggaggagaccccattctataccaacacctattctgatttttcggtcaccctgaagtttatattcttatcctaccaggcttcggaataatctcccatattgtaacttactactccggaaaaaaagaaccatttggatacataggtatggtctgagctatgatatcaattggcttcctagggtttatcgtgtgagcacaccatatatttacagtaggaatagacgtagacacacgagcatatttcacctccgctaccataatcatcgctatccccaccggcgtcaaagtatttagctgactcgccacactccacggaagcaatatgaaatgatctgctgcagtgctctgagccctaggattcatctttcttttcaccgtaggtggcctgactggcattgtattagcaaactcatcactagacatcgtactacacgacacgtactacgttgtagctcacttccactatgtcctatcaataggagctgtatttgccatcataggaggcttcattcactgatttcccctattctcaggctacaccctagaccaaacctacgccaaaatccatttcactatcatattcatcggcgtaaatctaactttcttcccacaacactttctcggcctatccggaatgccccgacgttactcggactaccccgatgcatacaccacatgaaacatcctatcatctgtaggctcattcatttctctaacagcagtaatattaataattttcatgatttgagaagccttcgcttcgaagcgaaaagtcctaatagtagaagaaccctccataaacctggagtgactatatggatgccccccaccctaccacacattcgaagaacccgtatacataaaatctagacaaaaaaggaaggaatcgaaccccccaaagctggtttcaagccaaccccatggcctccatgactttttcaaaaaggtattagaaaaaccatttcataactttgtcaaagttaaattataggctaaatcctatatatcttaatggcacatgcagcgcaagtaggtctacaagacgctacttcccctatcatagaagagcttatcacctttcatgatcacgccctcataatcattttccttatctgcttcctagtcctgtatgcccttttcctaacactcacaacaaaactaactaatactaacatctcagacgctcaggaaatagaaaccgtctgaactatcctgcccgccatcatcctagtcctcatcgccctcccatccctacgcatcctttacataacagacgaggtcaacgatccctcccttaccatcaaatcaattggccaccaatggtactgaacctacgagtacaccgactacggcggactaatcttcaactcctacatacttcccccattattcctagaaccaggcgacctgcgactccttgacgttgacaatcgagtagtactcccgattgaagcccccattcgtataataattacatcacaagacgtcttgcactcatgagctgtccccacattaggcttaaaaacagatgcaattcccggacgtctaaaccaaaccactttcaccgctacacgaccgggggtatactacggtcaatgctctgaaatctgtggagcaaaccacagtttcatgcccatcgtcctagaattaattcccctaaaaatctttgaaatagggcccgtatttaccctatagcaccccctctaccccctctagagcccactgtaaagctaacttagcattaaccttttaagttaaagattaagagaaccaacacctctttacagtgaaatgccccaactaaatactaccgtatggcccaccataattacccccatactccttacactattcctcatcacccaactaaaaatattaaacacaaactaccacctacctccctcaccaaagcccataaaaataaaaaattataacaaaccctgagaaccaaaatgaacgaaaatctgttcgcttcattcattgcccccacaatcctaggcctacccgccgcagtactgatcattctatttccccctctattgatccccacctccaaatatctcatcaacaaccgactaatcaccacccaacaatgactaatcaaactaacctcaaaacaaataataaccatacacaacactaaaggacgaacctgatctcttatactagtatccttaatcatttttattgccacaactaacctcctcggactcctgcctcactcatttacaccaaccacccaactatctataaacctagccatggccatccccttatgagcgggcgcagtgattataggctttcgctctaagattaaaaatgccctagcccacttcttaccacaaggcacacctacaccccttatccccatactagttattatcgaaaccatcagcctactcattcaaccaatagccctggccgtacgcctaaccgctaacattactgcaggccacctactcatgcacctaattggaagcgccaccctagcaatatcaaccattaaccttccctctacacttatcatcttcacaattctaattctactgactatcctagaaatcgctgtcgccttaatccaagcctacgttttcacacttctagtaagcctctacctgcacgacaacacataatgacccaccaatcacatgcctatcatatagtaaaacccagcccatgacccctaacaggggccctctcagccctcctaatgacctccggcctagccatgtgatttcacttccactccataacgctcctcatactaggcctactaaccaacacactaaccatataccaatgatggcgcgatgtaacacgagaaagcacataccaaggccaccacacaccacctgtccaaaaaggccttcgatacgggataatcctatttattatctcagaagtttttttcttcgcaggatttttctgagccttttaccactccagcctagcccctaccccccaattaggagggcactggcccccaacaggcatcaccccgctaaatcccctagaagtcccactcctaaacacatccgtattactcgcatcaggagtatcaatcacctgagctcaccatagtctaatagaaaacaaccgaaaccaaataattcaagcactgcttattacaattttactgggtctctattttaccctcctacaagcctcagagtacttcgagtctcccttcaccatttccgacggcatctacggctcaacattttttgtagccacaggcttccacggacttcacgtcattattggctcaactttcctcactatctgcttcatccgccaactaatatttcactttacatccaaacatcactttggcttcgaagccgccgcctgatactggcattttgtagatgtggtttgactatttctgtatgtctccatctattgatgagggtcttactcttttagtataaatagtaccgttaacttccaattaactagttttgacaacattcaaaaaagagtaataaacttcgccttaattttaataatcaacaccctcctagccttactactaataattattacattttgactaccacaactcaacggctacatagaaaaatccaccccttacgagtgcggcttcgaccctatatcccccgcccgcgtccctttctccataaaattcttcttagtagctattaccttcttattatttgatctagaaattgccctccttttacccctaccatgagccctacaaacaactaacctgccactaatagttatgtcatccctcttattaatcatcatcctagccctaagtctggcctatgagtgactacaaaaaggattagactgaaccgaattggtatatagtttaaacaaaacgaatgatttcgactcattaaattatgataatcatatctaccaaatgcccctcatttacataaatattatactagcatttaccatctcacttctaggaatactagtatatcgctcacacctcatatcctccctactatgcctagaaggaataatactatcgctgttcattatagctactctcataaccctcaacacccactccctcttagccaatattgtgcctattgccatactagtctttgccgcctgcgaagcagcggtgggcctagccctactagtctcaatctccaacacatatggcctagactacgtacataacctaaacctactccaatgctaaaactaatcgtcccaacaattatattactaccactgacatgactttccaaaaaacacataatttgaatcaacacaaccacccacagcctaattattagcatcatccctctactattttttaaccaaatcaacaacaacctatttagctgttccccaaccttttcctccgaccccctaacaacccccctcctaatactaactacctgactcctacccctcacaatcatggcaagccaacgccacttatccagtgaaccactatcacgaaaaaaactctacctctctatactaatctccctacaaatctccttaattataacattcacagccacagaactaatcatattttatatcttcttcgaaaccacacttatccccaccttggctatcatcacccgatgaggcaaccagccagaacgcctgaacgcaggcacatacttcctattctacaccctagtaggctcccttcccctactcatcgcactgatttacactcacaacaccctaggctcactaaacattctactactcactctcactgcccaagaactatcaaactcctgagccaacaacttaatatgactagcttacacaatagcttttatagtaaagatacctctttacggactccacttatgactccctaaagcccatgtcgaagcccccatcgctgggtcaatagtacttgccgcagtactcttaaaactaggcggctatggtataatacgcctcacactcattctcaaccccctgacaaaacacatagcctaccccttccttgtactatccctatgaggcataattataacaagctccatctgcctacgacaaacagacctaaaatcgctcattgcatactcttcaatcagccacatagccctcgtagtaacagccattctcatccaaaccccctgaagcttcaccggcgcagtcattctcataatcgcccacggacttacatcctcattactattctgcctagcaaactcaaactacgaacgcactcacagtcgcatcataatcctctctcaaggacttcaaactctgctcccactaatagctttttgatgacttctagcaagcctcgctaacctcgccttaccccccactattaacctactgggagaactctctgtgctagtaaccacgttctcctgatcaaatatcactctcctacttacaggactcaacatactagtcacagccctatactccctctacatatttaccacaacacaatggggctcactcacccaccacattaacaacataaaaccctcattcacacgagaaaacaccctcatgttcatacacctatcccccattctcctcctatccctcaaccccgacatcattaccgggttttcctcttgtaaatatagtttaaccaaaacatcagattgtgaatctgacaacagaggcttacgaccccttatttaccgagaaagctcacaagaactgctaactcatgcccccatgtctaacaacatggctttctcaacttttaaaggataacagctatccattggtcttaggccccaaaaattttggtgcaactccaaataaaagtaataaccatgcacactactataaccaccctaaccctgacttccctaattccccccatccttaccaccctcgttaaccctaacaaaaaaaactcatacccccattatgtaaaatccattgtcgcatccacctttattatcagtctcttccccacaacaatattcatgtgcctagaccaagaagttattatctcgaactgacactgagccacaacccaaacaacccagctctccctaagcttcaaactagactacttctccataatattcatccctgtagcattgttcgttacatggtccatcatagaattctcactgtgatatataaactcagacccaaacattaatcagttcttcaaatatctactcatcttcctaattaccatactaatcttagttaccgctaacaacctattccaactgttcatcggctgagagggcgtaggaattatatccttcttgctcatcagttgatgatacgcccgagcagatgccaacacagcagccattcaagcaatcctatacaaccgtatcggcgatatcggtttcatcctcgccttagcatgatttatcctacactccaactcatgagacccacaacaaatagcccttctaaacgctaatccaagcctcaccccactactaggcctcctcctagcagcagcaggcaaatcagcccaattaggtctccacccctgactcccctcagccatagaaggccccaccccagtctcagccctactccactcaagcactatagttgtagcaggaatcttcttactcatccgcttccaccccctagcagaaaataacccactaatccaaactctaacactatgcttaggcgctatcaccactctgttcgcagcagtctgcgcccttacacaaaatgacatcaaaaaaatcgtagccttctccacttcaagtcaactaggactcataatagttacaatcggcatcaaccaaccacacctagcattcctgcacatctgtacccacgccttcttcaaagccatactatttatgtgctccggatccatcatccacaaccttaacaatgaacaagatattcgaaaaataggaggactactcaaaaccatacctctcacttcaacctccctcaccattggcagcctagcattagcaggaatacctttcctcacaggtttctactccaaagaccacatcatcgaaaccgcaaacatatcatacacaaacgcctgagccctatctattactctcatcgctacctccctgacaagcgcctatagcactcgaataattcttctcaccctaacaggtcaacctcgcttccccacccttactaacattaacgaaaataaccccaccctactaaaccccattaaacgcctggcagccggaagcctattcgcaggatttctcattactaacaacatttcccccgcatcccccttccaaacaacaatccccctctacctaaaactcacagccctcgctgtcactttcctaggacttctaacagccctagacctcaactacctaaccaacaaacttaaaataaaatccccactatgcacattttatttctccaacatactcggattctaccctagcatcacacaccgcacaatcccctatctaggccttcttacgagccaaaacctgcccctactcctcctagacctaacctgactagaaaagctattacctaaaacaatttcacagcaccaaatctccacctccatcatcacctcaacccaaaaaggcataattaaactttacttcctctctttcttcttcccactcatcctaaccctactcctaatcacataacctattcccccgagcaatctcaattacaatatatacaccaacaaacaatgttcaaccagtaactactactaatcaacgcccatagtcatacaaagcccccgcaccaataggatcctcccgaatcaaccctgacccctctccttcataaattattcagcttcctacactattaaagtttaccacaaccaccaccccatcatactctttcacccacagcaccaatcctacctccatcgctaaccccactaaaacactcaccaagacctcaacccctgacccccatgcctcaggatactcctcaatagccatcgctgtagtatatccaaagacaaccatcattccccctaaataaattaaaaaaactattaaacccatataacctcccccaaaattcagaataataacacacccgaccacaccgctaacaatcaatactaaacccccataaataggagaaggcttagaagaaaaccccacaaaccccattactaaacccacactcaacagaaacaaagcatacatcattattctcgcacggactacaaccacgaccaatgatatgaaaaaccatcgttgtatttcaactacaagaacaccaatgaccccaatacgcaaaattaaccccctaataaaattaattaaccactcattcatcgacctccccaccccatccaacatctccgcatgatgaaacttcggctcactccttggcgcctgcctgatcctccaaatcaccacaggactattcctagccatacactactcaccagacgcctcaaccgccttttcatcaatcgcccacatcactcgagacgtaaattatggctgaatcatccgctaccttcacgccaatggcgcctcaatattctttatctgcctcttcctacacatcgggcgaggcctatattacggatcatttctctactcagaaacctgaaacatcggcattatcctcctgcttgcaactatagcaacagccttcataggctatgtcctcccgtgaggccaaatatcattctgaggggccacagtaattacaaacttactatccgccatcccatacattgggacagacctagttcaatgaatctgaggaggctactcagtagacagtcccaccctcacacgattctttacctttcacttcatcttgcccttcattattgcagccctagcagcactccacctcctattcttgcacgaaacgggatcaaacaaccccctaggaatcacctcccattccgataaaatcaccttccacccttactacacaatcaaagacgccctcggcttacttctcttcattctctccttaatgacattaacactattctcaccagacctcctaggcgacccagacaattataccctagccaaccccttaaacacccctccccacatcaagcccgaatgatatttcctattcgcctacacaattctccgatccgtccctaacaagctaggaggcgtccttgccctattactatccatcctcatcctagcaataatccccatcctccatatatccaaacaacaaagcataatatttcgcccactaagccaatcactttattgactcctagccgcagacctcctcattctaacctgaatcggaggacaaccagtaagctacccttttaccatcattggacaagtagcatccgtactatacttcacaacaatcctaatcctaataccaactatctccctaattgaaaacaaaatactcaaatgggcctgtccttgtagtataaactaatacaccagtcttgtaaaccgaagatgaaaacctttttccaaggacaaatcagagaaaaagtctttaactccaccattagcacccaaagctaagattctaatttaaactattctctgttctttcatggggaagcagatttgggtaccacccaagtattgactcacccatcaacaaccgctatgtatttcgtacattactgccagccaccatgaatattgtacggtaccataaatacttgaccacctgtagtacataaaaacccaatccacatcaaaaccccctccccatgcttacaagcaagtacagcaatcaaccctcaactatcacacatcaactgcaactccaaagccacccctcacccactaggataccaacaaacctacccacccttaacagtacatagtacataaagccatttaccgtacatagcacattacagtcaaatcccttctcgtccccatggatgacccccctcagataggggtcccttgaccaccatcctccgtgaaatcaatatcccgcacaagagtgctactctcctcgctccgggcccataacacttgggggtagctaaagtgaactgtatccgacatctggttcctacttcagggtcataaagcctaaatagcccacacgttccccttaaataagacatcacgatg

SEQ ID NO: 499 - DNA, 16569 bp, Homo sapiens mitochondrial
  3107: "n" refers to a nucleotide at position 3107 of the Cambridge Reference Sequence (CRS, Anderson et al. 1981 Nature 290:457-465), later determined to be absent from the human mtDNA sequence according to the revised CRS (rCRS, Andrews et al. 1999 Nature Genetics 23:147); "n" therefore represents a single nucleotide deletion at a position corresponding to nucleotide 3107 of SEQ ID NO:1 as provided herein.
gatcacaggtctatcaccctattaaccactcacgggagctctccatgcatttggtattttcgtctggggggtatgcacgcgatagcattgcgagacgctggagccggagcaccctatgtcgcagtatctgtctttgattcctgcctcatcctattatttatcgcacctacgttcaatattacaggcgaacatacttactaaagtgtgttaattaattaatgcttgtaggacataataataacaattgaatgtctgcacagccactttccacacagacatcataacaaaaaatttccaccaaaccccccctcccccgcttctggccacagcacttaaacacatctctgccaaaccccaaaaacaaagaaccctaacaccagcctaaccagatttcaaattttatcttttggcggtatgcacttttaacagtcaccccccaactaacacattattttcccctcccactcccatactactaatctcatcaatacaacccccgcccatcctacccagcacacacacaccgctgctaaccccataccccgaaccaaccaaaccccaaagacaccccccacagtttatgtagcttacctcctcaaagcaatacactgaaaatgtttagacgggctcacatcaccccataaacaaataggtttggtcctagcctttctattagctcttagtaagattacacatgcaagcatccccgttccagtgagttcaccctctaaatcaccacgatcaaaagggacaagcatcaagcacgcagcaatgcagctcaaaacgcttagcctagccacacccccacgggaaacagcagtgattaacctttagcaataaacgaaagtttaactaagctatactaaccccagggttggtcaatttcgtgccagccaccgcggtcacacgattaacccaagtcaatagaagccggcgtaaagagtgttttagatcaccccctccccaataaagctaaaactcacctgagttgtaaaaaactccagttgacacaaaatagactacgaaagtggctttaacatatctgaacacacaatagctaagacccaaactgggattagataccccactatgcttagccctaaacctcaacagttaaatcaacaaaactgctcgccagaacactacgagccacagcttaaaactcaaaggacctggcggtgcttcatatccctctagaggagcctgttctgtaatcgataaaccccgatcaacctcaccacctcttgctcagcctatataccgccatcttcagcaaaccctgatgaaggctacaaagtaagcgcaagtacccacgtaaagacgttaggtcaaggtgtagcccatgaggtggcaagaaatgggctacattttctaccccagaaaactacgatagcccttatgaaacttaagggtcgaaggtggatttagcagtaaactgagagtagagtgcttagttgaacagggccctgaagcgcgtacacaccgcccgtcaccctcctcaagtatacttcaaaggacatttaactaaaacccctacgcatttatatagaggagacaagtcgtaacatggtaagtgtactggaaagtgcacttggacgaaccagagtgtagcttaacacaaagcacccaacttacacttaggagatttcaacttaacttgaccgctctgagctaaacctagccccaaacccactccaccttactaccagacaaccttagccaaaccatttacccaaataaagtataggcgatagaaattgaaacctggcgcaatagatatagtaccgcaagggaaagatgaaaaattataaccaagcataatatagcaaggactaacccctataccttctgcataatgaattaactagaaataactttgcaaggagagccaaagctaagacccccgaaaccagacgagctacctaagaacagctaaaagagcacacccgtctatgtagcaaaatagtgggaagatttataggtagaggcgacaaacctaccgagcctggtgatagctggttgtccaagatagaatcttagttcaactttaaatttgcccacagaaccctctaaatccccttgtaaatttaactgttagtccaaagaggaacagctctttggacactaggaaaaaaccttgtagagagagtaaaaaatctaacacccatagtaggcctaaaagcagccaccaattaagaaagcgttcaagctcaacacccactacctaaaaaatcccaaacatataactgaactcctcacacccaattggaccaatctatcaccctatagaagaactaatgttagtataagtaacatgaaaacattctcctccgcataagcctgcgtcagattaaaacactgaactgacaattaacagcccaatatctacaatcaaccaacaagtcattattaccctcactgtcaacccaacacaggcatgctcataaggaaaggttaaaaaaagtaaaaggaactcggcaaatcttaccccgcctgtttaccaaaaacatcacctctagcatcaccagtattagaggcaccgcctgcccagtgacacatgtttaacggccgcggtaccctaaccgtgcaaaggtagcataatcacttgttccttaaatagggacctgtatgaatggctccacgagggttcagctgtctcttacttttaaccagtgaaattgacctgcccgtgaagaggcgggcatgacacagcaagacgagaagaccctatggagctttaatttattaatgcaaacagtacctaacaaacccacaggtcctaaactaccaaacctgcattaaaaatttcggttggggcgacctcggagcagaacccaacctccgagcagtacatgctaagacttcaccagtcaaagcgaactactatactcaattgatccaataacttgaccaacggaacaagttaccctagggataacagcgcaatcctattctagagtccatatcaacaatagggtttacgacctcgatgttggatcaggacatcccaatggtgcagccgctattaaaggttcgtttgttcaacgattaaagtcctacgtgatctgagttcagaccggagtaatccaggtcggtttctatctacnttcaaattcctccctgtacgaaaggacaagagaaataaggcctacttcacaaagcgccttcccccgtaaatgatatcatctcaacttagtattatacccacacccacccaagaacagggtttgttaagatggcagagcccggtaatcgcataaaacttaaaactttacagtcagaggttcaattcctcttcttaacaacatacccatggccaacctcctactcctcattgtacccattctaatcgcaatggcattcctaatgcttaccgaacgaaaaattctaggctatatacaactacgcaaaggccccaacgttgtaggcccctacgggctactacaacccttcgctgacgccataaaactcttcaccaaagagcccctaaaacccgccacatctaccatcaccctctacatcaccgccccgaccttagctcttaccatcgctcttctactatgaacccccctccccatacccaaccccctggtcaacctcaacctaggcctcctatttattctagccacctctagcctagccgtttactcaatcctctgatcagggtgagcatcaaactcaaactacgccctgatcggcgcactgcgagcagtagcccaaacaatctcatatgaagtcaccctagccatcattctactatcaacattactaataagtggctcctttaacctctccacccttatcacaacacaagaacacctctgattactcctgccatcatgacccttggccataatatgatttatctccacactagcagagaccaaccgaacccccttcgaccttgccgaaggggagtccgaactagtctcaggcttcaacatcgaatacgccgcaggccccttcgccctattcttcatagccgaatacacaaacattattataataaacaccctcaccactacaatcttcctaggaacaacatatgacgcactctcccctgaactctacacaacatattttgtcaccaagaccctacttctaacctccctgttcttatgaattcgaacagcatacccccgattccgctacgaccaactcatacacctcctatgaaaaaacttcctaccactcaccctagcattacttatatgacatgtctccatacccattacaatctccagcattccccctcaaacctaagaaatatgtctgataaaagagttactttgatagagtaaataataggagcttaaacccccttatttctaggactatgagaatcgaacccatccctgagaatccaaaattctccgtgccacctatcacaccccatcctaaagtaaggtcagctaaataagctatcgggcccataccccgaaaatgttggttatacccttcccgtactaattaatcccctggcccaacccgtcatctactctaccatctttgcaggcacactcatcacagcgctaagctcgcactgattttttacctgagtaggcctagaaataaacatgctagcttttattccagttctaaccaaaaaaataaaccctcgttccacagaagctgccatcaagtatttcctcacgcaagcaaccgcatccataatccttctaatagctatcctcttcaacaatatactctccggacaatgaaccataaccaatactaccaatcaatactcatcattaataatcataatggctatagcaataaaactaggaatagccccctttcacttctgagtcccagaggttacccaaggcacccctctgacatccggcctgcttcttctcacatgacaaaaactagcccccatctcaatcatataccaaatctctccctcactaaacgtaagccttctcctcactctctcaatcttatccatcatagcaggcagttgaggtggattaaaccaaacccagctacgcaaaatcttagcatactcctcaattacccacataggatgaataatagcagttctaccgtacaaccctaacataaccattcttaatttaactatttatattatcctaactactaccgcattcctactactcaacttaaactccagcaccacgaccctactactatctcgcacctgaaacaagctaacatgactaacacccttaattccatccaccctcctctccctaggaggcctgcccccgctaaccggctttttgcccaaatgggccattatcgaagaattcacaaaaaacaatagcctcatcatccccaccatcatagccaccatcaccctccttaacctctacttctacctacgcctaatctactccacctcaatcacactactccccatatctaacaacgtaaaaataaaatgacagtttgaacatacaaaacccaccccattcctccccacactcatcacccttaccacgctactcctacctatctccccttttatactaataatcttatagaaatttaggttaaatacagaccaagagccttcaaagccctcagtaagttgcaatacttaatttctgtaacagctaaggactgcaaaaccccactctgcatcaactgaacgcaaatcagccactttaattaagctaagcccttactagaccaatgggacttaaacccacaaacacttagttaacagctaagcaccctaatcaactggcttcaatctacttctcccgccgccgggaaaaaaggcgggagaagccccggcaggtttgaagctgcttcttcgaatttgcaattcaatatgaaaatcacctcggagctggtaaaaagaggcctaacccctgtctttagatttacagtccaatgcttcactcagccattttacctcacccccactgatgttcgccgaccgttgactattctctacaaaccacaaagacattggaacactatacctattattcggcgcatgagctggagtcctaggcacagctctaagcctccttattcgagccgagctgggccagccaggcaaccttctaggtaacgaccacatctacaacgttatcgtcacagcccatgcatttgtaataatcttcttcatagtaatacccatcataatcggaggctttggcaactgactagttcccctaataatcggtgcccccgatatggcgtttccccgcataaacaacataagcttctgactcttacctccctctctcctactcctgctcgcatctgctatagtggaggccggagcaggaacaggttgaacagtctaccctcccttagcagggaactactcccaccctggagcctccgtagacctaaccatcttctccttacacctagcaggtgtctcctctatcttaggggccatcaatttcatcacaacaattatcaatataaaaccccctgccataacccaataccaaacgcccctcttcgtctgatccgtcctaatcacagcagtcctacttctcctatctctcccagtcctagctgctggcatcactatactactaacagaccgcaacctcaacaccaccttcttcgaccccgccggaggaggagaccccattctataccaacacctattctgatttttcggtcaccctgaagtttatattcttatcctaccaggcttcggaataatctcccatattgtaacttactactccggaaaaaaagaaccatttggatacataggtatggtctgagctatgatatcaattggcttcctagggtttatcgtgtgagcacaccatatatttacagtaggaatagacgtagacacacgagcatatttcacctccgctaccataatcatcgctatccccaccggcgtcaaagtatttagctgactcgccacactccacggaagcaatatgaaatgatctgctgcagtgctctgagccctaggattcatctttcttttcaccgtaggtggcctgactggcattgtattagcaaactcatcactagacatcgtactacacgacacgtactacgttgtagctcacttccactatgtcctatcaataggagctgtatttgccatcataggaggcttcattcactgatttcccctattctcaggctacaccctagaccaaacctacgccaaaatccatttcactatcatattcatcggcgtaaatctaactttcttcccacaacactttctcggcctatccggaatgccccgacgttactcggactaccccgatgcatacaccacatgaaacatcctatcatctgtaggctcattcatttctctaacagcagtaatattaataattttcatgatttgagaagccttcgcttcgaagcgaaaagtcctaatagtagaagaaccctccataaacctggagtgactatatggatgccccccaccctaccacacattcgaagaacccgtatacataaaatctagacaaaaaaggaaggaatcgaaccccccaaagctggtttcaagccaaccccatggcctccatgactttttcaaaaaggtattagaaaaaccatttcataactttgtcaaagttaaattataggctaaatcctatatatcttaatggcacatgcagcgcaagtaggtctacaagacgctacttcccctatcatagaagagcttatcacctttcatgatcacgccctcataatcattttccttatctgcttcctagtcctgtatgcccttttcctaacactcacaacaaaactaactaatactaacatctcagacgctcaggaaatagaaaccgtctgaactatcctgcccgccatcatcctagtcctcatcgccctcccatccctacgcatcctttacataacagacgaggtcaacgatccctcccttaccatcaaatcaattggccaccaatggtactgaacctacgagtacaccgactacggcggactaatcttcaactcctacatacttcccccattattcctagaaccaggcgacctgcgactccttgacgttgacaatcgagtagtactcccgattgaagcccccattcgtataataattacatcacaagacgtcttgcactcatgagctgtccccacattaggcttaaaaacagatgcaattcccggacgtctaaaccaaaccactttcaccgctacacgaccgggggtatactacggtcaatgctctgaaatctgtggagcaaaccacagtttcatgcccatcgtcctagaattaattcccctaaaaatctttgaaatagggcccgtatttaccctatagcaccccctctaccccctctagagcccactgtaaagctaacttagcattaaccttttaagttaaagattaagagaaccaacacctctttacagtgaaatgccccaactaaatactaccgtatggcccaccataattacccccatactccttacactattcctcatcacccaactaaaaatattaaacacaaactaccacctacctccctcaccaaagcccataaaaataaaaaattataacaaaccctgagaaccaaaatgaacgaaaatctgttcgcttcattcattgcccccacaatcctaggcctacccgccgcagtactgatcattctatttccccctctattgatccccacctccaaatatctcatcaacaaccgactaatcaccacccaacaatgactaatcaaactaacctcaaaacaaatgataaccatacacaacactaaaggacgaacctgatctcttatactagtatccttaatcatttttattgccacaactaacctcctcggactcctgcctcactcatttacaccaaccacccaactatctataaacctagccatggccatccccttatgagcgggcgcagtgattataggctttcgctctaagattaaaaatgccctagcccacttcttaccacaaggcacacctacaccccttatccccatactagttattatcgaaaccatcagcctactcattcaaccaatagccctggccgtacgcctaaccgctaacattactgcaggccacctactcatgcacctaattggaagcgccaccctagcaatatcaaccattaaccttccctctacacttatcatcttcacaattctaattctactgactatcctagaaatcgctgtcgccttaatccaagcctacgttttcacacttctagtaagcctctacctgcacgacaacacataatgacccaccaatcacatgcctatcatatagtaaaacccagcccatgacccctaacaggggccctctcagccctcctaatgacctccggcctagccatgtgatttcacttccactccataacgctcctcatactaggcctactaaccaacacactaaccatataccaatgatggcgcgatgtaacacgagaaagcacataccaaggccaccacacaccacctgtccaaaaaggccttcgatacgggataatcctatttattacctcagaagtttttttcttcgcaggatttttctgagccttttaccactccagcctagcccctaccccccaattaggagggcactggcccccaacaggcatcaccccgctaaatcccctagaagtcccactcctaaacacatccgtattactcgcatcaggagtatcaatcacctgagctcaccatagtctaatagaaaacaaccgaaaccaaataattcaagcactgcttattacaattttactgggtctctattttaccctcctacaagcctcagagtacttcgagtctcccttcaccatttccgacggcatctacggctcaacattttttgtagccacaggcttccacggacttcacgtcattattggctcaactttcctcactatctgcttcatccgccaactaatatttcactttacatccaaacatcactttggcttcgaagccgccgcctgatactggcattttgtagatgtggtttgactatttctgtatgtctccatctattgatgagggtcttactcttttagtataaatagtaccgttaacttccaattaactagttttgacaacattcaaaaaagagtaataaacttcgccttaattttaataatcaacaccctcctagccttactactaataattattacattttgactaccacaactcaacggctacatagaaaaatccaccccttacgagtgcggcttcgaccctatatcccccgcccgcgtccctttctccataaaattcttcttagtagctattaccttcttattatttgatctagaaattgccctccttttacccctaccatgagccctacaaacaactaacctgccactaatagttatgtcatccctcttattaatcatcatcctagccctaagtctggcctatgagtgactacaaaaaggattagactgagccgaattggtatatagtttaaacaaaacgaatgatttcgactcattaaattatgataatcatatttaccaaatgcccctcatttacataaatattatactagcatttaccatctcacttctaggaatactagtatatcgctcacacctcatatcctccctactatgcctagaaggaataatactatcgctgttcattatagctactctcataaccctcaacacccactccctcttagccaatattgtgcctattgccatactagtctttgccgcctgcgaagcagcggtgggcctagccctactagtctcaatctccaacacatatggcctagactacgtacataacctaaacctactccaatgctaaaactaatcgtcccaacaattatattactaccactgacatgactttccaaaaaacacataatttgaatcaacacaaccacccacagcctaattattagcatcatccctctactattttttaaccaaatcaacaacaacctatttagctgttccccaaccttttcctccgaccccctaacaacccccctcctaatactaactacctgactcctacccctcacaatcatggcaagccaacgccacttatccagtgaaccactatcacgaaaaaaactctacctctctatactaatctccctacaaatctccttaattataacattcacagccacagaactaatcatattttatatcttcttcgaaaccacacttatccccaccttggctatcatcacccgatgaggcaaccagccagaacgcctgaacgcaggcacatacttcctattctacaccctagtaggctcccttcccctactcatcgcactgatttacactcacaacaccctaggctcactaaacattctactactcactctcactgcccaagaactatcaaactcctgagccaacaacttaatatgactagcttacacaatagcttttatagtaaagatacctctttacggactccacttatgactccctaaagcccatgtcgaagcccccatcgctgggtcaatagtacttgccgcagtactcttaaaactaggcggctatggtataatacgcctcacactcattctcaaccccctgacaaaacacatagcctaccccttccttgtactatccctatgaggcataattataacaagctccatctgcctacgacaaacagacctaaaatcgctcattgcatactcttcaatcagccacatagccctcgtagtaacagccattctcatccaaaccccctgaagcttcaccggcgcagtcattctcataatcgcccacggacttacatcctcattactattctgcctagcaaactcaaactacgaacgcactcacagtcgcatcataatcctctctcaaggacttcaaactctactcccactaatagctttttgatgacttctagcaagcctcgctaacctcgccttaccccccactattaacctactgggagaactctctgtgctagtaaccacgttctcctgatcaaatatcactctcctacttacaggactcaacatactagtcacagccctatactccctctacatatttaccacaacacaatgaggctcactcacccaccacattaacaacataaaaccctcattcacacgagaaaacaccctcatgttcatacacctatcccccattctcctcctatccctcaaccccgacatcattaccgggttttcctcttgtaaatatagtttaaccaaaacatcagattgtgaatctgacaacagaggcttacgaccccttatttaccgagaaagctcacaagaactgctaactcatgcccccatgtctaacaacatggctttctcaacttttaaaggataacagctatccattggtcttaggccccaaaaattttggtgcaactccaaataaaagtaataaccatgtacactactataaccaccctaaccctgacttccctaattccccccatccttaccaccctcgttaaccctaacaaaaaaaactcatacccccattatgtaaaatccattgtcgcatccacctttattatcagtctcttccccacaacaatattcatgtgcctagaccaagaagttattatctcgaactgacactgagccacaacccaaacaacccagctctccctaagcttcaaactagactacttctccataatattcatccctgtggcattgttcgttacatggtccatcatagaattctcactgtgatatataaactcagacccaaacattaatcagttcttcaaatatctactcatcttcctaattaccatactaatcttagttaccgctaacaacctattccaactgttcatcggctgagagggcgtaggaattatatccttcttgctcatcagttgatgatacgcccgagcagatgccaacacagcagccattcaagcaatcctatacaaccgtatcggcgatatcggtttcatcctcgccttagcatgatttatcctacactccaactcatgagacccacaacaaatagcccttctaaacgctaatccaagcctcaccccactactaggcctcctcctagcagcagcaggcaaatcagcccaattaggtctccacccctgactcccctcagccatagaaggccccaccccagtctcagccctactccactcaagcactatagttgtagcaggaatcttcttactcatccgcttccaccccctagcagaaaatagcccactaatccaaactctaacactatgcttaggcgctatcaccactctgttcgcagcagtctgcgcccttacacaaaatgacatcaaaaaaatcgtagccttctccacttcaagtcaactaggactcataatagttacaatcggcatcaaccaaccacacctagcattcctgcacatctgtacccacgccttcttcaaagccatactatttatgtgctccgggtccatcatccacaaccttaacaatgaacaagatattcgaaaaataggaggactactcaaaaccatacctctcacttcaacctccctcaccattggcagcctagcattagcaggaatacctttcctcacaggtttctactccaaagaccacatcatcgaaaccgcaaacatatcatacacaaacgcctgagccctatctattactctcatcgctacctccctgacaagcgcctatagcactcgaataattcttctcaccctaacaggtcaacctcgcttccccacccttactaacattaacgaaaataaccccaccctactaaaccccattaaacgcctgacagccggaagcctattcgcaggatttctcattactaacaacatttcccccgcatcccccttccaaacaacaatccccctctacctaaaactcacagccctcgctgtcactttcctaggacttctaacagccctagacctcaactacctaaccaacaaacttaaaataaaacccccactatgcacattttatttctccaacatactcggattctaccctagcatcacacaccgcacaatcccctatctaggccttcttacgagccaaaacctgcccctactcctcctagacctaacctgactagaaaaactattacctaaaacaatttcacagcaccaaatctccacctccatcatcacctcaacccaaaaaggcataattaaactttacttcctctctttcttcttcccactcatcctaaccctactcctaatcacataacctattcccccgagcaatctcaattacaatatatacaccaacaaacaatgttcaaccagtaactactactaatcaacgcccataatcatacaaagcccccgcaccaataggatcctcccgaatcaaccctgacccctctccttcataaattattcagcttcctacactattaaagtttaccacaaccaccaccccatcatactctttcacccacagcaccaatcctacctccatcgctaaccccactaaaacactcaccaagacctcaacccctgacccccatgcctcaggatactcctcaatagccatcgctgtagtatatccaaagacaaccatcattccccctaaataaattaaaaaaactattaaacccatataacctcccccaaaattcagaataataacacacccgaccacaccgctaacaatcaatactaaacccccataaataggagaaggcttagaagaaaaccccacaaaccccattactaaacccacactcaacagaaacaaagcatacatcattattctcgcacggactacaaccacgaccaatgatatgaaaaaccatcgttgtatttcaactacaagaacaccaatgaccccaatacgcaaaattaaccccctaataaaattaattaaccactcattcatcgacctccccaccccatccaacatctccgcatgatgaaacttcggctcactccttggcgcctgcctgatcctccaaatcaccacaggactattcctagccatgcactactcaccagacgcctcaaccgccttttcatcaatcgcccacatcactcgagacgtaaattatggctgaatcatccgctaccttcacgccaatggcgcctcaatattctttatctgcctcttcctacacatcgggcgaggcctatattacggatcatttctctactcagaaacctgaaacatcggcattatcctcctgcttgcaactatagcaacagccttcataggctatgtcctcccgtgaggccaaatatcattctgaggggccacagtaattacaaacttactatccgccatcccatacattgggacagacctagttcaatgaatctgaggaggctactcagtagacagtcccaccctcacacgattctttacctttcacttcatcttgcccttcattattgcagccctagcagcactccacctcctattcttgcacgaaacgggatcaaacaaccccctaggaatcacctcccattccgataaaatcaccttccacccttactacacaatcaaagacgccctcggcttacttctcttcattctctccttaatgacattaacactattctcaccagacctcctaggcgacccagacaattataccctagccaaccccttaaacacccctccccacatcaagcccgaatgatatttcctattcgcctacacaattctccgatccgtccctaacaaactaggaggcgtccttgccctattactatccatcctcatcctagcaataatccccatcctccatatatccaaacaacaaagcataatatttcgcccactaagccaatcactttattgactcctagccgcagacctcctcattctaacctgaatcggaggacaaccagtaagctacccttttaccatcattggacaagtagcatccgtactatacttcacaacaatcctaatcctaataccaactatctccctaattgaaaacaaaatactcaaatgggcctgtccttgtagtataaactaatacaccagtcttgtaaaccggagatgaaaacctttttccaaggacaaatcagagaaaaagtctttaactccaccattagcacccaaagctaagattctaatttaaactattctctgttctttcatggggaagcagatttgggtaccacccaagtattgactcacccatcaacaaccgctatgtatttcgtacattactgccagccaccatgaatattgtacggtaccataaatacttgaccacctgtagtacataaaaacccaatccacatcaaaaccccctccccatgcttacaagcaagtacagcaatcaaccctcaactatcacacatcaactgcaactccaaagccacccctcacccactaggataccaacaaacctacccacccttaacagtacatagtacataaagccatttaccgtacatagcacattacagtcaaatcccttctcgtccccatggatgacccccctcagataggggtcccttgaccaccatcctccgtgaaatcaatatcccgcacaagagtgctactctcctcgctccgggcccataacacttgggggtagctaaagtgaactgtatccgacatctggttcctacttcagggtcataaagcctaaatagcccacacgttccccttaaataagacatcacgatg

SEQ ID NO: 500 - DNA, 16569 bp, Homo sapiens mitochondrial
  3107: "n" refers to a nucleotide at position 3107 of the Cambridge Reference Sequence (CRS, Anderson et al. 1981 Nature 290:457-465), later determined to be absent from the human mtDNA sequence according to the revised CRS (rCRS, Andrews et al. 1999 Nature Genetics 23:147); "n" therefore represents a single nucleotide deletion at a position corresponding to nucleotide 3107 of SEQ ID NO:1 as provided herein.
gatcacaggtctatcaccctattaaccactcacgggagctctccatgcatttggtattttcgtctggggggtatgcacgcgatagcattgcgagacgctggagccggagcaccctatgtcgcagtatctgtctttgattcctgcctcatcctattatttatcgcacctacgttcaatattacaggcgaacatacttactaaagtgtgttaattaattaatgcttgtaggacataataataacaattgaatgtctgcacagccactttccacacagacatcataacaaaaaatttccaccaaaccccccctcccccgcttctggccacagcacttaaacacatctctgccaaaccccaaaaacaaagaaccctaacaccagcctaaccagatttcaaattttatcttttggcggtatgcacttttaacagtcaccccccaactaacacattattttcccctcccactcccatactactaatctcatcaatacaacccccgcccatcctacccagcacacacacaccgctgctaaccccataccccgaaccaaccaaaccccaaagacaccccccacagtttatgtagcttacctcctcaaagcaatacactgaaaatgtttagacgggctcacatcaccccataaacaaataggtttggtcctagcctttctattagctcttagtaagattacacatgcaagcatccccgttccagtgagttcaccctctaaatcaccacgatcaaaagggacaagcatcaagcacgcagcaatgcagctcaaaacgcttagcctagccacacccccacgggaaacagcagtgattaacctttagcaataaacgaaagtttaactaagctatactaaccccagggttggtcaatttcgtgccagccaccgcggtcacacgattaacccaagtcaatagaagccggcgtaaagagtgttttagatcaccccctccccaataaagctaaaactcacctgagttgtaaaaaactccagttgacacaaaatagactacgaaagtggctttaacatatctgaacacacaatagctaagacccaaactgggattagataccccactatgcttagccctaaacctcaacagttaaatcaacaaaactgctcgccagaacactacgagccacagcttaaaactcaaaggacctggcggtgcttcatatccctctagaggagcctgttctgtaatcgataaaccccgatcaacctcaccacctcttgctcagcctatataccgccatcttcagcaaaccctgatgaaggctacaaagtaagcgcaagtacccacgtaaagacgttaggtcaaggtgtagcccatgaggtggcaagaaatgggctacattttctaccccagaaaactacgatagcccttatgaaacttaagggtcgaaggtggatttagcagtaaactgagagtagagtgcttagttgaacagggccctgaagcgcgtacacaccgcccgtcaccctcctcaagtatacttcaaaggacatttaactaaaacccctacgcatttatatagaggagacaagtcgtaacatggtaagtgtactggaaagtgcacttggacgaaccagagtgtagcttaacacaaagcacccaacttacacttaggagatttcaacttaacttgaccgctctgagctaaacctagccccaaacccactccaccttactaccagacaaccttagccaaaccatttacccaaataaagtataggcgatagaaattgaaacctggcgcaatagatatagtaccgcaagggaaagatgaaaaattataaccaagcataatatagcaaggactaacccctataccttctgcataatgaattaactagaaataactttgcaaggagagccaaagctaagacccccgaaaccagacgagctacctaagaacagctaaaagagcacacccgtctatgtagcaaaatagtgggaagatttataggtagaggcgacaaacctaccgagcctggtgatagctggttgtccaagatagaatcttagttcaactttaaatttgcccacagaaccctctaaatccccttgtaaatttaactgttagtccaaagaggaacagctctttggacactaggaaaaaaccttgtagagagagtaaaaaatttaacacccatagtaggcctaaaagcagccaccaattaagaaagcgttcaagctcaacacccactacctaaaaaatcccaaacatataactgaactcctcacacccaattggaccaatctatcaccctatagaagaactaatgttagtataagtaacatgaaaacattctcctccgcataagcctgcgtcagattaaaacactgaactgacaattaacagcccaatatctacaatcaaccaacaagtcattattaccctcactgtcaacccaacacaggcatgctcataaggaaaggttaaaaaaagtaaaaggaactcggcaaatcttaccccgcctgtttaccaaaaacatcacctctagcatcaccagtattagaggcaccgcctgcccagtgacacatgtttaacggccgcggtaccctaaccgtgcaaaggtagcataatcacttgttccttaaatagggacctgtatgaatggctccacgagggttcagctgtctcttacttttaaccagtgaaattgacctgcccgtgaagaggcgggcataacacagcaagacgagaagaccctatggagctttaatttattaatgcaaacagtacctaacaaacccacaggtcctaaactaccaaacctgcattaaaaatttcggttggggcgacctcggagcagaacccaacctccgagcagtacatgctaagacttcaccagtcaaagcgaactactatactcaattgatccaataacttgaccaacggaacaagttaccctagggataacagcgcaatcctattctagagtccatatcaacaatagggtttacgacctcgatgttggatcaggacatcccgatggtgcagccgctattaaaggttcgtttgttcaacgattaaagtcctacgtgatctgagttcagaccggagtaatccaggtcggtttctatctacnttcaaattcctccctgtacgaaaggacaagagaaataaggcctacttcacaaagcgccttcccccgtaaatgatatcatctcaacttagtattatacccacacccacccaagaacagggtttgttaagatggcagagcccggtaatcgcataaaacttaaaactttacagtcagaggttcaattcctcttcttaacaacatacccatggccaacctcctactcctcattgtacccattctaatcgcaatggcattcctaatgcttaccgaacgaaaaattctaggctatatacaactacgcaaaggccccaacgttgtaggcccctacgggctactacaacccttcgctgacgccataaaactcttcaccaaagagcccctaaaacccgccacatctaccatcaccctctacatcaccgccccgaccttagctctcaccatcgctcttctactatgaacccccctccccatacccaaccccctggtcaacctcaacctaggcctcctatttattctagccacctctagcctagccgtttactcaatcctctgatcagggtgagcatcaaactcaaactacgccctgatcggcgcactgcgagcagtagcccaaacaatctcatatgaagtcaccctagccatcattctactatcaacattactaataagtggctcctttaacctctccacccttatcacaacacaagaacacctctgattactcctgccatcatgacccttggccataatatgatttatctccacactagcagagaccaaccgaacccccttcgaccttgccgaaggggagtccgaactagtctcaggcttcaacatcgaatacgccgcaggccccttcgccctattcttcatagccgaatacacaaacattattataataaacaccctcaccactacaatcttcctaggaacaacatatgacgcactctcccctgaactctacacaacatattttgtcaccaagaccctacttctaacctccctgttcttatgaattcgaacagcatacccccgattccgctacgaccaactcatacacctcctatgaaaaaacttcctaccactcaccctagcattacttatatgatatgtctccatacccattacaatctccagcattccccctcaaacctaagaaatatgtctgataaaagagttactttgatagagtaaataataggagcttaaacccccttatttctaggactatgagaatcgaacccatccctgagaatccaaaattctccgtgccacctatcacaccccatcctaaagtaaggtcagctaaataagctatcgggcccataccccgaaaatgttggttatacccttcccgtactaattaatcccctggcccaacccgtcatctactctaccatctttgcaggcacactcatcacagcgctaagctcgcactgattttttacctgagtaggcctagaaataaacatgctagcttttattccagttctaaccaaaaaaataaaccctcgttccacagaagctgccatcaagtatttcctcacgcaagcaaccgcatccataatccttctaatagctatcctcttcaacaatatactctccggacaatgaaccataaccaatactaccaatcaatactcatcattaataatcataatggctatagcaataaaactaggaatagccccctttcacttctgagtcccagaggttacccaaggcacccctctgacatccggcctgcttcttctcacatgacaaaaactagcccccatctcaatcatataccaaatctctccctcactaaacgtaagccttctcctcactctctcaatcttatccatcatagcaggcagttgaggtggattaaaccaaacccagctacgcaaaatcttagcatactcctcaattacccacataggatgaataatagcagttctaccgtacaaccctaacataaccattcttaatttaactatttatattatcctaactactaccgcattcctactactcaacttaaactccagcaccacgaccctactactatctcgcacctgaaacaagctaacatgactaacacccttaattccatccaccctcctctccctaggaggcctgcccccgctaaccggctttttgcccaaatgggccattatcgaagaattcacaaaaaacaatagcctcatcatccccaccatcatagccaccatcaccctccttaacctctacttctacctacgcctaatctactccacctcaatcacactactccccatatctaacaacgtaaaaataaaatgacagtttgaacatacaaaacccaccccattcctccccacactcatcgcccttaccacgctactcctacctatctccccttttatactaataatcttatagaaatttaggttaaatacagaccaagagccttcaaagccctcagtaagttgcaatacttaatttctgtaacagctaaggactgcaaaaccccactctgcatcaactgaacgcaaatcagccactttaattaagctaagcccttactagaccaatgggacttaaacccacaaacacttagttaacagctaagcaccctaatcaactggcttcaatctacttctcccgccgccgggaaaaaaggcgggagaagccccggcaggtttgaagctgcttcttcgaatttgcaattcaatatgaaaatcacctcggagctggtaaaaagaggcctaacccctgtctttagatttacagtccaatgcttcactcagccattttacctcacccccactgatgttcgccgaccgttgactattctctacaaaccacaaagacattggaacactatacctattattcggcgcatgagctggagtcctaggcacagctctaagcctccttattcgagccgagctgggccagccaggcaaccttctaggtaacgaccacatctacaacgttatcgtcacagcccatgcatttgtaataatcttcttcatagtaatacccatcataatcggaggctttggcaactgactagttcccctaataatcggtgcccccgatatggcgtttccccgcataaacaacataagcttctgactcttacctccctctctcctactcctgctcgcatctgctatagtggaggccggagcaggaacaggttgaacagtctaccctcccttagcagggaactactcccaccctggagcctccgtagacctaaccatcttctccttacacctagcaggtgtctcctctatcttaggggccatcaatttcatcacaacaattatcaatataaaaccccctgccataacccaataccaaacgcccctcttcgtctgatccgtcctaatcacagcagtcctacttctcctatctctcccagtcctagctgctggcatcactatactactaacagaccgcaacctcaacaccaccttcttcgaccccgccggaggaggagaccccattctataccaacacctattctgatttttcggtcaccctgaagtttatattcttatcctaccaggcttcggaataatctcccatattgtaacttactactccggaaaaaaagaaccatttggatacataggtatggtctgagctatgatatcaattggcttcctagggtttatcgtgtgagcacaccatatatttacagtaggaatagacgtagacacacgagcatatttcacctccgctaccataatcatcgctatccccaccggcgtcaaagtatttagctgactcgccacactccacggaagcaatatgaaatgatctgctgcagtgctctgagccctaggattcatctttcttttcaccgtaggtggcctgactggcattgtattagcaaactcatcactagacatcgtactacacgacacgtactacgttgtagcccacttccactatgtcctatcaataggagctgtatttgccatcataggaggcttcattcactgatttcccctattctcaggctacaccctagaccaaacctacgccaaaatccatttcactatcatattcatcggcgtaaatctaactttcttcccacaacactttctcggcctatccggaatgccccgacgttactcggactaccccgatgcatacaccacatgaaacatcctatcatctgtaggctcattcatttctctaacagcagtaatattaataattttcatgatttgagaagccttcgcttcgaagcgaaaagtcctaatagtagaagaaccctccataaacctggagtgactatatggatgccccccaccctaccacacattcgaagaacccgtatacataaaatctagacaaaaaaggaaggaatcgaaccccccaaagctggtttcaagccaaccccatggcctccatgactttttcaaaaaggtattagaaaaaccatttcataactttgtcaaagttaaattataggctaaatcctatatatcttaatggcacatgcagcgcaagtaggtctacaagacgctacttcccctatcatagaagagcttatcacctttcatgatcacgccctcataatcattttccttatctgcttcctagtcctgtatgcccttttcctaacactcacaacaaaactaactaatactaacatctcagacgctcaggaaatagaaaccgtctgaactatcctgcccgccatcatcctagtcctcatcgccctcccatccctacgcatcctttacataacagacgaggtcaacgatccctcccttaccatcaaatcaattggccaccaatggtactgaacctacgagtacaccgactacggcggactaatcttcaactcctacatacttcccccattattcctagaaccaggcgacctgcgactccttgacgttgacaatcgagtagtactcccgattgaagcccccattcgtataataattacatcacaagacgtcttgcactcatgagctgtccccacattaggcttaaaaacagatgcaattcccggacgtctaaaccaaaccactttcaccgctacacgaccgggggtatactacggtcaatgctctgaaatctgtggagcaaaccacagtttcatgcccatcgtcctagaattaattcccctaaaaatctttgaaatagggcccgtatttaccctatagcaccccctctaccccctctagagcccactgtaaagctaacttagcattaaccttttaagttaaagattaagagaaccaacacctctttacagtgaaatgccccaactaaatactaccgtatggcccaccataattacccccatactccttacactattcctcatcacccaactaaaaatattaaacacaaactaccacctacctccctcaccaaagcccataaaaataaaaaattataacaaaccctgagaaccaaaatgaacgaaaatctgttcgcttcattcattgcccccacaatcctaggcctacccgccgcagtactgatcattctatttccccctctattgatccccacctccaaatatctcatcaacaaccgactaatcaccacccaacaatgactaatcaaactaacctcaaaacaaatgataaccatacacaacactaaaggacgaacctgatctcttatactagtatccttaatcatttttattgccacaactaacctcctcggactcctgcctcactcatttacaccaaccacccaactatctataaacctagccatggccatccccttatgagcgggcgcagtgattataggctttcgctctaagattaaaaatgccctagcccacttcttaccacaaggcacacctacaccccttatccccatactagttattatcgaaaccatcagcctactcattcaaccaatagccctggccgtacgcctaaccgctaacattactgcaggccacctactcatgcacctaattggaagcgccaccctagcaatatcaaccattaaccttccctctacacttatcatcttcacaattctaattctactgactatcctagaaatcgctgtcgccttaatccaagcctacgttttcacacttctagtaagcctctacctgcacgacaacacataatgacccaccaatcacatgcctatcatatagtaaaacccagcccatgacccctaacaggggccctctcagccctcctaatgacctccggcctagccatgtgatttcacttccactccataacgctcctcatactaggcctactaaccaacacactaaccatataccaatgatggcgcgatgtaacacgagaaagcacataccaaggccaccacacaccacctgtccaaaaaggccttcgatacgggataatcctatttattacctcagaagtttttttcttcgcaggatttttctgagccttttaccactccagcctagcccctaccccccaattaggagggcactggcccccaacaggcatcaccccgctaaatcccctagaagtcccactcctaaacacatccgtattactcgcatcaggagtatcaatcacctgagctcaccatagtctaatagaaaacaaccgaaaccaaataattcaagcactgcttattacaattttactgggtctctattttaccctcctacaagcctcagagtacttcgagtctcccttcaccatttccgacggcatctacggctcaacattttttgtagccacaggcttccacggacttcacgtcattattggctcaactttcctcactatctgcttcatccgccaactaatatttcactttacatccaaacatcactttggcttcgaagccgccgcctgatactggcattttgtagatgtggtttgactatttctgtatgtctccatctattgatgagggtcttactcttttagtataaatagtaccgttaacttccaattaactagttttgacaacattcaaaaaagagtaataaacttcgccttaattttaataatcaacaccctcctagccttactactaataattattacattttgactaccacaactcaacggctacatagaaaaatccaccccttacgagtgcggcttcgaccctatatcccccgcccgcgtccctttctccataaaattcttcttagtagctattaccttcttattatttgatctagaaattgccctccttttacccctaccatgagccctacaaacaactaacctgccactaatagttatgtcatccctcttattaatcatcatcctagccctaagtctggcctatgagtgactacaaaaaggattagactgaaccgaattggtatatagtttaaacaaaacgaatgatttcgactcattaaattatgataatcatatttaccaaatgcccctcatttacataaatattatactagcatttaccatctcacttctaggaatactagtatatcgctcacacctcatatcctccctactatgcctagaaggaataatactatcgctgttcattatagctactctcataaccctcaacacccactccctcttagccaatattgtgcctattgccatactagtctttgccgcctgcgaagcagcggtgggcctagccctactagtctcaatctccaacacatatggcctagactacgtacataacctaaacctactccaatgctaaaactaatcgtcccaacaattatattactaccactgacatgactttccaaaaaacacataatttgaatcaacacaaccacccacagcctaattattagcatcatccctctactattttttaaccaaatcaacaacaacctatttagctgttccccaaccttttcctccgaccccctaacaacccccctcctaatactaactacctgactcctacccctcacaatcatggcaagccaacgccacttatccagtgaaccactatcacgaaaaaaactctacctctctatactaatctccctacaaatctccttaattataacattcacagccacagaactaatcatattttatatcttcttcgaaaccacacttatccccaccttggctatcatcacccgatgaggcaaccagccagaacgcctgaacgcaggcacatacttcctattctacaccctagtaggctcccttcccctactcatcgcactaatttacactcacaacaccctaggctcactaaacattctactactcactctcactgcccaagaactatcaaactcctgagccaacaacttaatatgactagcttacacaatagcttttatagtaaagatacctctttacggactccacttatgactccctaaagcccatgtcgaagcccccatcgctgggtcaatagtacttgccgcagtactcttaaaactaggcggctatggtataatacgcctcacactcattctcaaccccctgacaaaacacatagcctaccccttccttgtactatccctatgaggcataattataacaagctccatctgcctacgacaaacagacctaaaatcgctcattgcatactcttcaatcagccacatagccctcgtagtaacagccattctcatccaaaccccctgaagcttcaccggcgcagtcattctcataatcgcccacggacttacatcctcattactattctgcctagcaaactcaaactacgaacgcactcacagtcgcatcataatcctctctcaaggacttcaaactctactcccactaatagctttttgatgacttctagcaagcctcgctaacctcgccttaccccccactattaacctactgggagaactctctgtgctagtaaccacgttctcctgatcaaatatcactctcctacttacaggactcaacatactagtcacagccctatactccctctacatatttaccacaacacaatggggctcactcacccaccacattaacaacataaaaccctcattcacacgagaaaacaccctcatgttcatacacctatcccccattctcctcctatccctcaaccccgacatcattaccgggttttcctcttgtaaatatagtttaaccaaaacatcagattgtgaatctgacaacagaggcttacgaccccttatttaccgagaaagctcacaagaactgctaactcatgcccccatgtctaacaacatggctttctcaacttttaaaggataacagctatccattggtcttaggccccaaaaattttggtgcaactccaaataaaagtaataaccatgcacactactataaccaccctaaccctgacttccctaattccccccatccttaccaccctcgttaaccctaacaaaaaaaactcatacccccattatgtaaaatccattgtcgcatccacctttattatcagtctcttccccacaacaatattcatgtgcctagaccaagaagttattatctcgaactgacactgagccacaacccaaacaacccagctctccctaagcttcaaactagactacttctccataatattcatccctgtagcattgttcgttacatggtccatcatagaattctcactgtgatatataaactcagacccaaacattaatcagttcttcaaatatctactcatcttcctaattaccatactaatcttagttaccgctaacaacctattccaactgttcatcggctgagagggcgtaggaattatatccttcttgctcatcagttgatgatacgcccgagcagatgccaacacagcagccattcaagcaatcctatacaaccgtatcggcgatatcggtttcatcctcgccttagcatgatttatcctacactccaactcatgagacccacaacaaatagcccttctaaacgctaatccaagcctcaccccactactaggcctcctcctagcagcagcaggcaaatcagcccaattaggtctccacccctgactcccctcagccatagaaggccccaccccagtctcagccctactccactcaagcactatagttgtagcaggaatcttcttactcatccgcttccaccccctagcagaaaatagcccactaatccaaactctaacactatgcttaggcgctatcaccactctgttcgcagcagtctgcgcccttacacaaaatgacatcaaaaaaatcgtagccttctccacttcaagtcaactaggactcataatagttacaatcggcatcaaccaaccacacctagcattcctgcacatctgtacccacgccttcttcaaagccatactatttatgtgctccgggtccatcatccacaaccttaacaatgaacaagatattcgaaaaataggaggactactcaaaaccatacctctcacttcaacctccctcaccattggcagcctagcattagcaggaatacctttcctcacaggtttctactccaaagaccacatcatcgaaaccgcaaacatatcatacacaaacgcctgagccctatctattactctcatcgctacctccctgacaagcgcctatagcactcgaataattcttctcaccctaacaggtcaacctcgcttccccacccttactaacattaacgaaaataaccccaccctactaaaccccattaaacgcctggcagccggaagcctattcgcaggatttctcattactaacaacatttcccccgcatcccccttccaaacaacaatccccctctacctaaaactcacagccctcgctgtcactttcctaggacttctaacagccctagacctcaactacctaaccaacaaacttaaaataaaatccccactatgcacattttatttctccaacatactcggattctaccctagcatcacacaccgcacaatcccctatctaggccttcttacgagccaaaacctgcccctactcctcctagacctaacctgactagaaaagctattacctaaaacaatttcacagcaccaaatctccacctccatcatcacctcaacccaaaaaggcataattaaactttacttcctctctttcttcttcccactcatcctaaccctactcctaatcacataacctattcccccgagcaatctcaattacaatatatacaccaacaaacaatgttcaaccagtaactactactaatcaacgcccataatcatacaaagcccccgcaccaataggatcctcccgaatcaaccctgacccctctccttcataaattattcagcttcctacactattaaagtttaccacaaccaccaccccatcatactctttcacccacagcaccaatcctacctccatcgctaaccccactaaaacactcaccaagacctcaacccctgacccccatgcctcaggatactcctcaatagccatcgctgtagtatatccaaagacaaccatcattccccctaaataaattaaaaaaactattaaacccatataacctcccccaaaattcagaataataacacacccgaccacaccgctaacaatcaatactaaacccccataaataggagaaggcttagaagaaaaccccacaaaccccattactaaacccacactcaacagaaacaaagcatacatcattattctcgcacggactacaaccacgaccaatgatatgaaaaaccatcgttgtatttcaactacaagaacaccaatgaccccaatacgcaaaactaaccccctaataaaattaattaaccactcattcatcgacctccccaccccatccaacatctccgcatgatgaaacttcggctcactccttggcgcctgcctgatcctccaaatcaccacaggactattcctagccatgcactactcaccagacgcctcaaccgccttttcatcaatcgcccacatcactcgagacgtaaattatggctgaatcatccgctaccttcacgccaatggcgcctcaatattctttatctgcctcttcctacacatcgggcgaggcctatattacggatcatttctctactcagaaacctgaaacatcggcattatcctcctgcttgcaactatagcaacagccttcataggctatgtcctcccgtgaggccaaatatcattctgaggggccacagtaattacaaacttactatccgccatcccatacattgggacagacctagttcaatgaatctgaggaggctactcagtagacagtcccaccctcacacgattctttacctttcacttcatcttgcccttcattattgcagccctagcagcactccacctcctattcttgcacgaaacgggatcaaacaaccccctaggaatcacctcccattccgataaaatcaccttccacccttactacacaatcaaagacgccctcggcttacttctcttccttctctccttaatgacattaacactattctcaccagacctcctaggcgacccagacaattataccctagccaaccccttaaacacccctccccacatcaagcccgaatgatatttcctattcgcctacacaattctccgatccgtccctaacaaactaggaggcgtccttgccctattactatccatcctcatcctagcaataatccccatcctccatatatccaaacaacaaagcataatatttcgcccactaagccaatcactttattgactcctagccgcagacctcctcattctaacctgaatcggaggacaaccagtaagctacccttttaccatcattggacaagtagcatccgtactatacttcacaacaatcctaatcctaataccaactatctccctaattgaaaacaaaatactcaaatgggcctgtccttgtagtataaactaatacaccagtcttgtaaaccggagatgaaaacctttttccaaggacaaatcagagaaaaagtctttaactccaccattagcacccaaagctaagattctaatttaaactattctctgttctttcatggggaagcagatttgggtaccacccaagtattgactcacccatcaacaaccgctatgtatttcgtacattactgccagccaccatgaatattgtacggtaccataaatacttgaccacctgtagtacataaaaacccaatccacatcaaaaccccctccccatgcttacaagcaagtacagcaatcaaccctcaactatcacacatcaactgcaactccaaagccacccctcacccactaggataccaacaaacctacccacccttaacagtacatagtacataaagccatttaccgtacatagcacattacagtcaaatcccttctcgtccccatggatgacccccctcagataggggtcccttgaccaccatcctccgtgaaatcaatatcccgcacaagagtgctactctcctcgctccgggcccataacacttgggggtagctaaagtgaactgtatccgacatctggttcctacttcagggtcataaagcctaaatagcccacacgttccccttaaataagacatcacgatg

SEQ ID NO: 501 - DNA, 16569 bp, Homo sapiens mitochondrial
  3107: "n" refers to a nucleotide at position 3107 of the Cambridge Reference Sequence (CRS, Anderson et al. 1981 Nature 290:457-465), later determined to be absent from the human mtDNA sequence according to the revised CRS (rCRS, Andrews et al. 1999 Nature Genetics 23:147); "n" therefore represents a single nucleotide deletion at a position corresponding to nucleotide 3107 of SEQ ID NO:1 as provided herein.
gatcacaggtctatcaccctattaaccactcacgggagctctccatgcatttggtattttcgtctggggggtatgcacgcgatagcattgcgagacgctggagccggagcaccctatgtcgcagtatctgtctttgattcctgcctcatcctattatttatcgcacctacgttcaatattacaggcgaacatacttactaaagtgtgttaattaattaatgcttgtaggacataataataacaattgaatgtctgcacagccactttccacacagacatcataacaaaaaatttccaccaaaccccccctcccccgcttctggccacagcacttaaacacatctctgccaaaccccaaaaacaaagaaccctaacaccagcctaaccagatttcaaattttatcttttggcggtatgcacttttaacagtcaccccccaactaacacattattttcccctcccactcccatactactaatctcatcaatacaacccccgcccatcctacccagcacacacacaccgctgctaaccccataccccgaaccaaccaaaccccaaagacaccccccacagtttatgtagcttacctcctcaaagcaatacactgaaaatgtttagacgggctcacatcaccccataaacaaataggtttggtcctagcctttctattagctcttagtaagattacacatgcaagcatccccgttccagtgagttcaccctctaaatcaccacgatcaaaagggacaagcatcaagcacgcagcaatgcagctcaaaacgcttagcctagccacacccccacgggaaacagcagtgattaacctttagcaataaacgaaagtttaactaagctatactaaccccagggttggtcaatttcgtgccagccaccgcggtcacacgattaacccaagtcaatagaagccggcgtaaagagtgttttagatcaccccctccccaataaagctaaaactcacctgagttgtaaaaaactccagttgacacaaaatagactacgaaagtggctttaacatatctgaacacacaatagctaagacccaaactgggattagataccccactatgcttagccctaaacctcaacagttaaatcaacaaaactgctcgccagaacactacgagccacagcttaaaactcaaaggacctggcggtgcttcatatccctctagaggagcctgttctgtaatcgataaaccccgatcaacctcaccacctcttgctcagcctatataccgccatcttcagcaaaccctgatgaaggctacaaagtaagcgcaagtacccacgtaaagacgttaggtcaaggtgtagcccatgaggtggcaagaaatgggctacattttctaccccagaaaactacgatagcccttatgaaacttaagggtcgaaggtggatttagcagtaaactgagagtagagtgcttagttgaacagggccctgaagcgcgtacacaccgcccgtcaccctcctcaagtatacttcaaaggacatttaactaaaacccctacgcatttatatagaggagacaagtcgtaacatggtaagtgtactggaaagtgcacttggacgaaccagagtgtagcttaacacaaagcacccaacttacacttaggagatttcaacttaacttgaccgctctgagctaaacctagccccaaacccactccaccttactaccagacaaccttagccaaaccatttacccaaataaagtataggcgatagaaattgaaacctggcgcaatagatatagtaccgcaagggaaagatgaaaaattataaccaagcataatatagcaaggactaacccctataccttctgcataatgaattaactagaaataactttgcaaggagagccaaagctaagacccccgaaaccagacgagctacctaagaacagctaaaagagcacacccgtctatgtagcaaaatagtgggaagatttataggtagaggcgacaaacctaccgagcctggtgatagctggttgtccaagatagaatcttagttcaactttaaatttgcccacagaaccctctaaatccccttgtaaatttaactgttagtccaaagaggaacagctctttggacactaggaaaaaaccttgtagagagagtaaaaaatttaacacccatagtaggcctaaaagcagccaccaattaagaaagcgttcaagctcaacacccactacctaaaaaatcccaaacatataactgaactcctcacacccaattggaccaatctatcaccctatagaagaactaatgttagtataagtaacatgaaaacattctcctccgcataagcctgcgtcagattaaaacactgaactgacaattaacagcccaatatctacaatcaaccaacaagtcattattaccctcactgtcaacccaacacaggcatgctcataaggaaaggttaaaaaaagtaaaaggaactcggcaaatcttaccccgcctgtttaccaaaaacatcacctctagcatcaccagtattagaggcaccgcctgcccagtgacacatgtttaacggccgcggtaccctaaccgtgcaaaggtagcataatcacttgttccttaaatagggacctgtatgaatggctccacgagggttcagctgtctcttacttttaaccagtgaaattgacctgcccgtgaagaggcgggcataacacagcaagacgagaagaccctatggagctttaatttattaatgcaaacagtacctaacaaacccacaggtcctaaactaccaaacctgcattaaaaatttcggttggggcgacctcggagcagaacccaacctccgagcagtacatgctaagacttcaccagtcaaagcgaactactatactcaattgatccaataacttgaccaacggaacaagttaccctagggataacagcgcaatcctattctagagtccatatcaacaatagggtttacgacctcgatgttggatcaggacatcccgatggtgcagccgctattaaaggttcgtttgttcaacgattaaagtcctacgtgatctgagttcagaccggagtaatccaggtcggtttctatctacnttcaaattcctccctgtacgaaaggacaagagaaataaggcctacttcacaaagcgccttcccccgtaaatgatatcatctcaacttagtattatacccacacccacccaagaacagggtttgttaagatggcagagcccggtaatcgcataaaacttaaaactttacagtcagaggttcaattcctcttcttaacaacatacccatggccaacctcctactcctcattgcacccattctaatcgcaatggcattcctaatgcttaccgaacgaaaaattctaggctatatacaactacgcaaaggccccaacgttgtaggcccctacgggctactacaacccttcgctgacgccataaaactcttcaccaaagagcccctaaaacccgccacatctaccatcaccctctacatcaccgccccgaccttagctctcaccatcgctcttctactatgaacccccctccccatacccaaccccctggtcaacctcaacctaggcctcctatttattctagccacctctagcctagccgtttactcaatcctctgatcagggtgagcatcaaactcaaactacgccctgatcggcgcactgcgagcagtagcccaaacaatctcatatgaagtcaccctagccatcattctactatcaacattactaataagtggctcctttaacctctccacccttatcacaacacaagaacacctctgattactcctgccatcatgacccttggccataatatgatttatctccacactagcagagaccaaccgaacccccttcgaccttgccgaaggggagtccgaactagtctcaggcttcaacatcgaatacgccgcaggccccttcgccctattcttcatagccgaatacacaaacattattataataaacaccctcaccactacaatcttcctaggaacaacatatgacgcactctcccctgaactctacacaacatattttgtcaccaagaccctacttctaacctccctgttcttatgaattcgaacagcatacccccgattccgctacgaccaactcatacacctcctatgaaaaaacttcctaccactcaccctagcattacttatatgatatgtctccatacccattacaatctccagcattccccctcaaacctaagaaatatgtctgataaaagagttactttgatagagtaaataataggagcttaaacccccttatttctaggactatgagaatcgaacccatccctgagaatccaaaattctccgtgccacctatcacaccccatcctaaagtaaggtcagctaaataagctatcgggcccataccccgaaaatgttggttatacccttcccgtactaattaatcccctggcccaacccgtcatctactctaccatctttgcaggcacactcatcacagcgctaagctcgcactgattttttacctgagtaggcctagaaataaacatgctagcttttattccagttctaaccaaaaaaataaaccctcgttccacagaagctgccatcaagtatttcctcacgcaagcaaccgcatccataatccttctaatagctatcctcttcaacaatatactctccggacaatgaaccataaccaatactaccaatcaatactcatcattaataatcataatggctatagcaataaaactaggaatagccccctttcacttctgagtcccagaggttacccaaggcacccctctgacatccggcctgcttcttctcacatgacaaaaactagcccccatctcaatcatataccaaatctctccctcactaaacgtaagccttctcctcactctctcaatcttatccatcatagcaggcagttgaggtggattaaaccaaacccagctacgcaaaatcttagcatactcctcaattacccacataggatgaataatagcagttctaccgtacaaccctaacataaccattcttaatttaactatttatattatcctaactactaccgcattcctactactcaacttaaactccagcaccacgaccctactactatctcgcacctgaaacaagctaacatgactaacacccttaattccatccaccctcctctccctaggaggcctgcccccgctaaccggctttttgcccaaatgggccattatcgaagaattcacaaaaaacaatagcctcatcatccccaccatcatagccaccatcaccctccttaacctctacttctacctacgcctaatctactccacctcaatcacactactccccatatctaacaacgtaaaaataaaatgacagtttgaacatacaaaacccaccccattcctccccacactcatcgcccttaccacgctactcctacctatctccccttttatactaataatcttatagaaatttaggttaaatacagaccaagagccttcaaagccctcagtaagttgcaatacttaatttctgtaacagctaaggactgcaaaaccccactctgcatcaactgaacgcaaatcagccactttaattaagctaagcccttactagaccaatgggacttaaacccacaaacacttagttaacagctaagcaccctaatcaactggcttcaatctacttctcccgccgccgggaaaaaaggcgggagaagccccggcaggtttgaagctgcttcttcgaatttgcaattcaatatgaaaatcacctcggagctggtaaaaagaggcctaacccctgtctttagatttacagtccaatgcttcactcagccattttacctcacccccactgatgttcgccgaccgttgactattctctacaaaccacaaagacattggaacactatacctattattcggcgcatgagctggagtcctaggcacagctctaagcctccttattcgagccgagctgggccagccaggcaaccttctaggtaacgaccacatctacaacgttatcgtcacagcccatgcatttgtaataatcttcttcatagtaatacccatcataatcggaggctttggcaactgactagttcccctaataatcggtgcccccgatatggcgtttccccgcataaacaacataagcttctgactcttacctccctctctcctactcctgctcgcatctgctatagtggaggccggagcaggaacaggttgaacagtctaccctcccttagcagggaactactcccaccctggagcctccgtagacctaaccatcttctccttacacctagcaggtgtctcctctatcttaggggccatcaatttcatcacaacaattatcaatataaaaccccctgccataacccaataccaaacgcccctcttcgtctgatccgtcctaatcacagcagtcctacttctcctatctctcccagtcctagctgctggcatcactatactactaacagaccgcaacctcaacaccaccttcttcgaccccgccggaggaggagaccccattctataccaacacctattctgatttttcggtcaccctgaagtttatattcttatcctaccaggcttcggaataatctcccatattgtaacttactactccggaaaaaaagaaccatttggatacataggtatggtctgagctatgatatcaattggcttcctagggtttatcgtgtgagcacaccatatatttacagtaggaatagacgtagacacacgagcatatttcacctccgccaccataatcatcgctatccccaccggcgtcaaagtatttagctgactcgccacactccacggaagcaatatgaaatgatctgctgcagtgctctgagccctaggattcatctttcttttcaccgtaggtggcctgactggcattgtattagcaaactcatcactagacatcgtactacacgacacgtactacgttgtagcccacttccactatgtcctatcaataggagctgtatttgccatcataggaggcttcattcactgatttcccctattctcaggctacaccctagaccaaacctacgccaaaatccatttcactatcatattcatcggcgtaaatctaactttcttcccacaacactttctcggcctatccggaatgccccgacgttactcggactaccccgatgcatacaccacatgaaacatcctatcatctgtaggctcattcatttctctaacagcagtaatattaataattttcatgatttgagaagccttcgcttcgaagcgaaaagtcctaatagtagaagaaccctccataaacctggagtgactatatggatgccccccaccctaccacacattcgaagaacccgtatacataaaatctagacaaaaaaggaaggaatcgaaccccccaaagctggtttcaagccaaccccatggcctccatgactttttcaaaaaggtattagaaaaaccatttcataactttgtcaaagttaaattataggctaaatcctatatatcttaatggcacatgcagcgcaagtaggtctacaagacgctacttcccctatcatagaagagcttatcacctttcatgatcacgccctcataatcattttccttatctgcttcctagtcctgtatgcccttttcctaacactcacaacaaaactaactaatactaacatctcagacgctcaggaaatagaaaccgtctgaactatcctgcccgccatcatcctagtcctcatcgccctcccatccctacgcatcctttacataacagacgaggtcaacgatccctcccttaccatcaaatcaattggccaccaatggtactgaacctacgagtacaccgactacggcggactaatcttcaactcctacatacttcccccattattcctagaaccaggcgacctgcgactccttgacgttgacaatcgagtagtactcccgattgaagcccccattcgtataataattacatcacaagacgtcttgcactcatgagctgtccccacattaggcttaaaaacagatgcaattcccggacgtctaaaccaaaccactttcaccgctacacgaccgggggtatactacggtcaatgctctgaaatctgtggagcaaaccacagtttcatgcccatcgtcctagaattaattcccctaaaaatctttgaaatagggcccgtatttaccctatagcaccccctctaccccctctagagcccactgtaaagctaacttagcattaaccttttaagttaaagattaagagaaccaacacctctttacagtgaaatgccccaactaaatactaccgtatggcccaccataattacccccatactccttacactattcctcatcacccaactaaaaatattaaacacaaactaccacctacctccctcaccaaagcccataaaaataaaaaattataacaaaccctgagaaccaaaatgaacgaaaatctgttcgcttcattcattgcccccacaatcctaggcctacccgccgcagtactgatcattctatttccccctctattgatccccacctccaaatatctcatcaacaaccgactaatcaccacccaacaatgactaatcaaactaacctcaaaacaaatgataaccatacacaacactaaaggacgaacctgatctcttatactagtatccttaatcatttttattgccacaactaacctcctcggactcctgcctcactcatttacaccaaccacccaactatctataaacctagccatggccatccccttatgagcgggcgcagtgattataggctttcgctctaagattaaaaatgccctagcccacttcttaccacaaggcacacctacaccccttatccccatactagttattatcgaaaccatcagcctactcattcaaccaatagccctggccgtacgcctaaccgctaacattactgcaggccacctactcatgcacctaattggaagcgccaccctagcaatatcaaccattaaccttccctctacacttatcatcttcacaattctaattctactgactatcctagaaatcgctgtcgccttaatccaagcctacgttttcacacttctagtaagcctctacctgcacgacaacacataatgacccaccaatcacatgcctatcatatagtaaaacccagcccatgacccctaacaggggccctctcagccctcctaatgacctccggcctagccatgtgatttcacttccactccataacgctcctcatactaggcctactaaccaacacactaaccatataccaatgatggcgcgatgtaacacgagaaagcacataccaaggccaccacacaccacctgtccaaaaaggccttcgatacgggataatcctatttattacctcagaagtttttttcttcgcaggatttttctgagccttttaccactccagcctagcccctaccccccaattaggagggcactggcccccaacaggcatcaccccgctaaatcccctagaagtcccactcctaaacacatccgtattactcgcatcaggagtatcaatcacctgagctcaccatagtctaatagaaaacaaccgaaaccaaataattcaagcactgcttattacaattttactgggtctctattttaccctcctacaagcctcagagtacttcgagtctcccttcaccatttccgacggcatctacggctcaacattttttgtagccacaggcttccacggacttcacgtcattattggctcaactttcctcactatctgcttcatccgccaactaatatttcactttacatccaaacatcactttggcttcgaagccgccgcctgatactggcattttgtagatgtggtttgactatttctgtatgtctccatctattgatgagggtcttactcttttagtataaatagtaccgttaacttccaattaactagttttgacaacattcaaaaaagagtaataaacttcgccttaattttaataatcaacaccctcctagccttactactaataattattacattttgactaccacaactcaacggctacatagaaaaatccaccccttacgagtgcggcttcgaccctatatcccccgcccgcgtccctttctccataaaattcttcttagtagctattaccttcttattatttgatctagaaattgccctccttttacccctaccatgagccctacaaacaactaacctgccactaatagttatgtcatccctcttattaatcatcatcctagccctaagtctggcctatgagtgactacaaaaaggattagactgaaccgaattggtatatagtttaaacaaaacgaatgatttcgactcattaaattatgataatcatatttaccaaatgcccctcatttacataaatattatactagcatttaccatctcacttctaggaatactagtatatcgctcacacctcatatcctccctactatgcctagaaggaataatactatcgctgttcattatagctactctcataaccctcaacacccactccctcttagccaatattgtgcctattgccatactagtctttgccgcctgcgaagcagcggtgggcctagccctactagtctcaatctccaacacatatggcctagactacgtacataacctaaacctactccaatgctaaaactaatcgtcccaacaattatattactaccactgacatgactttccaaaaaacacataatttgaatcaacacaaccacccacagcctaattattagcatcatccctctactattttttaaccaaatcaacaacaacctatttagctgttccccaaccttttcctccgaccccctaacaacccccctcctaatactaactacctgactcctacccctcacaatcatggcaagccaacgccacttatccagtgaaccactatcacgaaaaaaactctacctctctatactaatctccctacaaatctccttaattataacattcacagccacagaactaatcatattttatatcttcttcgaaaccacacttatccccaccttggctatcatcacccgatgaggcaaccagccagaacgcctgaacgcaggcacatacttcctattctacaccctagtaggctcccttcccctactcatcgcactaatttacactcacaacaccctaggctcactaaacattctactactcactctcactgcccaagaactatcaaactcctgagccaacaacttaatatgactagcttacacaatagcttttatagtaaagatacctctttacggactccacttatgactccctaaagcccatgtcgaagcccccatcgctgggtcaatagtacttgccgcagtactcttaaaactaggcggctatggtataatacgcctcacactcattctcaaccccctgacaaaacacatagcctaccccttccttgtactatccctatggggcataattataacaagctccatctgcctacgacaaacagacctaaaatcgctcattgcatactcttcaatcagccacatagccctcgtagtaacagccattctcatccaaaccccctgaagcttcaccggcgcagtcattctcataatcgcccacgggcttacatcctcattactattctgcctagcaaactcaaactacgaacgcactcacagtcgcatcataatcctctctcaaggacttcaaactctactcccactaatagctttttgatgacttctagcaagcctcgctaacctcgccttaccccccactattaacctactgggagaactctctgtgctagtaaccacgttctcctgatcaaatatcactctcctacttacaggactcaacatactagtcacagccctatactccctctacatatttaccacaacacaatggggctcactcacccaccacattaacaacataaaaccctcattcacacgagaaaacaccctcatgttcatacacctatcccccattctcctcctatccctcaaccccgacatcattaccgggttttcctcttgtaaatatagtttaaccaaaacatcagattgtgaatctgacaacagaggcttacgaccccttatttaccgagaaagctcacaagaactgctaactcatgcccccatgtctaacaacatggctttctcaacttttaaaggataacagctatccattggtcttaggccccaaaaattttggtgcaactccaaataaaagtaataaccatgcacactactataaccaccctaaccctgacttccctaattccccccatccttaccaccctcgttaaccctaacaaaaaaaactcatacccccattatgtaaaatccattgtcgcatccacctttattatcagtctcttccccacaacaatattcatgtgcctagaccaagaagttattatctcgaactgacactgagccacaacccaaacaacccagctctccctaagcttcaaactagactacttctccataatattcatccctgtagcattgttcgttacatggtccatcatagaattctcactgtgatatataaactcagacccaaacattaatcagttcttcaaatatctactcatcttcctaattaccatactaatcttagttaccgctaacaacctattccaactgttcatcggctgagagggcgtaggaattatatccttcttgctcatcagttgatgatacgcccgagcagatgccaacacagcagccattcaagcaatcctatacaaccgtatcggcgatatcggtttcatcctcgccttagcatgatttatcctacactccaactcatgagacccacaacaaatagcccttctaaacgctaatccaagcctcaccccactactaggcctcctcctagcagcagcaggcaaatcagcccaattaggtctccacccctgactcccctcagccatagaaggccccaccccagtctcagccctactccactcaagcactatagttgtagcaggaatcttcttactcatccgcttccaccccctagcagaaaatagcccactaatccaaactctaacactatgcttaggcgctatcaccactctgttcgcagcagtctgcgcccttacacaaaatgacatcaaaaaaatcgtagccttctccacttcaagtcaactaggactcataatagttacaatcggcatcaaccaaccacacctagcattcctgcacatctgtacccacgccttcttcaaagccatactatttatgtgctccgggtccatcatccacaaccttaacaatgaacaagatattcgaaaaataggaggactactcaaaaccatacctctcacttcaacctccctcaccattggcagcctagcattagcaggaatacctttcctcacaggtttctactccaaagaccacatcatcgaaaccgcaaacatatcatacacaaacgcctgagccctatctattactctcatcgctacctccctgacaagcgcctatagcactcgaataattcttctcaccctaacaggtcaacctcgcttccccacccttactaacattaacgaaaataaccccaccctactaaaccccattaaacgcctggcagccggaagcctattcgcaggatttctcattactaacaacatttcccccgcatcccccttccaaacaacaatccccctctacctaaaactcacagccctcgctgtcactttcctaggacttctaacagccctagacctcaactacctaaccaacaaacttaaaataaaatccccactatgcacattttatttctccaacatactcggattctaccctagcatcacacaccgcacaatcccctatctaggccttcttacgagccaaaacctgcccctactcctcctagacctaacctgactagaaaagctattacctaaaacaatttcacagcaccaaatctccacctccatcatcacctcaacccaaaaaggcataattaaactttacttcctctctttcttcttcccactcatcctaaccctactcctaatcacataacctattcccccgagcaatctcaattacaatatatacaccaacaaacaatgttcaaccagtaactactactaatcaacgcccataatcatacaaagcccccgcaccaataggatcctcccgaatcaaccctgacccctctccttcataaattattcagcttcctacactattaaagtttaccacaaccaccaccccatcatactctttcacccacagcaccaatcctacctccatcgctaaccccactaaaacactcaccaagacctcaacccctgacccccatgcctcaggatactcctcaatagccatcgctgtagtatatccaaagacaaccatcattccccctaaataaattaaaaaaactattaaacccatataacctcccccaaaattcagaataataacacacccgaccacaccgctaacaatcaatactaaacccccataaataggagaaggcttagaagaaaaccccacaaaccccattactaaacccacactcaacagaaacaaagcatacatcattattctcgcacggactacaaccacgaccaatgatatgaaaaaccatcgttgtatttcaactacaagaacaccaatgaccccaatacgcaaaactaaccccctaataaaattaattaaccactcattcatcgacctccccaccccatccaacatctccgcatgatgaaacttcggctcactccttggcgcctgcctgatcctccaaatcaccacaggactattcctagccatgcactactcaccagacgcctcaaccgccttttcatcaatcgcccacatcactcgagacgtaaattatggctgaatcatccgctaccttcacgccaatggcgcctcaatattctttatctgcctcttcctacacatcgggcgaggcctatattacggatcatttctctactcagaaacctgaaacatcggcattatcctcctgcttgcaactatagcaacagccttcataggctatgtcctcccgtgaggccaaatatcattctgaggggccacagtaattacaaacttactatccgccatcccatacactgggacagacctagttcaatgaatctgaggaggctactcagtagacagtcccaccctcacacgattctttacctttcacttcatcttgcccttcattattgcagccctagcagcactccacctcctattcttgcacgaaacgggatcaaacaaccccctaggaatcacctcccattccgataaaatcaccttccacccttactacacaatcaaagacgccctcggcttacttctcttccttctctccttaatgacattaacactattctcaccagacctcctaggcgacccagacaattataccctagccaaccccttaaacacccctccccacatcaagcccgaatgatatttcctattcgcctacacaattctccgatccgtccctaacaaactaggaggcgtccttgccctattactatccatcctcatcctagcaataatccccatcctccatatatccaaacaacaaagcataatatttcgcccactaagccaatcactttattgactcctagccgcagacctcctcattctaacctgaatcggaggacaaccagtaagctacccttttaccatcattggacaagtagcatccgtactatacttcacaacaatcctaatcctaataccaactatctccctaattgaaaacaaaatactcaaatgggcctgtccttgtagtataaactaatacaccagtcttgtaaaccggagatgaaaacctttttccaaggacaaatcagagaaaaagtctttaactccaccattagcacccaaagctaagattctaatttaaactattctctgttctttcatggggaagcagatttgggtaccacccaagtattgactcacccatcaacaaccgctatgtatttcgtacattactgccagccaccatgaatattgtacggtaccataaatacttgaccacctgtagtacataaaaacccaatccacatcaaaaccccctccccatgcttacaagcaagtacagcaatcaaccctcaactatcacacatcaactgcaactccaaagccacccctcacccactaggataccaacaaacctacccacccttaacagtacatagtacataaagccatttaccgtacatagcacattacagtcaaatcccttctcgtccccatggatgacccccctcagataggggtcccttgaccaccatcctccgtgaaatcaatatcccgcacaagagtgctactctcctcgctccgggcccataacacttgggggtagctaaagtgaactgtatccgacatctggttcctacttcagggtcataaagcctaaatagcccacacgttccccttaaataagacatcacgatg

SEQ ID NO: 502 - DNA, 16569 bp, Homo sapiens mitochondrial
  3107: "n" refers to a nucleotide at position 3107 of the Cambridge Reference Sequence (CRS, Anderson et al. 1981 Nature 290:457-465), later determined to be absent from the human mtDNA sequence according to the revised CRS (rCRS, Andrews et al. 1999 Nature Genetics 23:147); "n" therefore represents a single nucleotide deletion at a position corresponding to nucleotide 3107 of SEQ ID NO:1 as provided herein.
gatcacaggtctatcaccctattaaccactcacgggagctctccatgcatttggtattttcgtctggggggtatgcacgcgatagcattgcgagacgctggagccggagcaccctatgtcgcagtatctgtctttgattcctgcctcatcctattatttatcgcacctacgttcaatattacaggcgaacatacttactaaagtgtgttaattaattaatgcttgtaggacataataataacaattgaatgtctgcacagccactttccacacagacatcataacaaaaaatttccaccaaaccccccctcccccgcttctggccacagcacttaaacacatctctgccaaaccccaaaaacaaagaaccctaacaccagcctaaccagatttcaaattttatcttttggcggtatgcacttttaacagtcaccccccaactaacacattattttcccctcccactcccatactactaatctcatcaatacaacccccgcccatcctacccagcacacacacaccgctgctaaccccataccccgaaccaaccaaaccccaaagacaccccccacagtttatgtagcttacctcctcaaagcaatacactgaaaatgtttagacgggctcacatcaccccataaacaaataggtttggtcctagcctttctattagctcttagtaagattacacatgcaagcatccccgttccagtgagttcaccctctaaatcaccacgatcaaaagggacaagcatcaagcacgcagcaatgcagctcaaaacgcttagcctagccacacccccacgggaaacagcagtgattaacctttagcaataaacgaaagtttaactaagctatactaaccccagggttggtcaatttcgtgccagccaccgcggtcacacgattaacccaagtcaatagaagccggcgtaaagagtgttttagatcaccccctccccaataaagctaaaactcacctgagttgtaaaaaactccagttgacacaaaatagactacgaaagtggctttaacatatctgaacacacaatagctaagacccaaactgggattagataccccactatgcttagccctaaacctcaacagttaaatcaacaaaactgctcgccagaacactacgagccacagcttaaaactcaaaggacctggcggtgcttcatatccctctagaggagcctgttctgtaatcgataaaccccgatcaacctcaccacctcttgctcagcctatataccgccatcttcagcaaaccctgatgaaggctacaaagtaagcgcaagtacccacgtaaagacgttaggtcaaggtgtagcccatgaggtggcaagaaatgggctacattttctaccccagaaaactacgatagcccttatgaaacttaagggtcgaaggtggatttagcagtaaactgagagtagagtgcttagttgaacagggccctgaagcgcgtacacaccgcccgtcaccctcctcaagtatacttcaaaggacatttaactaaaacccctacgcatttatatagaggagacaagtcgtaacatggtaagtgtactggaaagtgcacttggacgaaccagagtgtagcttaacacaaagcacccaacttacacttaggagatttcaacttaacttgaccgctctgagctaaacctagccccaaacccactccaccttactaccagacaaccttagccaaaccatttacccaaataaagtataggcgatagaaattgaaacctggcgcaatagatatagtaccgcaagggaaagatgaaaaattataaccaagcataatatagcaaggactaacccctataccttctgcataatgaattaactagaaataactttgcaaggagagccaaagctaagacccccgaaaccagacgagctacctaagaacagctaaaagagcacacccgtctatgtagcaaaatagtgggaagatttataggtagaggcgacaaacctaccgagcctggtgatagctggttgtccaagatagaatcttagttcaactttaaatttgcccacagaaccctctaaatccccttgtaaatttaactgttagtccaaagaggaacagctctttggacactaggaaaaaaccttgtagagagagtaaaaaatctaacacccatagtaggcctaaaagcagccaccaattaagaaagcgttcaagctcaacacccactacctaaaaaatcccaaacatataactgaactcctcacacccaattggaccaatctatcaccctatagaagaactaatgttagtataagtaacatgaaaacattctcctccgcataagcctgcgtcagattaaaacactgaactgacaattaacagcccaatatctacaatcaaccaacaagtcattattaccctcactgtcaacccaacacaggcatgctcataaggaaaggttaaaaaaagtaaaaggaactcggcaaatcttaccccgcctgtttaccaaaaacatcacctctagcatcaccagtattagaggcaccgcctgcccagtgacacatgtttaacggccgcggtaccctaaccgtgcaaaggtagcataatcacttgttccttaaatagggacctgtatgaatggctccacgagggttcagctgtctcttacttttaaccagtgaaattgacctgcccgtgaagaggcgggcatgacacagcaagacgagaagaccctatggagctttaatttattaatgcaaacagtacctaacaaacccacaggtcctaaactaccaaacctgcattaaaaatttcggttggggcgacctcggagcagaacccaacctccgagcagtacatgctaagacttcaccagtcaaagcgaactactatactcaattgatccaataacttgaccaacggaacaagttaccctagggataacagcgcaatcctattctagagtccatatcaacaatagggtttacgacctcgatgttggatcaggacatcccaatggtgcagccgctattaaaggttcgtttgttcaacgattaaagtcctacgtgatctgagttcagaccggagtaatccaggtcggtttctatctacnttcaaattcctccctgtacgaaaggacaagagaaataaggcctacttcacaaagcgccttcccccgtaaatgatatcatctcaacttagtattatacccacacccacccaagaacagggtttgttaagatggcagagcccggtaatcgcataaaacttaaaactttacagtcagaggttcaattcctcttcttaacaacatacccatggccaacctcctactcctcattgtacccattctaatcgcaatggcattcctaatgcttaccgaacgaaaaattctaggctatatacaactacgcaaaggccccaacgttgtaggcccctacgggctactacaacccttcgctgacgccataaaactcttcaccaaagagcccctaaaacccgccacatctaccatcaccctctacatcaccgccccgaccttagctctcaccatcgctcttctactatgaacccccctccccatacccaaccccctggtcaacctcaacctaggcctcctatttattctagccacctctagcctagccgtttactcaatcctctgatcagggtgagcatcaaactcaaactacgccctgatcggcgcactgcgagcagtagcccaaacaatctcatatgaagtcaccctagccatcattctactatcaacattactaataagtggctcctttaacctctccacccttatcacaacacaagaacacctctgattactcctgccatcatgacccttggccataatatgatttatctccacactagcagagaccaaccgaacccccttcgaccttgccgaaggggagtccgaactagtctcaggcttcaacatcgaatacgccgcaggccccttcgccctattcttcatagccgaatacacaaacattattataataaacaccctcaccactacaatcttcctaggaacaacatatgacgcactctcccctgaactctacacaacatattttgtcaccaagaccctacttctaacctccctgttcttatgaattcgaacagcatacccccgattccgctacgaccaactcatacacctcctatgaaaaaacttcctaccactcaccctagcattacttatatgacatgtctccatacccattacaatctccagcattccccctcaaacctaagaaatatgtctgataaaagagttactttgatagagtaaataataggagcttaaacccccttatttctaggactatgagaatcgaacccatccctgagaatccaaaattctccgtgccacctatcacaccccatcctaaagtaaggtcagctaaataagctatcgggcccataccccgaaaatgttggttatacccttcccgtactaattaatcccctggcccaacccgtcatctactctaccatctttgcaggcacactcatcacagcgctaagctcgcactgattttttacctgagtaggcctagaaataaacatgctagcttttattccagttctaaccaaaaaaataaaccctcgttccacagaagctgccatcaagtatttcctcacgcaagcaaccgcatccataatccttctaatagctatcctcttcaacaatatactctccggacaatgaaccataaccaatactaccaatcaatactcatcattaataatcataatggctatagcaataaaactaggaatagccccctttcacttctgagtcccagaggttacccaaggcacccctctgacatccggcctgcttcttctcacatgacaaaaactagcccccatctcaatcatataccaaatctctccctcactaaacgtaagccttctcctcactctctcaatcttatccatcatagcaggcagttgaggtggattaaaccaaacccagctacgcaaaatcttagcatactcctcaattacccacataggatgaataatagcagttctaccgtacaaccctaacataaccattcttaatttaactatttatattatcctaactactaccgcattcctactactcaacttaaactccagcaccacgaccctactactatctcgcacctgaaacaagctaacatgactaacacccttaattccatccaccctcctctccctaggaggcctgcccccgctaaccggctttttgcccaaatgggccattatcgaagaattcacaaaaaacaatagcctcatcatccccaccatcatagccaccatcaccctccttaacctctacttctacctacgcctaatctactccacctcaatcacactactccccatatctaacaacgtaaaaataaaatgacagtttgaacatacaaaacccaccccattcctccccacactcatcacctttaccacgctactcctacctatctccccttttatactaataatcttatagaaatttaggttaaatacagaccaagagccttcaaagccctcagtaagttgcaatacttaatttctgtaacagctaaggactgcaaaaccccactctgcatcaactgaacgcaaatcagccactttaattaagctaagcccttactagaccaatgggacttaaacccacaaacacttagttaacagctaagcaccctaatcaactggcttcaatctacttctcccgccgccgggaaaaaaggcgggagaagccccggcaggtttgaagctgcttcttcgaatttgcaattcaatatgaaaatcacctcggagctggtaaaaagaggcctaacccctgtctttagatttacagtccaatgcttcactcagccattttacctcacccccactgatgttcgccgaccgttgactattctctacaaaccacaaagacattggaacactatacctattattcggcgcatgagctggagtcctaggcacagctctaagcctccttattcgagccgagctgggccagccaggcaaccttctaggtaacgaccacatctacaacgttatcgtcacagcccatgcatttgtaataatcttcttcatagtaatacccatcataatcggaggctttggcaactgactagttcccctaataatcggtgcccccgatatggcgtttccccgcataaacaacataagcttctgactcttacctccctctctcctactcctgctcgcatctgctatagtggaggccggagcaggaacaggttgaacagtctaccctcccttagcagggaactactcccaccctggagcctccgtagacctaaccatcttctccttacacctagcaggtgtctcctctatcttaggggccatcaatttcatcacaacaattatcaatataaaaccccctgccataacccaataccaaacgcccctcttcgtctgatccgtcctaatcacagcagtcctacttctcctatctctcccagtcctagctgctggcatcactatactactaacagaccgcaacctcaacaccaccttcttcgaccccgccggaggaggagaccccattctataccaacacctattctgatttttcggtcaccctgaagtttatattcttatcctaccaggcttcggaataatctcccatattgtaacttactactccggaaaaaaagaaccatttggatacataggtatggtctgagctatgatatcaattggcttcctagggtttatcgtgtgagcacaccatatatttacagtaggaatagacgtagacacacgagcatatttcacctccgctaccataatcatcgctatccccaccggcgtcaaagtatttagctgactcgccacactccacggaagcaatatgaaatgatctgccgcagtgctctgagccctaggattcatctttcttttcaccgtaggtggcctgactggcattgtattagcaaactcatcactagacatcgtactacacgacacgtactacgttgtagctcacttccactatgtcctatcaataggagctgtatttgccatcataggaggcttcattcactgatttcccctattctcaggctacaccctagaccaaacctacgccaaaatccatttcactatcatattcatcggcgtaaatctaactttcttcccacaacactttctcggcctatccggaatgccccgacgttactcggactaccccgatgcatacaccacatgaaacatcctatcatctgtaggctcattcatttctctaacagcagtaatattaataattttcatgatttgagaagccttcgcttcgaagcgaaaagtcctaatagtagaagaaccctccataaacctggagtgactatatggatgccccccaccctaccacacattcgaagaacccgtatacataaaatctagacaaaaaaggaaggaatcgaaccccccaaagctggtttcaagccaaccccatggcctccatgactttttcaaaaaggtattagaaaaaccatttcataactttgtcaaagttaaattataggctaaatcctatatatcttaatggcacatgcagcgcaagtaggtctacaagacgctacttcccctatcatagaagagcttatcacctttcatgatcacgccctcataatcattttccttatctgcttcctagtcctgtatgcccttttcctaacactcacaacaaaactaactaatactaacatctcagacgctcaggaaatagaaaccgtctgaactatcctgcccgccatcatcctagtcctcatcgccctcccatccctacgcatcctttacataacagacgaggtcaacgatccctcccttaccatcaaatcaattggccaccaatggtactgaacctacgagtacaccgactacggcggactaatcttcaactcctacatacttcccccattattcctagaaccaggcgacctgcgactccttgacgttgacaatcgagtagtactcccgattgaagcccccattcgtataataattacatcacaagacgtcttgcactcatgagctgtccccacattaggcttaaaaacagatgcaattcccggacgtctaaaccaaaccactttcaccgctacacgaccgggggtatactacggtcaatgctctgaaatctgtggagcaaaccacagtttcatgcccatcgtcctagaattaattcccctaaaaatctttgaaatagggcccgtatttaccctataacaccccctctaccccctctagagcccactgtaaagctaacttagcattaaccttttaagttaaagattaagagaaccaacacctctttacagtgaaatgccccaactaaatactaccgtatggcccaccataattacccccatactccttacactattcctcatcacccaactaaaaatattaaacacaaactaccacctacctccctcaccaaagcccataaaaataaaaaattataacaaaccctgagaaccaaaatgaacgaaaatctgttcgcttcattcattacccccacaatcctaggcctacccgccgcagtactgatcattctatttccccctctattgatccccacctccaaatatctcatcaacaaccgactaatcaccacccaacaatgactaatcaaactaacctcaaaacaaatgataaccatacacaacactaaaggacgaacctgatctcttatactagtatccttaatcatttttattgccacaactaacctcctcggactcctgcctcactcatttacaccaaccacccaactatctataaacctagccatggccatccccttatgagcgggcgcagtgattataggctttcgctctaagattaaaaatgccctagcccacttcttaccacaaggcacacctacaccccttatccccatactagttattatcgaaaccatcagcctactcattcaaccaatagccctggccgtacgcctaaccgctaacattactgcaggccacctactcatgcacctaattggaagcgccaccctagcaatatcaaccattaaccttccctctacacttatcatcttcacaattctaattctactgactatcctagaaatcgctgtcgccttaatccaagcctacgttttcacacttctagtaagcctctacctgcacgacaacacataatgacccaccaatcacatgcctatcatatagtaaaacccagcccatgacccctaacaggggccctctcagccctcctaatgacctccggcctagccatgtgatttcacttccactccataacgctcctcatactaggcctactaaccaacacactaaccatataccaatgatggcgcgatgtaacacgagaaagcacataccaaggccaccacacaccacctgtccaaaaaggccttcgatacgggataatcctatttattacctcagaagtttttttcttcgcaggatttttctgagccttttaccactccagcctagcccctaccccccaattaggagggcactggcccccaacaggcatcaccccgctaaatcccctagaagtcccactcctaaacacatccgtattactcgcatcaggagtatcaatcacctgagctcaccatagtctaatagaaaacaaccgaaaccaaataattcaagcactgcttattacaattttactgggtctctattttaccctcctacaagcctcagagtacttcgagtctcccttcaccatttccgacggcatctacggctcaacattttttgtagccacaggcttccacggacttcacgtcattattggctcaactttcctcactatctgcttcatccgccaactaatatttcactttacatccaaacatcactttggcttcgaagccgccgcctgatactggcattttgtagatgtggtttgactatttctgtatgtctccatctattgatgagggtcttactcttttagtataaatagtaccgttaacttccaattaactagttttgacaacattcaaaaaagagtaataaacttcgccttaattttaataatcaacaccctcctagccttactactaataattattacattttgactaccacaactcaacggctacatagaaaaatccaccccttacgagtgcggcttcgaccctatatcccccgcccgcgtccctttctccataaaattcttcttagtagctattaccttcttattatttgatctagaaattgccctccttttacccctaccatgagccctacaaacaactaacctgccactaatagttatgtcatccctcttattaatcatcatcctagccctaagtctggcctatgagtgactacaaaaaggattagactgagccgaattggtatatagtttaaacaaaacgaatgatttcgactcattaaattatgataatcatatttaccaaatgcccctcatttacataaatattatactagcatttaccatctcacttctaggaatactagtatatcgctcacacctcatatcctccctactatgcctagaaggaataatactatcgctgttcattatagctactctcataaccctcaacacccactccctcttagccaatattgtgcctattgccatactagtctttgccgcctgcgaagcagcggtgggcctagccctactagtctcaatctccaacacatatggcctagactacgtacataacctaaacctactccaatgctaaaactaatcgtcccaacaattatattactaccactgacatgactttccaaaaaacacataatttgaatcaacacaaccacccacagcctaattattagcatcatccctctactattttttaaccaaatcaacaacaacctatttagctgttccccaaccttttcctccgaccccctaacaacccccctcctaatactaactacctgactcctacccctcacaatcatggcaagccaacgccacttatccagtgaaccactatcacgaaaaaaactctacctctctatactaatctccctacaaatctccttaattataacattcacagccacagaactaatcatattttatatcttcttcgaaaccacacttatccccaccttggctatcatcacccgatgaggcaaccagccagaacgcctgaacgcaggcacatacttcctattctacaccctagtaggctcccttcccctactcatcgcactgatttacactcacaacaccctaggctcactaaacattctactactcactctcactgcccaagaactatcaaactcctgagccaacaacttaatatgactagcttacacaatagcttttatagtaaagatacctctttacggactccacttatgactccctaaagcccatgtcgaagcccccatcgctgggtcaatagtacttgccgcagtactcttaaaactaggcggctatggtataatacgcctcacactcattctcaaccccctgacaaaacacatagcctaccccttccttgtactatccctatgaggcataattataacaagctccatctgcctacgacaaacagacctaaaatcgctcattgcatactcttcaatcagccacatagccctcgtagtaacagccattctcatccaaaccccctgaagcttcaccggcgcagtcattctcataatcgcccacggacttacatcctcattactattctgcctagcaaactcaaactacgaacgcactcacagtcgcatcataatcctctctcaaggacttcaaactctactcccactaatagctttttgatgacttctagcaagcctcgctaacctcgccttaccccccactattaacctactgggagaactctctgtgctagtaaccacgttctcctgatcaaatatcactctcctacttacaggactcaacatactagtcacagccctatactccctctacatatttaccacaacacaatgaggctcactcacccaccacattaacaacataaaaccctcattcacacgagaaaacaccctcatgttcatacacctatcccccattctcctcctatccctcaaccccgacatcattaccgggttttcctcttgtaaatatagtttaaccaaaacatcagattgtgaatctgacaacagaggcttacgaccccttatttaccgagaaagctcacaagaactgctaactcatgcccccatgtctaacaacatggctttctcaacttttaaaggataacagctatccattggtcttaggccccaaaaattttggtgcaactccaaataaaagtaataaccatgcacactactataaccaccctaaccctgacttccctaattccccccatccttaccaccctcgttaaccctaacaaaaaaaactcatacccccattatgtaaaatccattgtcgcatccacctttattatcagtctcttccccacaacaatattcatgtgcctagaccaagaagttattatctcgaactgacactgagccacaacccaaacaacccagctctccctaagcttcaaactagactacttctccataatattcatccctgtggcattgttcgttacatggtccatcatagaattctcactgtgatatataaactcagacccaaacattaatcagttcttcaaatatctactcatcttcctaattaccatactaatcttagttaccgctaacaacctattccaactgttcatcggctgagagggcgtaggaattatatccttcttgctcatcagttgatgatacgcccgagcagatgccaacacagcagccattcaagcaatcctatacaaccgtatcggcgatatcggtttcatcctcgccttagcatgatttatcctacactccaactcatgagacccacaacaaatagcccttctaaacgctaatccaagcctcaccccactactaggcctcctcctagcagcagcaggcaaatcagcccaattaggtctccacccctgactcccctcagccatagaaggccccaccccagtctcagccctactccactcaagcactatagttgtagcaggaatcttcttactcatccgcttccaccccctagcagaaaatagcccactaatccaaactctaacactatgcttaggcgctatcaccactctgttcgcagcagtctgcgcccttacacaaaatgacatcaaaaaaatcgtagccttctccacttcaagtcaactaggactcataatagttacaatcggcatcaaccaaccacacctagcattcctgcacatctgtacccacgccttcttcaaagccatactatttatgtgctccgggtccatcatccacaaccttaacaatgaacaagatattcgaaaaataggaggactactcaaaaccatacctctcacttcaacctccctcaccattggcagcctagcattagcaggaatacctttcctcacaggtttctactccaaagaccacatcatcgaaaccgcaaacatatcatacacaaacgcctgagccctatctattactctcatcgctacctccctgacaagcgcctatagcactcgaataattcttctcaccctaacaggtcaacctcgcttccccacccttactaacattaacgaaaataaccccaccctactaaaccccattaaacgcctgacagccggaagcctattcgcaggatttctcattactaacaacatttcccccgcatcccccttccaaacaacaatccccctctacctaaaactcacagccctcgctgtcactttcctaggacttctaacagccctagacctcaactacctaaccaacaaacttaaaataaaacccccactatgcacattttatttctccaacatactcggattctaccctagcatcacacaccgcacaatcccctatctaggccttcttacgagccaaaacctgcccctactcctcctagacctaacctgactagaaaagctattacctaaaacaatttcacagcaccaaatctccacctccatcatcacctcaacccaaaaaggcataattaaactttacttcctctctttcttcttcccactcatcctaaccctactcctaatcacataacctattcccccgagcaatctcaattacaatatatacaccaacaaacaatgttcaaccagtaactactactaatcaacgcccataatcatacaaagcccccgcaccaataggatcctcccgaatcaaccctgacccctctccttcataaattattcagcttcctacactattaaagtttaccacaaccaccaccccatcatactctttcacccacagcaccaatcctacctccatcgctaaccccactaaaacactcaccaagacctcaacccctgacccccatgcctcaggatactcctcaatagccatcgctgtagtatatccaaagacaaccatcattccccctaaataaattaaaaaaactattaaacccatataacctcccccaaaattcagaataataacacacccgaccacaccgctaacaatcaatactaaacccccataaataggagaaggcttagaagaaaaccccacaaaccccattactaaacccacactcaacagaaacaaagcatacatcattattctcgcacggactacaaccacgaccaatgatatgaaaaaccatcgttgtatttcaactacaagaacaccaatgaccccaatacgcaaaattaaccccctaataaaattaattaaccactcattcatcgacctccccaccccatccaacatctccgcatgatgaaacttcggctcactccttggcgcctgcctgatcctccaaatcaccacaggactattcctagccatgcactactcaccagacgcctcaaccgccttttcatcaatcgcccacatcactcgagacgtaaattatggctgaatcatccgctaccttcacgccaatggcgcctcaatattctttatctgcctcttcctacacatcgggcgaggcctatattacggatcatttctctactcagaaacctgaaacatcggcattatcctcctgcttgcaactatagcaacagccttcataggctatgtcctcccgtgaggccaaatatcattctgaggggccacagtaattacaaacttactatccgccatcccatacattgggacagacctagttcaatgaatctgaggaggctactcagtagacagtcccaccctcacacgattctttacctttcacttcatcttgcccttcattattgcagccctagcagcactccacctcctattcttgcacgaaacgggatcaaacaaccccctaggaatcacctcccattccgataaaatcaccttccacccttactacacaatcaaagacgccctcggcttacttctcttcattctctccttaatgacattaacactattctcaccagacctcctaggcgacccagacaattataccctagccaaccccttaaacacccctccccacatcaagcccgaatgatatttcctattcgcctacacaattctccgatccgtccctaacaaactaggaggcgtccttgccctattactatccatcctcatcctagcaataatccccatcctccatatatccaaacaacaaagcataatatttcgcccactaagccaatcactttattgactcctagccgcagacctcctcattctaacctgaatcggaggacaaccagtaagctacccttttaccatcattggacaagtagcatccgtactatacttcacaacaatcctaatcctaataccaactatctccctaattgaaaacaaaatactcaaatgggcctgtccttgtagtataaactaatacaccagtcttgtaaaccggagatgaaaacctttttccaaggacaaatcagagaaaaagtctttaactccaccattagcacccaaagctaagattctaatttaaactattctctgttctttcatggggaagcagatttgggtaccacccaagtattgactcacccatcaacaaccgctatgtatttcgtacattactgccagccaccatgaatattgtacggtaccataaatacttgaccacctgtagtacataaaaacccaatccacatcaaaaccccctccccatgcttacaagcaagtacagcaatcaaccctcaactatcacacatcaactgcaactccaaagccacccctcacccactaggataccaacaaacctacccacccttaacagtacatagtacataaagccatttaccgtacatagcacattacagtcaaatcccttctcgtccccatggatgacccccctcagataggggtcccttgaccaccatcctccgtgaaatcaatatcccgcacaagagtgctactctcctcgctccgggcccataacacttgggggtagctaaagtgaactgtatccgacatctggttcctacttcagggtcataaagcctaaatagcccacacgttccccttaaataagacatcacgatg

SEQ ID NO: 503 - DNA, 16569 bp, Homo sapiens mitochondrial
  3107: "n" refers to a nucleotide at position 3107 of the Cambridge Reference Sequence (CRS, Anderson et al. 1981 Nature 290:457-465), later determined to be absent from the human mtDNA sequence according to the revised CRS (rCRS, Andrews et al. 1999 Nature Genetics 23:147); "n" therefore represents a single nucleotide deletion at a position corresponding to nucleotide 3107 of SEQ ID NO:1 as provided herein.
gatcacaggtctatcaccctattaaccactcacgggagctctccatgcatttggtattttcgtctggggggtatgcacgcgatagcattgcgagacgctggagccggagcaccctatgtcgcagtatctgtctttgattcctgcctcatcctattatttatcgcacctacgttcaatattacaggcgaacatacttactaaagtgtgttaattaattaatgcttgtaggacataataataacaattgaatgtctgcacagccactttccacacagacatcataacaaaaaatttccaccaaaccccccctcccccgcttctggccacagcacttaaacacatctctgccaaaccccaaaaacaaagaaccctaacaccagcctaaccagatttcaaattttatcttttggcggtatgcacttttaacagtcaccccccaactaacacattattttcccctcccactcccatactactaatctcatcaatacaacccccgcccatcctacccagcacacacacaccgctgctaaccccataccccgaaccaaccaaaccccaaagacaccccccacagtttatgtagcttacctcctcaaagcaatacactgaaaatgtttagacgggctcacatcaccccataaacaaataggtttggtcctagcctttctattagctcttagtaagattacacatgcaagcatccccgttccagtgagttcaccctctaaatcaccacgatcaaaagggacaagcatcaagcacgcagcaatgcagctcaaaacgcttagcctagccacacccccacgggaaacagcagtgattaacctttagcaataaacgaaagtttaactaagctatactaaccccagggttggtcaatttcgtgccagccaccgcggtcacacgattaacccaagtcaatagaagccggcgtaaagagtgttttagatcaccccctccccaataaagctaaaactcacctgagttgtaaaaaactccagttgacacaaaatagactacgaaagtggctttaacatatctgaacacacaatagctaagacccaaactgggattagataccccactatgcttagccctaaacctcaacagttaaatcaacaaaactgctcgccagaacactacgagccacagcttaaaactcaaaggacctggcggtgcttcatatccctctagaggagcctgttctgtaatcgataaaccccgatcaacctcaccacctcttgctcagcctatataccgccatcttcagcaaaccctgatgaaggctacaaagtaagcgcaagtacccacgtaaagacgttaggtcaaggtgtagcccatgaggtggcaagaaatgggctacattttctaccccagaaaactacgatagcccttatgaaacttaagggtcgaaggtggatttagcagtaaactgagagtagagtgcttagttgaacagggccctgaagcgcgtacacaccgcccgtcaccctcctcaagtatacttcaaaggacatttaactaaaacccctacgcatttatatagaggagacaagtcgtaacatggtaagtgtactggaaagtgcacttggacgaaccagagtgtagcttaacacaaagcacccaacttacacttaggagatttcaacttaacttgaccgctctgagctaaacctagccccaaacccactccaccttactaccagacaaccttagccaaaccatttacccaaataaagtataggcgatagaaattgaaacctggcgcaatagatatagtaccgcaagggaaagatgaaaaattatagccaagcataatatagcaaggactaacccctataccttctgcataatgaattaactagaaataactttgcaaggagagccaaagctaagacccccgaaaccagacgagctacctaagaacagctaaaagagcacacccgtctatgtagcaaaatagtgggaagatttataggtagaggcgacaaacctaccgagcctggtgatagctggttgtccaagatagaatcttagttcaactttaaatttgcccacagaaccctctaaatccccttgtaaatttaactgttagtccaaagaggaacagctctttggacactaggaaaaaaccttgtagagagagtaaaaaatttaacacccatagtaggcctaaaagcagccaccaattaagaaagcgttcaagctcaacacccactacctaaaaaatcccaaacatataactgaactcctcacacccaattggaccaatctatcaccctatagaagaactaatgttagtataagtaacatgaaaacattctcctccgcataagcctgcgtcagattaaaacactgaactgacaattaacagcccaatatctacaatcaaccaacaagtcattattaccctcactgtcaacccaacacaggcatgctcataaggaaaggttaaaaaaagtaaaaggaactcggcaaatcttaccccgcctgtttaccaaaaacatcacctctagcatcaccagtattagaggcaccgcctgcccagtgacacatgtttaacggccgcggtaccctaaccgtgcaaaggtagcataatcacttgttccttaaatagggacctgtatgaatggctccacgagggttcagctgtctcttacttttaaccagtgaaattgacctgcccgtgaagaggcgggcatgacacagcaagacgagaagaccctatggagctttaatttattaatgcaaacagtacctaacaaacccacaggtcctaaactaccaaacctgcattaaaaatttcggttggggcgacctcggagcagaacccaacctccgagcagtacatgctaagacttcaccagtcaaagcgaactactatactcaattgatccaataacttgaccaacggaacaagttaccctagggataacagcgcaatcctattctagagtccatatcaacaatagggtttacgacctcgatgttggatcaggacatcccgatggtgcagccgctattaaaggttcgtttgttcaacgattaaagtcctacgtgatctgagttcagaccggagtaatccaggtcggtttctatctacnttcaaattcctccctgtacgaaaggacaagagaaataaggcctacttcacaaagcgccttcccccgtaaatgatatcatctcaacttagtattatacccacacccacccaagaacagggtttgttaagatggcagagcccggtaatcgcataaaacttaaaactttacagtcagaggttcaattcctcttcttaacaacatacccatggccaacctcctactcctcattgtacccattctaatcgcaatggcattcctaatgcttaccgaacgaaaaattctaggctatatacaactacgcaaaggccccaacgttgtaggcccctacgggctactacaacccttcgctgacgccataaaactcttcaccaaagagcccctaaaacccgccacatctaccatcaccctctacatcaccgccccgaccttagctctcaccatcgctcttctactatgaacccccctccccatacccaaccccctggtcaacctcaacctaggcctcctatttattctagccacctctagcctagccgtttactcaatcctctgatcagggtgagcgtcaaactcaaactacgccctgatcggcgcactgcgagcagtagcccaaacaatctcatatgaagtcaccctagccatcattctactatcaacattactaataagtggctcctttaacctctccacccttatcacaacacaagaacacctctgattactcctgccatcatgacccttggccataatatgatttatctccacactagcagagaccaaccgaacccccttcgaccttgccgaaggggagtccgaactagtctcaggcttcaacatcgaatacgccgcaggccccttcgccctattcttcatagccgaatacacaaacattattataataaacaccctcaccactacaatcttcctaggaacaacatatgacgcactctcccctgaactctacacaacatattttgtcaccaagaccctacttctaacctccctgttcttatgaattcgaacagcatacccccgattccgctacgaccaactcatacacctcctatgaaaaaacttcctaccactcaccctagcattacttatatgatatgtctccatacccattacaatctccagcattccccctcaaacctaagaaatatgtctgataaaagagttactttgatagagtaaataataggagcttaaacccccttatttctaggactatgagaatcgaacccatccctgagaatccaaaattctccgtgccacctatcacaccccatcctaaagtaaggtcagctaaataagctatcgggcccataccccgaaaatgttggttatacccttcccgtactaattaatcccctggcccaacccgtcatctactctaccatctttgcaggcacactcatcacagcgctaagctcgcactgattttttacctgagtaggcctagaaataaacatgctagcttttattccagttctaaccaaaaaaataaaccctcgttccacagaagctgccatcaagtacttcctcacgcaagcaaccgcatccataatccttctaatagctatcctcttcaacaatatactctccggacaatgaaccataaccaatactaccaatcaatactcatcattaataatcataatggctatagcaataaaactaggaatagccccctttcacttctgagtcccagaggttacccaaggcacccctctgacatccggcctgcttcttctcacatgacaaaaactagcccccatctcaatcatataccaaatctctccctcactaaacgtaagccttctcctcactctctcaatcttatccatcatagcaggcagttgaggtggattaaaccaaacccagctacgcaaaatcttagcatactcctcaattacccacataggatgaataatagcagttctaccgtacaaccctaacataaccattcttaatttaactatttatattatcctaactactaccgcattcctactactcaacttaaactccagcaccacgaccctactactatctcgcacctgaaacaagctaacatgactaacacccttaattccatccaccctcctctccctaggaggcctgcccccgctaaccggctttttgcccaaatgggccattatcgaagaattcacaaaaaacaatagcctcatcatccccaccatcatagccaccatcaccctccttaacctctacttctacctacgcctaatctactccacctcaatcacactactccccatatctaacaacgtaaaaataaaatgacagtttgaacatacaaaacccaccccattcctccccacactcatcgcccttaccacgctactcctacctatctccccttttatactaataatcttatagaaatttaggttaaatacagaccaagagccttcaaagccctcagtaagttgcaatacttaatttctgtaacagctaaggactgcaaaaccccactctgcatcaactgaacgcaaatcagccactttaattaagctaagcccttactagaccaatgggacttaaacccacaaacacttagttaacagctaagcaccctaatcaactggcttcaatctacttctcccgccgccgggaaaaaaggcgggagaagccccggcaggtttgaagctgcttcttcgaatttgcaattcaatatgaaaatcacctcggagctggtaaaaagaggcctaacccctgtctttagatttacagtccaatgcttcactcagccattttacctcacccccactgatgttcgccgaccgttgactattctctacaaaccacaaagacattggaacactatacctattattcggcgcatgagctggagtcctaggcacagccctaagcctccttattcgagccgagctgggccagccaggcaaccttctgggtaacgaccacatctacaacgttatcgtcacagcccatgcatttgtaataatcttcttcatagtaatacccatcataatcggaggctttggcaactgactagttcccctaataatcggtgcccccgatatggcgtttccccgcataaacaacataagcttctgactcttacctccctctctcctactcctgctcgcatctgctatagtggaggccggagcaggaacaggttgaacagtctaccctcccttagcagggaactactcccaccctggagcctccgtagacctaaccatcttctccttacacctagcaggtgtctcctctatcttaggggccatcaatttcatcacaacaattatcaatataaaaccccctgccataacccaataccaaacgcccctcttcgtctgatccgtcctaatcacagcagtcctacttctcctatctctcccagtcctagctgctggcatcactatactactaacagaccgcaacctcaacaccaccttcttcgaccccgccggaggaggagaccccattctataccaacacctattctgatttttcggtcaccctgaagtttatattcttatcctaccaggcttcggaataatctcccatattgtaacttactactccggaaaaaaagaaccatttggatacataggtatggtctgagctatgatatcaattggcttcctagggtttatcgtgtgagcacaccatatatttacagtaggaatagacgtagacacacgagcatatttcacctccgctaccataatcatcgctatccccaccggcgtcaaagtatttagctgactcgccacactccacggaagcaatatgaaatgatctgctgcagtgctctgagccctaggattcatctttcttttcaccgtaggtggcctgactggcattgtattagcaaactcatcactagacatcgtactacacgacacgtactacgttgtagctcacttccactatgtcctatcaataggagctgtatttgccatcataggaggcttcattcactgatttcccctattctcaggctacaccctagaccaaacctacgccaaaatccatttcactatcatattcatcggcgtaaatctaactttcttcccacaacactttctcggcctatccggaatgccccgacgttactcggactaccccgatgcatacaccacatgaaacatcctatcatctgtaggctcattcatttctctaacagcagtaatattaataattttcatgatttgagaagccttcgcttcgaagcgaaaagtcctaatagtagaagaaccctccataaacctggagtgactatatggatgccccccaccctaccacacattcgaagaacccgtatacataaaatctagacaaaaaaggaaggaatcgaaccccccaaagctggtttcaagccaaccccatggcctccatgactttttcaaaaaggtattagaaaaaccatttcataactttgtcaaagttaaattataggctaaatcctatatatcttaatggcacatgcagcgcaagtaggtctacaagacgctacttcccctatcatagaagagcttatcacctttcatgatcacgccctcataatcattttccttatctgcttcctagtcctgtacgcccttttcctaacactcacaacaaaactaactaatactaacatctcagacgctcaggaaatagaaaccgtctgaactatcctgcccgccatcatcctagtcctcatcgccctcccatccctacgcatcctttacataacagacgaggtcaacgatccctcccttaccatcaaatcaattggccaccaatggtactgaacctacgagtacaccgactacggcggactaatcttcaactcctacatacttcccccattattcctagaaccaggcgacctgcgactccttgacgttgacaatcgagtagtactcccgattgaagcccccattcgtataataattacatcacaagacgtcttgcactcatgagctgtccccacattaggcttaaaaacagatgcaattcccggacgtctaaaccaaaccactttcaccgctacacgaccgggggtatactacggtcaatgctctgaaatctgtggagcaaaccacagtttcatgcccatcgtcctagaattaattcccctaaaaatctttgaaatagggcccgtatttaccctatagcaccccctctaccccctctagagcccactgtaaagctaacttagcattaaccttttaagttaaagattaagagaaccaacacctctttacagtgaaatgccccaactaaatactaccgtatggcccaccataattacccccatactccttacactattcctcatcacccaactaaaaatattaaacacaaactaccacctacctccctcaccaaagcccataaaaataaaaaattataacaaaccctgagaaccaaaatgaacgaaaatctgttcgcttcattcattgcccccacaatcctaggcctacccgccgcagtactgatcattctatttccccctctattgatccccacctccaaatatctcatcaacaaccgactaatcaccacccaacaatgactaatcaaactaacctcaaaacaaatgataaccatacacaacactaaaggacgaacctgatctcttatactagtatccttaatcatttttattgccacaactaacctcctcggactcctgcctcactcatttacaccaaccacccaactatctataaacctagccatggccatccccttatgagcgggcgcagtgattataggctttcgctctaagattaaaaatgccctagcccacttcttaccacaaggcacacctacaccccttatccccatactagttattatcgaaaccatcagcctactcattcaaccaatagccctggccgtacgcctaaccgctaacattactgcaggccacctactcatgcacctaattggaagcgccaccctagcaatatcaaccattaaccttccctctacacttatcatcttcacaattctaattctactgactatcctagaaatcgctgtcgccttaatccaagcctacgttttcacacttctagtaagcctctacctgcacgacaacacataatgacccaccaatcacatgcctatcatatagtaaaacccagcccatgacccctaacaggggccctctcagccctcctaatgacctccggcctagccatgtgatttcacttccactccataacgctcctcatactaggcctactaaccaacacactaaccatataccaatgatggcgcgatgtaacacgagaaagcacataccaaggccaccacacaccacctgtccaaaaaggccttcgatacgggataatcctatttattacctcagaagtttttttcttcgcaggatttttctgagccttttaccactccagcctagcccctaccccccaattaggagggcactggcccccaacaggcatcaccccgctaaatcccctagaagtcccactcctaaacacatccgtattactcgcatcaggagtatcaatcacctgagctcaccatagtctaatagaaaacaaccgaaaccaaataattcaagcactgcttattacaattttactgggtctctattttaccctcctacaagcctcagagtacttcgagtctcccttcaccatttccgacggcatctacggctcaacattttttgtagccacaggcttccacggacttcacgtcattattggctcaactttcctcactatctgcttcatccgccaactaatatttcactttacatccaaacatcactttggcttcgaagccgccgcctgatactggcattttgtagatgtggtttgactatttctgtatgtctccatctattgatgagggtcttactcttttagtataaatagtaccgttaacttccaattaactagttttgacaacattcaaaaaagagtaataaacttcgccttaattttaataatcaacaccctcctagccttactactaataattattacattttgactaccacaactcaacggctacatagaaaaatccaccccttacgagtgcggcttcgaccctatatcccccgcccgcgtccctttctccataaaattcttcttagtagctattaccttcttattatttgatctagaaattgccctccttttacccctaccatgagccctacaaacaactaacctgccactaatagttatgtcatccctcttattaatcatcatcctagccctaagtctggcctatgagtgactacaaaaaggattagactgaaccgaattggtatatagtttaaacaaaacgaatgatttcgactcattaaattatgataatcatatttaccaaatgcccctcatttacataaatattatactagcatttaccatctcacttctaggaatactagtatatcgctcacacctcatatcctccctactatgcctagaaggaataatactatcgctgttcattatagctactctcataaccctcaacacccactccctcttagccaatattgtgcctattgccatactagtctttgccgcctgcgaagcagcggtgggcctagccctactagtctcaatctccaacacatatggcctagactacgtacataacctaaacctactccaatgctaaaactaatcgtcccaacaattatattactaccactgacatgactttccaaaaaacacataatttgaatcaacacaaccacccacagcctaattattagcatcatccctctactattttttaaccaaatcaacaacaacctatttagctgttccccaaccttttcctccgaccccctaacaacccccctcctaatactaactacctgactcctacccctcacaatcatggcaagccaacgccacttatccagtgaaccactatcacgaaaaaaactctacctctctatactaatctccctacaaatctccttaattataacattcacagccacagaactaatcatattttatatcttcttcgaaaccacacttatccctaccttggctatcatcacccgatgaggcaaccaaccagaacgcctgaacgcaggcacatacttcctattctacaccctagtaggctcccttcccctactcatcgcactaatttacactcacaacaccctaggctcactaaacattctactactcactctcactgcccaagaactatcaaactcctgagctaacaacctaatatgactagcttacacaatagcttttatagtaaagatacctctttacggactccacttatgactccctaaagcccatgtcgaagcccccatcgctgggtcaatagtacttgccgcagtactcttgaaactaggcggctatggtataatacgcctcacactcattctcaaccccctgacaaaacacatagcctaccccttccttgtactatccctatgaggcataattataacaagctccatctgcctacgacaaacagacctaaaatcgctcattgcatactcttcaatcagccacatagccctcgtagtaacagccattctcatccaaaccccctgaagcttcaccggcgcagtcattctcataatcgcccacggacttacatcctcattactattctgcctagcaaactcaaactacgaacgcactcacagtcgcatcataatcctctctcaaggacttcaaactctactcccactaatagctttttgatgacttctagcaagcctcgctaacctcgccttaccccccactattaacctactgggagaactctctgtgctagtaaccacgttctcctgatcaaatatcactctcctacttacaggactcaacatactagtcacagccctatactccctctacatatttaccacaacacaatggggctcactcacccaccacattaacaacataaaaccctcattcacacgagaaaacaccctcatgttcatacacctatcccccattctcctcctatccctcaaccccgacatcattaccgggttttcctcttgtaaatatagtttaaccaaaacatcagattgtgaatctgacaacagaggcttacgaccccttatttaccgagaaagctcacaagaactgctaactcatgcccccatgtctaacaacatggctttctcaacttttaaaggataacagctatccattggtcttaggccccaagaattttggtgcaactccaaataaaagtaataaccatgcacactactataaccaccctaaccctaacttccctaattccccccatccttaccaccctcgttaaccctaacaaaaaaaactcatacccccattatgtaaaatccattgtcgcatccacctttattatcagtctcttccccacaacaatattcatgtgcctagaccaagaagttattatctcgaactgacactgagccacaacccaaacaacccagctctccctaagcttcaaactagactacttctccataatattcatccccgtagcattgttcgttacatggtccatcatagaattctcactgtgatatataaactcagacccaaacattaatcagttcttcaaatatctactcatcttcctaattaccatactaatcttagttaccgctaacaacctattccaactgttcatcggctgagagggcgtaggaattatatccttcttgctcatcagttgatgatacgcccgagcagatgccaacacagcagccattcaagcaatcctatacaaccgtatcggcgatatcggtttcatcctcgccttagcatgatttatcctacactccaactcatgagacccacaacaaatagcccttctaaacgctaatccaagcctcaccccactactaggcctcctcctagcagcagcaggcaaatcagcccaattaggtctccacccctgactcccctcagccatagaaggccccaccccagtctcagccctactccactcaagcactatagttgtagcaggaatcttcttactcatccgcttccaccccctagcagaaaatagcccactaatccaaactctaacactatgcttaggcgctatcaccactctgttcgcagcagtctgcgcccttacacaaaatgacatcaaaaaaatcgtagccttctccacttcaagtcaactaggactcataatagttacaatcggcatcaaccaaccacacctagcattcctgcacatctgtacccacgccttcttcaaagccatactatttatgtgctccgggtccatcatccacaaccttaacaatgaacaagatattcgaaaaataggaggactactcaaaaccatacctctcacttcaacctccctcaccattggcagcctagcattagcaggaatacctttcctcacaggtttctactccaaagaccacatcatcgaaaccgcaaacatatcatacacaaacgcctgagccctatctattactctcatcgctacctccctgacaagcgcctatagcactcgaataattcttctcaccctaacaggtcaacctcgcttccccacccttactaacattaacgaaaataaccccaccctactaaaccccattaaacgcctgacagccggaagcctattcgcaggatttctcattactaacaacatttcccccgcatcccccttccaaacaacaatccccctctacctaaaactcacagccctcgctgtcactttcctaggacttctaacagccctagacctcaactacctaaccaacaaacttaaaataaaatccccactatgcacattttatttctccaacatactcggattctaccctagcatcacacaccgcacaatcccctatctaggccttcttacgagccaaaacctgcccctactcctcctagacctaacctgactagaaaagctattacctaaaacaatttcacagcaccaaatctccacctccatcatcacctcaacccaaaaaggcataattaaactttacttcctctctttcttcttcccactcatcctaaccctactcctaatcacataacctattcccccgagcaatctcaattacaatatatacaccaacaaacaatgttcaaccagtaactactactaatcaacgcccataatcatacaaagcccccgcaccaataggatcctcccgaatcaaccctgacccctctccttcataaattattcagcttcctacactattaaagtttaccacaaccaccaccccatcatactctttcacccacagcaccaatcctacctccatcgctaaccccactaaaacactcaccaagacctcaacccctgacccccatgcctcaggatactcctcaatagccatcgctgtagtatatccaaagacaaccatcattccccctaaataaattaaaaaaactattaaacccatataacctcccccaaaattcagaataataacacacccgaccacaccgctaacaatcaatactaaacccccataaataggagaaggcttagaagaaaatcccacaaaccccattactaaacccacactcaacagaaacaaagcatacatcattattctcgcacggactacaaccacgaccaatgatatgaaaaaccatcgttgtatttcaactacaagaacaccaatgaccccaatacgcaaaattaaccccctaataaaattaattaaccactcattcatcgacctccccaccccatccaacatctccgcatgatgaaacttcggctcactccttggcgcctgcctgatcctccaaatcaccacaggactattcctagccatgcactactcaccagacgcctcaaccgccttttcatcaatcgcccacatcactcgagacgtaaattatggctgaatcatccgctaccttcacgccaatggcgcctcaatattctttatctgcctcttcctacacatcgggcgaggcctatattacggatcatttctctactcagaaacctgaaacatcggcattatcctcctgcttgcaactatagcaacagccttcataggctatgtcctcccgtgaggccaaatatcattctgaggggccacagtaattacaaacttactatccgccatcccatacattgggacagacctagttcaatgaatctgaggaggctactcagtagacagtcccaccctcacacgattctttacctttcacttcatcttgcccttcattattgcagccctagcagcactccacctcctattcttgcacgaaacgggatcaaacaaccccctaggaatcacctcccattccgataaaatcaccttccacccttactacacaatcaaagacgccctcggcttacttctcttccttctctccttaatgacattaacactattctcaccagacctcctaggcgacccagacaattataccctagccaaccccttaaacacccctccccacatcaagcccgaatgatatttcctattcgcctacacaattctccgatccgtccctaacaaactaggaggcgtccttgccctattactatccatcctcatcctagcaataatccccatcctccatatatccaaacaacaaagcataacatttcgcccactaagccaatcactttattgactcctagccgcagacctcctcattctaacctgaatcggaggacaaccagtaagctacccttttaccatcattggacaagtagcatccgtactatacttcacaacaatcctaatcctaataccaactatctccctaattgaaaacaaaatactcaaatgggcctgtccttgtagtataaactaatacaccagtcttgtaaaccggagatgaaaacctttttccaaggacaaatcagagaaaaagtctttaactccaccattagcacccaaagctaagattctaatttaaactattctctgttctttcatggggaagcagatttgggtaccacccaagtattgactcacccatcaacaaccgctatgtatttcgtacattactgccagccaccatgaatattgtacggtaccataaatacttgaccacctgtagtacataaaaacccaatccacatcaaaaccccctccccatgcttacaagcaagtacagcaatcaaccctcaactatcacacatcaactgcaactccaaagccacccctcacccactaggataccaacaaacctacccacccttaacagtacatagtacataaagccatttaccgtacatagcacattacagtcaaatcccttctcgtccccatggatgacccccctcagataggggtcccttgaccaccatcctccgtgaaatcaatatcccgcacaagagtgctactctcctcgctccgggcccataacacttgggggtagctaaagtgaactgtatccgacatctggttcctacttcagggtcataaagcctaaatagcccacacgttccccttaaataagacatcacgatg

SEQ ID NO: 504 - DNA, 16569 bp, Homo sapiens mitochondrial
  3107: "n" refers to a nucleotide at position 3107 of the Cambridge Reference Sequence (CRS, Anderson et al. 1981 Nature 290:457-465), later determined to be absent from the human mtDNA sequence according to the revised CRS (rCRS, Andrews et al. 1999 Nature Genetics 23:147); "n" therefore represents a single nucleotide deletion at a position corresponding to nucleotide 3107 of SEQ ID NO:1 as provided herein.
gatcacaggtctatcaccctattaaccactcacgggagctctccatgcatttggtattttcgtctggggggtatgcacgcgatagcattgcgagacgctggagccggagcaccctatgtcgcagtatctgtctttgattcctgcctcatcctattatttatcgcacctacgttcaatattacaggcgaacatacttactaaagtgtgttaattaattaatgcttgtaggacataataataacaattgaatgtctgcacagccactttccacacagacatcataacaaaaaatttccaccaaaccccccctcccccgcttctggccacagcacttaaacacatctctgccaaaccccaaaaacaaagaaccctaacaccagcctaaccagatttcaaattttatcttttggcggtatgcacttttaacagtcaccccccaactaacacattattttcccctcccactcccatactactaatctcatcaatacaacccccgcccatcctacccagcacacacacaccgctgctaaccccataccccgaaccaaccaaaccccaaagacaccccccacagtttatgtagcttacctcctcaaagcaatacactgaaaatgtttagacgggctcacatcaccccataaacaaataggtttggtcctagcctttctattagctcttagtaagattacacatgcaagcatccccgttccagtgagttcaccctctaaatcaccacgatcaaaagggacaagcatcaagcacgcagcaatgcagctcaaaacgcttagcctagccacacccccacgggaaacagcagtgattaacctttagcaataaacgaaagtttaactaagctatactaaccccagggttggtcaatttcgtgccagccaccgcggtcacacgattaacccaagtcaatagaagccggcgtaaagagtgttttagatcaccccctccccaataaagctaaaactcacctgagttgtaaaaaactccagttgacacaaaatagactacgaaagtggctttaacatatctgaacacacaatagctaagacccaaactgggattagataccccactatgcttagccctaaacctcaacagttaaatcaacaaaactgctcgccagaacactacgagccacagcttaaaactcaaaggacctggcggtgcttcatatccctctagaggagcctgttctgtaatcgataaaccccgatcaacctcaccacctcttgctcagcctatataccgccatcttcagcaaaccctgatgaaggctacaaagtaagcgcaagtacccacgtaaagacgttaggtcaaggtgtagcccatgaggtggcaagaaatgggctacattttctaccccagaaaactacgatagcccttatgaaacttaagggtcgaaggtggatttagcagtaaactgagagtagagtgcttagttgaacagggccctgaagcgcgtacacaccgcccgtcaccctcctcaagtatacttcaaaggacatttaactaaaacccctacgcatttatatagaggagacaagtcgtaacatggtaagtgtactggaaagtgcacttggacgaaccagagtgtagcttaacacaaagcacccaacttacacttaggagatttcaacttaacttgaccgctctgagctaaacctagccccaaacccactccaccttactaccagacaaccttagccaaaccatttacccaaataaagtataggcgatagaaattgaaacctggcgcaatagatatagtaccgcaagggaaagatgaaaaattataaccaagcataatatagcaaggactaacccctataccttctgcataatgaattaactagaaataactttgcaaggagagccaaagctaagacccccgaaaccagacgagctacctaagaacagctaaaagagcacacccgtctatgtagcaaaatagtgggaagatttataggtagaggcgacaaacctaccgagcctggtgatagctggttgtccaagatagaatcttagttcaactttaaatttgcccacagaaccctctaaatccccttgtaaatttaactgttagtccaaagaggaacagctctttggacactaggaaaaaaccttgtagagagagtaaaaaatttaacacccatagtaggcctaaaagcagccaccaattaagaaagcgttcaagctcaacacccactacctaaaaaatcccaaacatataactgaactcctcacacccaattggaccaatctatcaccctatagaagaactaatgttagtataagtaacatgaaaacattctcctccgcataagcctgcgtcagattaaaacactgaactgacaattaacagcccaatatctacaatcaaccaacaagtcattattaccctcactgtcaacccaacacaggcatgctcataaggaaaggttaaaaaaagtaaaaggaactcggcaaatcttaccccgcctgtttaccaaaaacatcacctctagcatcaccagtattagaggcaccgcctgcccagtgacacatgtttaacggccgcggtaccctaaccgtgcaaaggtagcataatcacttgttccttaaatagggacctgtatgaatggctccacgagggttcagctgtctcttacttttaaccagtgaaattgacctgcccgtgaagaggcgggcataacacagcaagacgagaagaccctatggagctttaatttattaatgcaaacagtacctaacaaacccacaggtcctaaactaccaaacctgcattaaaaatttcggttggggcgacctcggagcagaacccaacctccgagcagtacatgctaagacttcaccagtcaaagcgaactactatactcaattgatccaataacttgaccaacggaacaagttaccctagggataacagcgcaatcctattctagagtccatatcaacaatagggtttacgacctcgatgttggatcaggacatcccgatggtgcagccgctattaaaggttcgtttgttcaacgattaaagtcctacgtgatctgagttcagaccggagtaatccaggtcggtttctatctacnttcaaattcctccctgtacgaaaggacaagagaaataaggcctacttcacaaagcgccttcccccgtaaatgatatcatctcaacttagtattatacccacacccacccaagaacagggtttgttaagatggcagagcccggtaatcgcataaaacttaaaactttacagtcagaggttcaattcctcttcttaacaacatacccatggccaacctcctactcctcattgtacccattctaatcgcaatggcattcctaatgcttaccgaacgaaaaattctaggctatatacaactacgcaaaggccccaacgttgtaggcccctacgggctactacaacccttcgctgacgccataaaactcttcaccaaagagcccctaaaacccgccacatctaccatcaccctctacatcaccgccccgaccttagctctcaccatcgctcttctactatgaacccccctccccatacccaaccccctggtcaacctcaacctaggcctcctatttattctagccacctctagcctagccgtttactcaatcctctgatcagggtgagcatcaaactcaaactacgccctgatcggcgcactgcgagcagtagcccaaacaatctcatatgaagtcaccctagccatcattctactatcaacattactaataagtggctcctttaacctctccacccttatcacaacacaagaacacctctgattactcctgccatcatgacccttggccataatatgatttatctccacactagcagagaccaaccgaacccccttcgaccttgccgaaggggagtccgaactagtctcaggcttcaacatcgaatacgccgcaggccccttcgccctattcttcatagccgaatacacaaacattattataataaacaccctcaccactacaatcttcctaggaacaacatatgacgcactctcccctgaactctacacaacatattttgtcaccaagaccctacttctaacctccctgttcttatgaattcgaacagcatacccccgattccgctacgaccaactcatacacctcctatgaaaaaacttcctaccactcaccctagcattacttatatgatatgtctccatacccattacaatctccagcattccccctcaaacctaagaaatatgtctgataaaagagttactttgatagagtaaataataggagcttaaacccccttatttctaggactatgagaatcgaacccatccctgagaatccaaaattctccgtgccacctatcacaccccatcctaaagtaaggtcagctaaataagctatcgggcccataccccgaaaatgttggttatacccttcccgtactaattaatcccctggcccaacccgtcatctactctaccatctttgcaggcacactcatcacagcgctaagctcgcactgattttttacctgagtaggcctagaaataaacatgctagcttttattccagttctaaccaaaaaaataaaccctcgttccacagaagctgccatcaagtatttcctcacgcaagcaaccgcatccataatccttctaatagctatcctcttcaacaatatactctccggacaatgaaccataaccaatactaccaatcaatactcatcattaataatcataatggctatagcaataaaactaggaatagccccctttcacttctgagtcccagaggttacccaaggcacccctctgacatccggcctgcttcttctcacatgacaaaaactagcccccatctcaatcatataccaaatctctccctcactaaacgtaagccttctcctcactctctcaatcttatccatcatagcaggcagttgaggtggattaaaccaaacccagctacgcaaaatcttagcatactcctcaattacccacataggatgaataatagcagttctaccgtacaaccctaacataaccattcttaatttaactatttatattatcctaactactaccgcattcctactactcaacttaaactccagcaccacgaccctactactatctcgcacctgaaacaagctaacatgactaacacccttaattccatccaccctcctctccctaggaggcctgcccccgctaaccggctttttgcccaaatgggccattatcgaagaattcacaaaaaacaatagcctcatcatccccaccatcatagccaccatcaccctccttaacctctacttctacctacgcctaatctactccacctcaatcacactactccccatatctaacaacgtaaaaataaaatgacagtttgaacatacaaaacccaccccattcctccccacactcatcgcccttaccacgctactcctacctatctccccttttatactaataatcttatagaaatttaggttaaatacagaccaagagccttcaaagccctcagtaagttgcaatacttaatttctgtaacagctaaggactgcaaaaccccactctgcatcaactgaacgcaaatcagccactttaattaagctaagcccttactagaccaatgggacttaaacccacaaacacttagttaacagctaagcaccctaatcaactggcttcaatctacttctcccgccgccgggaaaaaaggcgggagaagccccggcaggtttgaagctgcttcttcgaatttgcaattcaatatgaaaatcacctcggagctggtaaaaagaggcctaacccctgtctttagatttacagtccaatgcttcactcagccattttacctcacccccactgatgttcgccgaccgttgactattctctacaaaccacaaagacattggaacactatacctattattcggcgcatgagctggagtcctaggcacagctctaagcctccttattcgagccgagctgggccagccaggcaaccttctaggtaacgaccacatctacaacgttatcgtcacagcccatgcatttgtaataatcttcttcatagtaatacccatcataatcggaggctttggcaactgactagttcccctaataatcggtgcccccgatatggcgtttccccgcataaacaacataagcttctgactcttacctccctctctcctactcctgctcgcatctgctatagtggaggccggagcaggaacaggttgaacagtctaccctcccttagcagggaactactcccaccctggagcctccgtagacctaaccatcttctccttacacctagcaggtgtctcctctatcttaggggccatcaatttcatcacaacaattatcaatataaaaccccctgccataacccaataccaaacgcccctcttcgtctgatccgtcctaatcacagcagtcctacttctcctatctctcccagtcctagctgctggcatcactatactactaacagaccgcaacctcaacaccaccttcttcgaccccgccggaggaggagaccccattctataccaacacctattctgatttttcggtcaccctgaagtttatattcttatcctaccaggcttcggaataatctcccatattgtaacttactactccggaaaaaaagaaccatttggatacataggtatggtctgagctatgatatcaattggcttcctagggtttatcgtgtgagcacaccacatatttacagtaggaatagacgtagacacacgagcatatttcacctccgctaccataatcatcgctatccccaccggcgtcaaagtatttagctgactcgccacactccacggaagcaatatgaaatgatctgctgcagtgctctgagccctaggattcatctttcttttcaccgtaggtggcctgactggcattgtattagcaaactcatcactagacatcgtactacacgacacgtactacgttgtagcccacttccactatgtcctatcaataggagctgtatttgccatcataggaggcttcattcactgatttcccctattctcaggctacaccctagaccaaacctacgccaaaatccatttcactatcatattcaccggcgtaaatctaactttcttcccacaacactttctcggcctatccggaatgccccgacgttactcggactaccccgatgcatacaccacatgaaacatcctatcatctgtaggctcattcatttctctaacagcagtaatattaataattttcatgatttgagaagccttcgcttcgaagcgaaaagtcctaatagtagaagaaccctccataaacctggagtgactatatggatgccccccaccctaccacacattcgaagaacccgtatacataaaatctagacaaaaaaggaaggaatcgaaccccccaaagctggtttcaagccaaccccatggcctccatgactttttcaaaaaggtattagaaaaaccatttcataactttgtcaaagttaaattataggctaaatcctatatatcttaatggcacatgcagcgcaagtaggtctacaagacgctacttcccctatcatagaagagcttatcacctttcatgatcacgccctcataatcattttccttatctgcttcctagtcctgtatgcccttttcctaacactcacaacaaaactaactaatactaacatctcagacgctcaggaaatagaaaccgtctgaactatcctgcccgccatcatcctagtcctcatcgccctcccatccctacgcatcctttacataacagacgaggtcaacgatccctcccttaccatcaaatcaattggccaccaatggtactgaacctacgagtacaccgactacggcggactaatcttcaactcctacatacttcccccattattcctagaaccaggcgacctgcgactccttgacgttgacaatcgagtagtactcccgattgaagcccccattcgtataataattacatcacaagacgtcttgcactcatgagctgtccccacattaggcttaaaaacagatgcaattcccggacgtctaaaccaaaccactttcaccgctacacgaccgggggtatactacggtcaatgctctgaaatctgtggagcaaaccacagtttcatgcccatcgtcctagaattaattcccctaaaaatctttgaaatagggcccgtatttaccctatagcaccccctctaccccctctagagcccactgtaaagctaacttagcattaaccttttaagttaaagattaagagaaccaacacctctttacagtgaaatgccccaactaaatactaccgtatggcccaccataattacccccatactccttacactattcctcatcacccaactaaaaatattaaacacaaactaccacctacctccctcaccaaagcccataaaaataaaaaattataacaaaccctgagaaccaaaatgaacgaaaatctgttcgcttcattcattgcccccacaatcctaggcctacccgccgcagtactgatcattctatttccccctctattgatccccacctccaaatatctcatcaacaaccgactaatcaccacccaacaatgactaatcaaactaacctcaaaacaaatgataaccatacacaacactaaaggacgaacctgatctcttatactagtatccttaatcatttttattgccacaactaacctcctcggactcctgcctcactcatttacaccaaccacccaactatctataaacctagccatggccatccccttatgagcgggcgcagtgattataggctttcgctctaagattaaaaatgccctagcccacttcttaccacaaggcacacctacaccccttatccccatactagttattatcgaaaccatcagcctactcattcaaccaatagccctggccgtacgcctaaccgctaacattactgcaggccacctactcatgcacctaattggaagcgccaccctagcaatatcaaccattaaccttccctctacacttatcatcttcacaattctaattctactgactatcctagaaatcgctgtcgccttaatccaagcctacgttttcacacttctagtaagcctctacctgcacgacaacacataatgacccaccaatcacatgcctatcatatagtaaaacccagcccatgacccctaacaggggccctctcagccctcctaatgacctccggcctagccatgtgatttcacttccactccataacgctcctcatactaggcctactaaccaacacactaaccatataccaatgatggcgcgatgtaacacgagaaagcacataccaaggccaccacacaccacctgtccaaaaaggccttcgatacgggataatcctatttattacctcagaagtttttttcttcgcaggatttttctgagccttttaccactccagcctagcccctaccccccaattaggagggcactggcccccaacaggcatcaccccgctaaatcccctagaagtcccactcctaaacacatccgtattactcgcatcaggagtatcaatcacctgagctcaccatagtctaatagaaaacaaccgaaaccaaataattcaagcactgcttattacaattttactgggtctctattttaccctcctacaagcctcagagtacttcgagtctcccttcaccatttccgacggcatctacggctcaacattttttgtagccacaggcttccacggacttcacgtcattattggctcaactttcctcactatctgcttcatccgccaactaatatttcactttacatccaaacatcactttggcttcgaagccgccgcctgatactggcattttgtagatgtggtttgactatttctgtatgtctccatctattgatgagggtcttactcttttagtataaatagtaccgttaacttccaattaactagttttgacaacattcaaaaaagagtaataaacttcgccttaattttaataatcaacaccctcctagccttactactaataattattacattttgactaccacaactcaacggctacatagaaaaatccaccccttacgagtgcggcttcgaccctatatcccccgcccgcgtccctttctccataaaattcttcttagtagctattaccttcttattatttgatctagaaattgccctccttttacccctaccatgagccctacaaacaactaacctgccactaatagttatgtcatccctcttattaatcatcatcctagccctaagtctggcctatgagtgactacaaaaaggattagactgaaccgaattggtatatagtttaaacaaaacgaatgatttcgactcattaaattatgataatcatatttaccaaatgcccctcatttacataaatattatactagcatttaccatctcacttctaggaatactagtatatcgctcacacctcatatcctccctactatgcctagaaggaataatactatcgctgttcattatagctactctcataaccctcaacacccactccctcttagccaatattgtgcctattgccatactagtctttgccgcctgcgaagcagcggtgggcctagccctactagtctcaatctccaacacatatggcctagactacgtacataacctaaacctactccaatgctaaaactaatcgtcccaacaattatattactaccactgacatgactttccaaaaaacacataatttgaatcaacacaaccacccacagcctaattattagcatcatccctctactattttttaaccaaatcaacaacaacctatttagctgttccccaaccttttcctccgaccccctaacaacccccctcctaatactaactacctgactcctacccctcacaatcatggcaagccaacgccacttatccagtgaaccactatcacgaaaaaaactctacctctctatactaatctccctacaaatctccttaattataacattcacagccacagaactaatcatattttatatcttcttcgaaaccacacttatccccaccttggctatcatcacccgatgaggcaaccagccagaacgcctgaacgcaggcacatacttcctattctacaccctagtaggctccctccccctactcatcgcactaatttacactcacaacaccctaggctcactaaacattctactactcactctcactgcccaagaactatcaaactcctgagccaacaacttaatatgactagcttacacaatagcttttatagtaaagatacctctttacggactccacttatgactccctaaagcccatgtcgaagcccccatcgctgggtcaatagtacttgccgcagtactcttaaaactaggcggctatggtataatacgcctcacactcattctcaaccccctgacaaaacacatagcctaccccttccttgtactatccctatgaggcataattataacaagctccatctgcctacgacaaacagacctaaaatcgctcattgcatactcttcaatcagccacatagccctcgtagtaacagccattctcatccaaaccccctgaagcttcaccggcgcagtcattctcataatcgcccacgggcttacatcctcattactattctgcctagcaaactcaaactacgaacgcactcacagtcgcatcataatcctctctcaaggacttcaaactctactcccactaatagctttttgatgacttctagcaagcctcgctaacctcgccttaccccccactattaacctactgggagaactctctgtgctagtaaccacgttctcctgatcaaatatcactctcctacttacaggactcaacatactagtcacagccctatactccctctacatatttaccacaacacaatggggctcactcacccaccacattaacaacataaaaccctcattcacacgagaaaacaccctcatgttcatacacctatcccccattctcctcctatccctcaaccccgacatcattaccgggttttcctcttgtaaatatagtttaaccaaaacatcagattgtgaatctgacaacagaggcttacgaccccttatttaccgagaaagctcacaagaactgctaactcatgcccccatgtctaacaacatggctttctcaacttttaaaggataacagctatccattggtcttaggccccaaaaattttggtgcaactccaaataaaagtaataaccatgcacactactataaccaccctaaccctgacttccctaattccccccatccttaccaccctcgttaaccctaacaaaaaaaactcatacccccattatgtaaaatccattgtcgcatccacctttattatcagtctcttccccacaacaatattcatgtgcctagaccaagaagttattatctcgaactgacactgagccacaacccaaacaacccagctctccctaagcttcaaactagactacttctccataatattcatccctgtagcattgttcgttacatggtccatcatagaattctcactgtgatatataaactcagacccaaacattaatcagttcttcaaatatctactcatcttcctaattaccatactaatcttagttaccgctaacaacctattccaactgttcatcggctgagaaggcgtaggaattatatccttcttgctcatcagttgatgatacgcccgagcagatgccaacacagcagccattcaagcaatcctatacaaccgtatcggcgatatcggtttcatcctcgccttagcatgatttatcctacactccaactcatgagacccacaacaaatagcccttctaaacgctaatccaagcctcaccccactactaggcctcctcctagcagcagcaggcaaatcagcccaattaggtctccacccctgactcccctcagccatagaaggccccaccccagtctcagccctactccactcaagcactatagttgtagcaggaatcttcttactcatccgcttccaccccctagcagaaaatagcccactaatccaaactctaacactatgcttaggcgctatcaccactctgttcgcagcagtctgcgcccttacacaaaatgacatcaaaaaaatcgtagccttctccacttcaagtcaactaggactcataatagttacaatcggcatcaaccaaccacacctagcattcctgcacatctgtacccacgccttcttcaaagccatactatttatgtgctccgggtccatcatccacaaccttaacaatgaacaagatattcgaaaaataggaggactactcaaaaccatacctctcacttcaacctccctcaccattggcagcctagcattagcaggaatacctttcctcacaggtttctactccaaagaccacatcatcgaaaccgcaaacatatcatacacaaacgcctgagccctatctattactctcatcgctacctccctgacaagcgcctatagcactcgaataattcttctcaccctaacaggtcaacctcgcttccccacccttactaacattaacgaaaataaccccaccctactaaaccccattaaacgcctggcagccggaagcctattcgcaggatttctcattactaacaacatttcccccgcatcccccttccaaacaacaatccccctctacctaaaactcacagccctcgctgtcactttcctaggacttctaacagccctagacctcaactacctaaccaacaaacttaaaataaaatccccactatgcacattttatttctccaacatactcggattctaccctagcatcacacaccgcacaatcccctatctaggccttcttacgagccaaaacctgcccctactcctcctagacctaacctgactagaaaagctattacctaaaacaatttcacagcaccaaatctccacctccatcatcacctcaacccaaaaaggcataattaaactttacttcctctctttcttcttcccactcatcctaaccctactcctaatcacataacctattcccccgagcaatctcaattacaatatatacaccaacaaacaatgttcaaccagtaactactactaatcaacgcccataatcatacaaagcccccgcaccaataggatcctcccgaatcaaccctgacccctctccttcataaattattcagcttcctacactattaaagtttaccacaaccaccaccccatcatactctttcacccacagcaccaatcctacctccatcgctaaccccactaaaacactcaccaagacctcaacccctgacccccatgcctcaggatactcctcaatagccatcgctgtagtatatccaaagacaaccatcattccccctaaataaattaaaaaaactattaaacccatataacctcccccaaaattcagaataataacacacccgaccacaccgctaacaatcaatactaaacccccataaataggagaaggcttagaagaaaaccccacaaaccccattactaaacccacactcaacagaaacaaagcatacatcattattctcgcacggactacaaccacgaccaatgatatgaaaaaccatcgttgtatttcaactacaagaacaccaatgaccccaatacgcaaaactaaccccctaataaaattaattaaccactcattcatcgacctccccaccccatccaacatctccgcatgatgaaacttcggctcactccttggcgcctgcctgatcctccaaatcaccacaggactattcctagccatgcactactcaccagacgcctcaaccgccttttcatcaatcgcccacatcactcgagacgtaaattatggctgaatcatccgctaccttcacgccaatggcgcctcaatattctttatctgcctcttcctacacatcgggcgaggcctatattacggatcatttctctactcagaaacctgaaacatcggcattatcctcctgcttgcaactatagcaacagccttcataggctatgtcctcccgtgaggccaaatatcattctgaggggccacagtaattacaaacttactatccgccatcccatacattgggacagacctagttcaatgaatctgaggaggctactcagtagacagtcccaccctcacacgattctttacctttcacttcatcttgcccttcattattgcagccctagcagcactccacctcctattcttgcacgaaacgggatcaaacaaccccctaggaatcacctcccattccgataaaatcaccttccacccttactacacaatcaaagacgccctcggcttacttctcttccttctctccttaatgacattaacactattctcaccagacctcctaggcgacccagacaattataccctagccaaccccttaaacacccctccccacatcaagcccgaatgatatttcctattcgcctacacaattctccgatccgtccctaacaaactaggaggcgtccttgccctattactatccatcctcatcctagcaataatccccatcctccatatatccaaacaacaaagcataatatttcgcccactaagccaatcactttattgactcctagccgcagacctcctcattctaacctgaatcggaggacaaccagtaagctacccttttaccatcattggacaagtagcatccgtactatacttcacaacaatcctaatcctaataccaactatctccctaattgaaaacaaaatactcaaatgggcctgtccttgtagtataaactaatacaccagtcttgtaaaccggagatgaaaacctttttccaaggacaaatcagagaaaaagtctttaactccaccattagcacccaaagctaagattctaatttaaactattctctgttctttcatggggaagcagatttgggtaccacccaagtattgactcacccatcaacaaccgctatgtatttcgtacattactgccagccaccatgaatattgtacggtaccataaatacttgaccacctgtagtacataaaaacccaatccacatcaaaaccccctccccatgcttacaagcaagtacagcaatcaaccctcaactatcacacatcaactgcaactccaaagccacccctcacccactaggataccaacaaacctacccacccttaacagtacatagtacataaagccatttaccgtacatagcacattacagtcaaatcccttctcgtccccatggatgacccccctcagataggggtcccttgaccaccatcctccgtgaaatcaatatcccgcacaagagtgctactctcctcgctccgggcccataacacttgggggtagctaaagtgaactgtatccgacatctggttcctacttcagggtcataaagcctaaatagcccacacgttccccttaaataagacatcacgatg

SEQ ID NO: 505 - DNA, 16569 bp, Homo sapiens mitochondrial
  3107: "n" refers to a nucleotide at position 3107 of the Cambridge Reference Sequence (CRS, Anderson et al. 1981 Nature 290:457-465), later determined to be absent from the human mtDNA sequence according to the revised CRS (rCRS, Andrews et al. 1999 Nature Genetics 23:147); "n" therefore represents a single nucleotide deletion at a position corresponding to nucleotide 3107 of SEQ ID NO:1 as provided herein.
gatcacaggtctatcaccctattaaccactcacgggagctctccatgcatttggtattttcgtctggggggtatgcacgcgatagcattgcgagacgctggagccggagcaccctatgtcgcagtatctgtctttgattcctgcctcatcctattatttatcgcacctacgttcaatattacaggcgaacatacttactaaagtgtgttaattaattaatgcttgtaggacataataataacaattgaatgtctgcacagccactttccacacagacatcataacaaaaaatttccaccaaaccccccctcccccgcttctggccacagcacttaaacacatctctgccaaaccccaaaaacaaagaaccctaacaccagcctaaccagatttcaaattttatcttttggcggtatgcacttttaacagtcaccccccaactaacacattattttcccctcccactcccatactactaatctcatcaatacaacccccgcccatcctacccagcacacacacaccgctgctaaccccataccccgaaccaaccaaaccccaaagacaccccccacagtttatgtagcttacctcctcaaagcaatacactgaaaatgtttagacgggctcacatcaccccataaacaaataggtttggtcctagcctttctattagctcttagtaagattacacatgcaagcatccccattccagtgagttcaccctctaaatcaccacgatcaaaagggacaagcatcaagcacgcagcaatgcagctcaaaacgcttagcctagccacacccccacgggaaacagcagtgattaacctttagcaataaacgaaagtttaactaagctatactaaccccagggttggtcaatttcgtgccagccaccgcggtcacacgattaacccaagtcaatagaaaccggcgtaaagagtgttttagatcaccccctccccaataaagctaaaactcacctgagttgtaaaaaactccagttgacacaaaatagactacgaaagtggctttaacatatctgaacacacaatagctaagacccaaactgggattagataccccactatgcttagccctaaacctcaacagttaaatcaacaaaactgctcgccagaacactacgagccacagcttaaaactcaaaggacctggcggtgcttcatatccctctagaggagcctgttctgtaatcgataaaccccgatcaacctcaccacctcttgctcagcctatataccgccatcttcagcaaaccctgatgaaggctacaaagtaagcgcaagtacccacgtaaagacgttaggtcaaggtgtagcccatgaggtggcaagaaatgggctacattttctaccccagaaaactacgatagcccttatgaaacttaagggtcgaaggtggatttagcagtaaactgagagtagagtgcttagttgaacagggccctgaagcgcgtacacaccgcccgtcaccctcctcaagtatacttcaaaggacatttaactaaaacccctacgcatttatatagaggagacaagtcgtaacatggtaagtgtactggaaagtgcacttggacgaaccagagtgtagcttaacacaaagcacccaacttacacttaggagatttcaacttaacttgaccgctctgagctaaacctagccccaaacccactccaccttactaccagacaaccttagccaaaccatttacccaaataaagtataggcgatagaaattgaaacctggcgcaatagatatagtaccgcaagggaaagatgaaaaattataaccaagcataatatagcaaggactaacccctataccttctgcataatgaattaactagaaataactttgcaaggagaaccaaagctaagacccccgaaaccagacgagctacctaagaacagctaaaagagcacacccgtctatgtagcaaaatagtgggaagatttataggtagaggcgacaaacctaccgagcctggtgatagctggttgtccaagatagaatcttagttcaactttaaatttgcccacagaaccctctaaatccccttgtaaatttaactgttagtccaaagaggaacagctctttggacactaggaaaaaaccttgtagagagagtaaaaaatttaacacccatagtaggcctaaaagcagccaccaattaagaaagcgttcaagctcaacacccactacctaaaaaatcccaaacatataactgaactcctcacacccaattggaccaatctatcaccctatagaagaactaatgttagtataagtaacatgaaaacattctcctccgcataagcctgcgtcagattaaaacactgaactgacaattaacagcccaatatctacaatcaaccaacaagtcattattaccctcactgtcaacccaacacaggcatgctcataaggaaaggttaaaaaaagtaaaaggaactcggcaaatcttaccccgcctgtttaccaaaaacatcacctctagcatcaccagtattagaggcaccgcctgcccagtgacacatgtttaacggccgcggtaccctaaccgtgcaaaggtagcataatcacttgttccttaaatagggacctgtatgaatggctccacgagggttcagctgtctcttacttttaaccagtgaaattgacctgcccgtgaagaggcgggcatgacacagcaagacgagaagaccctatggagctttaatttattaatgcaaacagtacctaacaaacccacaggtcctaaactaccaaacctgcattaaaaatttcggttggggcgacctcggagcagaacccaacctccgagcagtacatgctaagacttcaccagtcaaagcgaactactatactcaattgatccaataacttgaccaacggaacaagttaccctagggataacagcgcaatcctattctagagtccatatcaacaatagggtttacgacctcgatgttggatcaggacatcccgatggtgcagccgctattaaaggttcgtttgttcaacgattaaagtcctacgtgatctgagttcagaccggagtaatccaggtcggtttctatctacnttcaaattcctccctgtacgaaaggacaagagaaataaggcctacttcacaaagcgccttcccccgtaaatgatatcatctcaacttagtattatacccacacccacccaagaacagggtttgttaagatggcagagcccggtaatcgcataaaacttaaaactttacagtcagaggttcaattcctcttcttaacaacatacccatggccaacctcctactcctcattgtacccattctaatcgcaatggcattcctaatgcttaccgaacgaaaaattctaggctatatacaactacgcaaaggccccaacgttgtaggcccctacgggctactacaacccttcgctgacgccataaaactcttcaccaaagagcccctaaaacccgccacatctaccatcaccctctacatcaccgccccgaccttagctctcaccatcgctcttctactatgaacccccctccccatacccaaccccctggtcaacctcaacctaggcctcctatttattctagccacctctagcctagccgtttactcaatcctctgatcagggtgagcatcaaactcaaactacgccctgatcggcgcactgcgagcagtagcccaaacaatctcatatgaagtcaccctagccatcattctactatcaacattactaataagtggctcctttaacctctccacccttatcacaacacaagaacacctctgattactcctgccatcatgacccttggccataatatgatttatctccacactagcagagaccaaccgaacccccttcgaccttgccgaaggggagtccgaactagtctcaggcttcaacatcgaatacgccgcaggccccttcgccctattcttcatagccgaatacacaaacattattataataaacaccctcaccactacaatcttcctaggaacaacatatgacgcactctcccctgaactctacacaacatattttgtcaccaagaccctacttctaacctccctgttcttatgaattcgaacagcatacccccgattccgctacgaccaactcatacacctcctatgaaaaaacttcctaccactcaccctagcattacttatatgacatgtctccatacccattacaatctccagcattccccctcaaacctaagaaatatgtctgataaaagagttactttgatagagtaaataataggagcttaaacccccttatttctaggactatgagaatcgaacccatccctgagaatccaaaattctccgtgccacctatcacaccccatcctaaagtaaggtcagctaaataagctatcgggcccataccccgaaaatgttggttatacccttcccgtactaattaatcccctggcccaacccgtcatctactctaccatctttgcaggcacactcatcacagcgctaagctcgcactgattttttacctgagtaggcctagaaataaacatgctagcttttattccagttctaaccaaaaaaataaaccctcgttccacagaagctgccatcaagtatttcctcacgcaagcaaccgcatccataatccttctaatagctatcctcttcaacaatatactctccggacaatgaaccataaccaatactaccaatcaatactcatcattaataatcataatggctatagcaataaaactaggaatagccccctttcacttctgagtcccagaggttacccaaggcacccctctgacatccggcctgcttcttctcacatgacaaaaactagcccccatctcaatcatataccaaatctctccctcactagacgtaagccttctcctcactctctcaatcttatccatcatagcaggcagttgaggtggattaaaccaaacccagctacgcaaaatcttagcatactcctcaattacccacataggatgaataatagcagttctaccgtacaaccctaacataaccattcttaatttaactatttatattatcctaactactaccgcattcctactactcaacttaaactccagcaccacaaccctactactatctcgcacctgaaacaagctaacatgactaacacccttaattccatccaccctcctctccctaggaggcctgcccccgctaaccggctttttgcccaaatgggccattatcgaagaattcacaaaaaacaatagcctcatcatccccaccatcatagccaccatcaccctccttaacctctacttctacctacgcctaatctactccacctcaatcacactactccccatatctaacaacgtaaaaataaaatgacagtttgaacacacaaaacccaccccattcctccccacactcatcgcccttaccacgctactcctacctatctccccttttatactaataatcttatagaaatttaggttaaatacagaccaagagccttcaaagccctcagtaagttgcaatacttaatttctgtaacagctaaggactgcaaaaccccactctgcatcaactgaacgcaaatcagccactttaattaagctaagcccttactagaccaatgggacttaaacccacaaacacttagttaacagctaagcaccctaatcaactggcttcaatctacttctcccgccgccgggaaaaaaggcgggagaagccccggcaggtttgaagctgcttcttcgaatttgcaattcaatatgaaaatcacctcggagctggtaaaaagaggcctaacccctgtctttagatttacagtccaatgcttcactcagccattttacctcacccccactgatgttcgccgaccgttgactattctctacaaaccacaaagacattggaacactatacctattattcggcgcatgagctggagtcctaggcacagctctaagcctccttattcgagccgagctgggccagccaggcaaccttctaggtaacgaccacatctacaacgttatcgtcacagcccatgcatttgtaataatcttcttcatagtaatacccatcataatcggaggctttggcaactgactagttcccctaataatcggtgcccccgatatggcgtttccccgcataaacaacataagcttctgactcttacctccctctctcctactcctgctcgcatctgctatagtggaggccggagcaggaacaggttgaacagtctaccctcccttagcagggaactactcccaccctggagcctccgtagacctaaccatcttctccttacacctagcaggtgtctcctctatcttaggggccatcaatttcatcacaacaattatcaatataaaaccccctgccataacccaataccaaacgcccctcttcgtctgatccgtcctaatcacagcagtcctacttctcctatctctcccagtcctagctgctggcatcactatactactaacagaccgcaacctcaacaccaccttcttcgaccccgccggaggaggagaccccattctataccaacacctattctgatttttcggtcaccctgaagtttatattcttatcctaccaggcttcggaataatctcccatattgtaacttactactccggaaaaaaagaaccatttggatacataggtatggtctgagctatgatatcaattggcttcctagggtttatcgtgtgagcacaccatatatttacagtaggaatagacgtagacacacgagcatatttcacctccgctaccataatcatcgctatccccaccggcgtcaaagtatttagctgactcgccacactccacggaagcaatatgaaatgatctgctgcagtgctctgagccctaggattcatctttcttttcaccgtaggtggcctgactggcattgtattagcaaactcatcactagacatcgtactacacgacacgtactacgttgtagctcacttccactatgtcctatcaataggagctgtatttgccatcataggaggcttcattcactgatttcccctattctcaggctacaccctagaccaaacctacgccaaaatccatttcactatcatattcatcggcgtaaatctaactttcttcccacaacactttctcggcctatccggaatgccccgacgttactcggactaccccgatgcatacaccacatgaaacatcctatcatctgtaggctcattcatttctctaacagcagtaatattaataattttcatgatttgagaagccttcgcttcgaagcgaaaagtcctaatagtagaagaaccctccataaacctggagtgactatatggatgccccccaccctaccacacattcgaagaacccgtatacataaaatctagacaaaaaaggaaggaatcgaaccccccaaagctggtttcaagccaaccccatggcctccatgactttttcaaaaaggtattagaaaaaccatttcataactttgtcaaagttaaattataggctaaatcctatatatcttaatggcacatgcagcgcaagtaggtctacaagacgctacttcccctatcatagaagagcttatcacctttcatgatcacgccctcataatcattttccttatctgcttcctagtcctgtatgcccttttcctaacactcacaacaaaactaactaatactaacatctcagacgctcaggaaatagaaaccgtctgaactatcctgcccgccatcatcctagtcctcatcgccctcccatccctacgcatcctttacataacagacgaggtcaacgatccctcccttaccatcaaatcaattggccaccaatggtactgaacctacgagtacaccgactacggcggactaatcttcaactcctacatacttcccccattattcctagaaccaggcgacctgcgactccttgacgttgacaatcgagtagtactcccgattgaagcccccattcgtataataattacatcacaagacgtcttgcactcatgagctgtccccacattaggcttaaaaacagatgcaattcccggacgtctaaaccaaaccactttcaccgctacacgaccgggggtatactacggtcaatgctctgaaatctgtggagcaaaccacagtttcatgcccatcgtcctagaattaattcccctaaaaatctttgaaatagggcccgtatttaccctatagcaccccctctaccccctctagagcccactgtaaagctaacttagcattaaccttttaagttaaagattaagagaaccaacacctctttacagtgaaatgccccaactaaatactaccgtatggcccaccataattacccccatactccttacactattcctcatcacccaactaaaaatattaaacacaaactaccacctacctccctcaccaaagcccataaaaataaaaaattataacaaaccctgagaaccaaaatgaacgaaaatctgttcgcttcattcattgcccccacaatcctaagcctacccgccgcagtactgatcattctatttccccctctattgatccccacctccaaatatctcatcaacaaccgactaatcaccacccaacaatgactaatcaaactaacctcaaaacaaataataaccatacacaacactaaaggacgaacctgatctcttatactagtatccttaatcatttttattgccacaactaacctcctcggactcctgcctcactcatttacaccaaccacccaactatctataaacctagccatggccatccccttatgagcgggcgcagtgattataggctttcgctctaagattaaaaatgccctagcccacttcttaccacaaggcacacctacaccccttatccccatactagttattatcgaaaccatcagcctactcattcaaccaatagccctggccgtacgcctaaccgctaacattactgcaggccacctactcatgcacctaattggaagcgccaccctagcaatatcaaccattaaccttccctctacacttatcatcttcacaattctaattctactgactatcctagaaatcgctgtcgccttaatccaagcctacgttttcacacttctagtaagcctctacctgcacgacaacacataatgacccaccaatcacatgcctatcatatagtaaaacccagcccatgacccctaacaggggccctctcagccctcctaatgacctccggcctagccatgtgatttcacttccactccataacgctcctcatactaggcctactaaccaacacactaaccatataccaatgatggcgcgatgtaacacgagaaagcacataccaaggccaccacacaccacctgtccaaaaaggccttcgatacgggataatcctatttattacctcagaagtttttttcttcgcaggatttttctgagccttttaccactccagcctagcccctaccccccaattaggagggcactggcccccaacaggcatcaccccgctaaatcccctagaagtcccactcctaaacacatccgtattactcgcatcaggagtatcaatcacctgagctcaccatagtctaatagaaaacaaccgaaaccaaataattcaagcactgcttattacaattttactgggtctctattttaccctcctacaagcctcagagtacttcgagtctcccttcaccatttccgacggcatctacggctcaacattttttgtagccacaggcttccacggacttcacgtcattattggctcaactttcctcactatctgcttcatccgccaactaatatttcactttacatccaaacatcactttggcttcgaagccgccgcctgatactggcattttgtagatgtggtttgactatttctgtatgtctccatctattgatgagggtcttactcttttagtataaatagtaccgttaacttccaattaactagttttgacaacattcaaaaaagagtaataaacttcgccttaattttaataatcaacaccctcctagccttactactaataattattacattttgactaccacaactcaacggctacatagaaaaatccaccccttacgagtgcggcttcgaccctatatcccccgcccgcgtccctttctccataaaattcttcttagtagctattaccttcttattatttgatctagaaattgccctccttttacccctaccatgagccctacaaacaactaacctgccactaatagttatgtcatccctcttattaatcatcatcctagccctaagtctggcctatgagtgactacaaaaaggattagactgaaccgaattggtatatagtttaaacaaaacgaatgatttcgactcattaaattatgataatcatatctaccaaatgcccctcatttacataaatattatactagcatttaccatctcacttctaggaatactagtatatcgctcacacctcatatcctccctactatgcctagaaggaataatactatcgctgttcattatagctactctcataaccctcaacacccactccctcttagccaatattgtgcctattgccatactagtctttgccgcctgcgaagcagcggtgggcctagccctactagtctcaatctccaacacatatggcctagactacgtacataacctaaacctactccaatgctaaaactaatcgtcccaacaattatattactaccactgacatgactttccaaaaaacacataatttgaatcaacacaaccacccacagcctaattattagcatcatccctctactattttttaaccaaatcaacaacaacctatttagctgttccccaaccttttcctccgaccccctaacaacccccctcctaatactaactacctgactcctacccctcacaatcatggcaagccaacgccacttatccagtgaaccactatcacgaaaaaaactctacctctctatactaatctccctacaaatctccttaattataacattcacagccacagaactaatcatattttatatcttcttcgaaaccacacttatccccaccttggctatcatcacccgatgaggcaaccagccagaacgcctgaacgcaggcacatacttcctattctacaccctagtaggctcccttcccctactcatcgcactgatttacactcacaacaccctaggctcactaaacattctactactcactctcactgcccaagaactatcaaactcctgagccaacaacttaatatgactagcttacacaatagcttttatagtaaagatacctctttacggactccacttatgactccctaaagcccatgtcgaagcccccatcgctgggtcaatagtacttgccgcagtactcttaaaactaggcggctatggtataatacgcctcacactcattctcaaccccctgacaaaacacatagcctaccccttccttgtactatccctatgaggcataattataacaagctccatctgcctacgacaaacagacctaaaatcgctcattgcatactcttcaatcagccacatagccctcgtagtaacagccattctcatccaaaccccctgaagcttcaccggcgcagtcattctcataatcgcccacggacttacatcctcattactattctgcctagcaaactcaaactacgaacgcactcacagtcgcatcataatcctctctcaaggacttcaaactctgctcccactaatagctttttgatgacttctagcaagcctcgctaacctcgccttaccccccactattaacctactgggagaactctctgtgctagtaaccacgttctcctgatcaaatatcactctcctacttacaggactcaacatactagtcacagccctatactccctctacatatttaccacaacacaatggggctcactcacccaccacattaacaacataaaaccctcattcacacgagaaaacaccctcatgttcatacacctatcccccattctcctcctatccctcaaccccgacatcattaccgggttttcctcttgtaaatatagtttaaccaaaacatcagattgtgaatctgacaacagaggcttacgaccccttatttaccgagaaagctcacaagaactgctaactcatgcccccatgtctaacaacatggctttctcaacttttaaaggataacagctatccattggtcttaggccccaaaaattttggtgcaactccaaataaaagtaataaccatgcacactactataaccaccctaaccctgacttccctaattccccccatccttaccaccctcgttaaccctaacaaaaaaaactcatacccccattatgtaaaatccattgtcgcatccacctttattatcagtctcttccccacaacaatattcatgtgcctagaccaagaagttattatctcgaactgacactgagccacaacccaaacaacccagctctccctaagcttcaaactagactacttctccataatattcatccctgtagcattgttcgttacatggtccatcatagaattctcactgtgatatataaactcagacccaaacattaatcagttcttcaaatatctactcatcttcctaattaccatactaatcttagttaccgctaacaacctattccaactgttcatcggctgagagggcgtaggaattatatccttcttgctcatcagttgatgatacgcccgagcagatgccaacacagcagccattcaagcaatcctatacaaccgtatcggcgatatcggtttcatcctcgccttagcatgatttatcctacactccaactcatgagacccacaacaaatagcccttctaaacgctaatccaagcctcaccccactactaggcctcctcctagcagcagcaggcaaatcagcccaattaggtctccacccctgactcccctcagccatagaaggccccaccccagtctcagccctactccactcaagcactatagttgtagcaggaatcttcttactcatccgcttccaccccctagcagaaaatagcccactaatccaaactctaacactatgcttaggcgctatcaccactctgttcgcagcagtctgcgcccttacacaaaatgacatcaaaaaaatcgtagccttctccacttcaagtcaactaggactcataatagttacaatcggcatcaaccaaccacacctagcattcctgcacatctgtacccacgccttcttcaaagccatactatttatgtgctccggatccatcatccacaaccttaacaatgaacaagatattcgaaaaataggaggactactcaaaaccatacctctcacttcaacctccctcaccattggcagcctagcattagcaggaatacctttcctcacaggtttctactccaaagaccacatcatcgaaaccgcaaacatatcatacacaaacgcctgagccctatctattactctcatcgctacctccctgacaagcgcctatagcactcgaataattcttctcaccctaacaggtcaacctcgcttccccacccttactaacattaacgaaaataaccccaccctactaaaccccattaaacgcctggcagccggaagcctattcgcaggatttctcattactaacaacatttcccccgcatcccccttccaaacaacaatccccctctacctaaaactcacagccctcgctgtcactttcctaggacttctaacagccctagacctcaactacctaaccaacaaacttaaaataaaatccccactatgcacattttatttctccaacatactcggattctaccctagcatcacacaccgcacaatcccctatctaggccttcttacgagccaaaacctgcccctactcctcctagacctaacctgactagaaaagctattacctaaaacaatttcacagcaccaaatctccacctccatcatcacctcaacccaaaaaggcataattaaactttacttcctctctttcttcttcccactcatcctaaccctactcctaatcacataacctattcccccgagcaatctcaattacaatatatacaccaacaaacaatgttcaaccagtaactactactaatcaacgcccatagtcatacaaagcccccgcaccaataggatcctcccgaatcaaccctgacccctctccttcataaattattcagcttcctacactattaaagtttaccacaaccaccaccccatcatactctttcacccacagcaccaatcctacctccatcgctaaccccactaaaacactcaccaagacctcaacccctgacccccatgcctcaggatactcctcaatagccatcgctgtagtatatccaaagacaaccatcattccccctaaataaattaaaaaaactattaaacccatataacctcccccaaaattcagaataataacacacccgaccacaccgctaacaatcaatactaaacccccataaataggagaaggcttagaagaaaaccccacaaaccccattactaaacccacactcaacagaaacaaagcatacatcattattctcgcacggactacaaccacgaccaatgatatgaaaaaccatcgttgtatttcaactacaagaacaccaatgaccccaatacgcaaaattaaccccctaataaaattaattaaccactcattcatcgacctccccaccccatccaacatctccgcatgatgaaacttcggctcactccttggcgcctgcctgatcctccaaatcaccacaggactattcctagccatacactactcaccagacgcctcaaccgccttttcatcaatcgcccacatcactcgagacgtaaattatggctgaatcatccgctaccttcacgccaatggcgcctcaatattctttatctgcctcttcctacacatcgggcgaggcctatattacggatcatttctctactcagaaacctgaaacatcggcattatcctcctgcttgcaactatagcaacagccttcataggctatgtcctcccgtgaggccaaatatcattctgaggggccacagtaattacaaacttactatccgccatcccatacattgggacagacctagttcaatgaatctgaggaggctactcagtagacagtcccaccctcacacgattctttacctttcacttcatcttgcccttcattattgcagccctagcagcactccacctcctattcttgcacgaaacgggatcaaacaaccccctaggaatcacctcccattccgataaaatcaccttccacccttactacacaatcaaagacgccctcggcttacttctcttcattctctccttaatgacattaacactattctcaccagacctcctaggcgacccagacaattataccctagccaaccccttaaacacccctccccacatcaagcccgaatgatatttcctattcgcctacacaattctccgatccgtccctaacaagctaggaggcgtccttgccctattactatccatcctcatcctagcaataatccccatcctccatatatccaaacaacaaagcataatatttcgcccactaagccaatcactttattgactcctagccgcagacctcctcattctaacctgaatcggaggacaaccagtaagctacccttttaccatcattggacaagtagcatccgtactatacttcacaacaatcctaatcctaataccaactatctccctaattgaaaacaaaatactcaaatgggcctgtccttgtagtataaactaatacaccagtcttgtaaaccgaagatgaaaacctttttccaaggacaaatcagagaaaaagtctttaactccaccattagcacccaaagctaagattctaatttaaactattctctgttctttcatggggaagcagatttgggtaccacccaagtattgactcacccatcaacaaccgctatgtatttcgtacattactgccagccaccatgaatattgtacggtaccataaatacttgaccacctgtagtacataaaaacccaatccacatcaaaaccccctccccatgcttacaagcaagtacagcaatcaaccctcaactatcacacatcaactgcaactccaaagccacccctcacccactaggataccaacaaacctacccacccttaacagtacatagtacataaagccatttaccgtacatagcacattacagtcaaatcccttctcgtccccatggatgacccccctcagataggggtcccttgaccaccatcctccgtgaaatcaatatcccgcacaagagtgctactctcctcgctccgggcccataacacttgggggtagctaaagtgaactgtatccgacatctggttcctacttcagggtcataaagcctaaatagcccacacgttccccttaaataagacatcacgatg

SEQ ID NO: 506 - DNA, 16569 bp, Homo sapiens mitochondrial
  3107: "n" refers to a nucleotide at position 3107 of the Cambridge Reference Sequence (CRS, Anderson et al. 1981 Nature 290:457-465), later determined to be absent from the human mtDNA sequence according to the revised CRS (rCRS, Andrews et al. 1999 Nature Genetics 23:147); "n" therefore represents a single nucleotide deletion at a position corresponding to nucleotide 3107 of SEQ ID NO:1 as provided herein.
gatcacaggtctatcaccctattaaccactcacgggagctctccatgcatttggtattttcgtctggggggtatgcacgcgatagcattgcgagacgctggagccggagcaccctatgtcgcagtatctgtctttgattcctgcctcatcctattatttatcgcacctacgttcaatattacaggcgaacatacttactaaagtgtgttaattaattaatgcttgtaggacataataataacaattgaatgtctgcacagccactttccacacagacatcataacaaaaaatttccaccaaaccccccctcccccgcttctggccacagcacttaaacacatctctgccaaaccccaaaaacaaagaaccctaacaccagcctaaccagatttcaaattttatcttttggcggtatgcacttttaacagtcaccccccaactaacacattattttcccctcccactcccatactactaatctcatcaatacaacccccgcccatcctacccagcacacacacaccgctgctaaccccataccccgaaccaaccaaaccccaaagacaccccccacagtttatgtagcttacctcctcaaagcaatacactgaaaatgtttagacgggctcacatcaccccataaacaaataggtttggtcctagcctttctattagctcttagtaagattacacatgcaagcatccccgttccagtgagttcaccctctaaatcaccacgatcaaaagggacaagcatcaagcacgcagcaatgcagctcaaaacgcttagcctagccacacccccacgggaaacagcagtgattaacctttagcaataaacgaaagtttaactaagctatactaaccccagggttggtcaatttcgtgccagccaccgcggtcacacgattaacccaagtcaatagaagccggcgtaaagagtgttttagatcaccccctccccaataaagctaaaactcacctgagttgtaaaaaactccagttgacacaaaatagactacgaaagtggctttaacatatctgaacacacaatagctaagacccaaactgggattagataccccactatgcttagccctaaacctcaacagttaaatcaacaaaactgctcgccagaacactacgagccacagcttaaaactcaaaggacctggcggtgcttcatatccctctagaggagcctgttctgtaatcgataaaccccgatcaacctcaccacctcttgctcagcctatataccgccatcttcagcaaaccctgatgaaggctacaaagtaagcgcaagtacccacgtaaagacgttaggtcaaggtgtagcccatgaggtggcaagaaatgggctacattttctaccccagaaaactacgatagcccttatgaaacttaagggtcgaaggtggatttagcagtaaactgagagtagagtgcttagttgaacagggccctgaagcgcgtacacaccgcccgtcaccctcctcaagtatacttcaaaggacatttaactaaaatccctacgcatttatatagaggagacaagtcgtaacatggtaagtgtactggaaagtgcacttggacgaaccagagtgtagcttaacacaaagcacccaacttacacttaggagatttcaacttaacttgaccgctctgagctaaacctagccccaaacccactccaccttactaccagacaaccttaaccaaaccatttacccaaataaagtataggcgatagaaattgaaacctggcgcaatagatatagtaccgcaagggaaagatgaaaaattataaccaagcataatatagcaaggactaacccctataccttctgcataatgaattaactagaaataactttgcaaggagagccaaagctaagacccccgaaaccagacgagctacctaagaacagctaaaagagcacacccgtctatgtagcaaaatagtgggaagatttataggtagaggcgacaaacctaccgagcctggtgatagctggttgtccaagatagaatcttagttcaactttaaatttgcccacagaaccctctaaatccccttgtaaatttaactgttagtccaaagaggaacagctctttggacactaggaaaaaaccttgtagagagagtaaaaaatttaacacccatagtaggcctaaaagcagccaccaattaagaaagcgttcaagctcaacacccactacctaaaaaatcccaaacatataactgaactcctcacacccaattggaccaatctatcaccctatagaagaactaatgttagtataagtaacatgaaaacattctcctccgcataagcctgcgtcagattaaaacactgaactgacaattaacagcccaatatctacaatcaaccaacaagtcattattaccctcactgtcaacccaacacaggcatgctcataaggaaaggttaaaaaaagtaaaaggaactcggcaaatcttaccccgcctgtttaccaaaaacatcacctctagcatcaccagtattagaggcaccgcctgcccagtgacacatgtttaacggccgcggtaccctaaccgtgcaaaggtagcataatcacttgttccttaaatagggacctgtatgaatggctccacgagggttcagctgtctcttacttttaaccagtgaaattgacctgcccgtgaagaggcgggcatgacacagcaagacgagaagaccctatggagctttaatttattaatgcaaacagtacctaacaaacccacaggtcctaaactaccaaacctgcattaaaaatttcggttggggcgacctcggagcagaacccaacctccgagcagtacatgctaagacttcaccagtcaaagcgaactactatactcaattgatccaataacttgaccaacggaacaagttaccctagggataacagcgcaatcctattctagagtccatatcaacaatagggtttacgacctcgatgttggatcaggacatcccgatggtgcagccgctattaaaggttcgtttgttcaacgattaaagtcctacgtgatctgagttcagaccggagtaatccaggtcggtttctatctacnttcaaattcctccctgtacgaaaggacaagagaaataaggcctacttcacaaagcgccttcccccgtaaatgatatcatctcaacttagtattatacccacacccacccaagaacagggtttgttaagatggcagagcccggtaatcgcataaaacttaaaactttacagtcagaggttcaattcctcttcttaacaacatacccatggccaacctcctactcctcattgtacccattctaatcgcaatggcattcctaatgcttaccgaacgaaaaattctaggctatatacaactacgcaaaggccccaacgttgtaggcccctacgggctactacagcccttcgctgacgccataaaactcttcaccaaagagcccctaaaacccgccacatctaccatcaccctctacatcaccgccccgaccttagctctcaccatcgctcttctactatgaacccccctccccatacccaaccccctggtcaacctcaacctaggcctcctatttattctagccacctctagcctagccgtttactcaatcctctgatcagggtgagcatcaaactcaaactacgccctgatcggcgcactgcgagcagtagcccaaacaatctcatatgaagtcaccctagccatcattctactatcaacattactaataagtggctcctttaacctctccacccttatcacaacacaagaacacctctgattactcctgccatcatgacccttggccataatatgatttatctccacactagcagagaccaaccgaacccccttcgaccttgccgaaggggagtccgaactagtctcaggcttcaacatcgaatacgccgcaggccccttcgccctattcttcatagccgaatacacaaacattattataataaacaccctcaccactacaatcttcctaggaacaacatatgacgcactctcccctgaactctacacaacatattttgtcaccaagaccctacttctaacctccctgttcttatgaattcgaacagcatacccccgattccgctacgaccaactcatacacctcctatgaaaaaacttcctaccactcaccctagcattacttatatgatatgtctccatacccattacaatctccagcattccccctcaaacctaagaaatatgtctgataaaagagttactttgatagagtaaataataggagcttaaacccccttatttctaggactatgagaatcgaacccatccctgagaatccaaaattctccgtgccacctatcacaccccatcctaaagtaaggtcagctaaataagctatcgggcccataccccgaaaatgttggttatacccttcccgtactaattaatcccctggcccaacccgtcatctactctaccatctttgcaggcacactcatcactgcgctaagctcgcactgattttttacctgagtaggcctagaaataaacatgctagcttttattccagttctaaccaaaaaaataaaccctcgttccacagaagctgccatcaagtatttcctcacgcaagcaaccgcatccataatccttctaatagctatcctcttcaacaatatactctccggacaatgaaccataaccaatactaccaatcaatactcatcattaataatcataatggctatagcaataaaactaggaatagccccctttcacttctgagtcccagaggttacccaaggcacccctctgacatccggcctgcttcttctcacatgacaaaaactagcccccatctcaatcatataccaaatctctccctcactaaacgtaagccttctcctcactctctcaatcttatccatcatagcaggcagttgaggtggattaaaccaaacccagctacgcaaaatcttagcatactcctcaattacccacataggatgaataatagcagttctaccgtacaaccctaacataaccattcttaatttaactatttatattatcctaactactaccgcattcctactactcaacttaaactccagcaccacgaccctactactatctcgcacctgaaacaagctaacatgactaacacccttaattccatccaccctcctctccctaggaggcctgcccccgctaaccggctttttgcccaaatgggccattatcgaagaattcacaaaaaacaatagcctcatcatccccaccatcatagccaccatcaccctccttaacctctacttctacctacgcctaatctactccacctcaatcacactactccccatatctaacaacgtaaaaataaaatgacagtttgaacatacaaaacccaccccattcctccccacactcatcgcccttaccacgctactcctacctatctccccttttatactaataatcttatagaaatttaggttaaatacagaccaagagccttcaaagccctcagtaagttgcaatacttaatttctgtaacagctaaggactgcaaaaccccactctgcatcaactgaacgcaaatcagccactttaattaagctaagcccttactagaccaatgggacttaaacccacaaacacttagttaacagctaagcaccctaatcaactggcttcaatctacttctcccgccgccgggaaaaaaggcgggagaagccccggcaggtttgaagctgcttcttcgaatttgcaattcaatatgaaaatcacctcggagctggtaaaaagaggcctaacccctgtctttagatttacagtccaatgcttcactcagccattttacctcacccccactgatgttcgccgaccgttgactattctctacaaaccacaaagacattggaacactatacctattattcggcgcatgagctggagtcctaggcacagctctaagcctccttattcgagccgagctgggccagccaggcaaccttctaggtaacgaccacatctacaacgttatcgtcacagcccatgcatttgtaataatcttcttcatagtaatacccatcataatcggaggctttggcaactgactagttcccctaataatcggtgcccccgatatggcgtttccccgcataaacaacataagcttctgactcttacctccctctctcctactcctgctcgcatctgctatagtggaggccggagcaggaacaggttgaacagtctaccctcccttagcagggaactactcccaccctggagcctccgtagacctaaccatcttctccttacacctagcaggtgtctcctctatcttaggggccatcaatttcatcacaacaattatcaatataaaaccccctgccataacccaataccaaacgcccctcttcgtctgatccgtcctaatcacagcagtcctacttctcctatctctcccagtcctagctgctggcatcactatactactaacagaccgcaacctcaacaccaccttcttcgaccccgccggaggaggagaccccattctataccaacacctattctgatttttcggtcaccctgaagtttatattcttatcctaccaggcttcggaataatctcccatattgtaacttactactccggaaaaaaagaaccatttggatacataggtatggtctgagctataatatcaattggcttcctagggtttatcgtgtgagcacaccatatatttacagtaggaatagacgtagacacacgagcatatttcacctccgctaccataatcatcgctatccccaccggcgtcaaagtatttagctgactcgccacactccacggaagcaatatgaaatgatctgctgcagtgctctgagccctaggattcatctttcttttcaccgtaggtggcctgactggcattgtattagcaaactcatcactagacatcgtactacacgacacgtactacgttgtagctcacttccactatgtcctatcaataggagctgtatttgccatcataggaggcttcattcactgatttcccctattctcaggctacaccctagaccaaacctacgccaaaatccatttcactatcatattcatcggcgtaaatctaactttcttcccacaacactttctcggcctatccggaatgccccgacgttactcggactaccccgatgcatacaccacatgaaacatcctatcatctgtaggctcattcatttctctaacagcagtaatattaataattttcatgatttgagaagccttcgcttcgaagcgaaaagtcctaatagtagaagaaccctccataaacctggagtgactatatggatgccccccaccctaccacacattcgaagaacccgtatacataaaatctagacaaaaaaggaaggaatcgaaccccccaaagctggtttcaagccaaccccatggcctccatgactttttcaaaaaggtattagaaaaaccatttcataactttgtcaaagttaaattataggctaaatcctatatatcttaatggcacatgcagcgcaagtaggtctacaagacgctacttcccctatcatagaagagcttatcacctttcatgatcacgccctcataatcattttccttatctgcttcctagtcctgtatgcccttttcctaacactcacaacaaaactaactaatactaacatctcagacgctcaggaaatagaaaccgtctgaactatcctgcccgccatcatcctagtcctcatcgccctcccatccctacgcatcctttacataacagacgaggtcaacgatccctcccttaccatcaaatcaattggccaccaatggtactgaacctacgagtacaccgactacggcggactaatcttcaactcctacatacttcccccattattcctagaaccaggcgacctgcgactccttgacgttgacaatcgagtagtactcccgattgaagcccccattcgtataataattacatcacaagacgtcttgcactcatgagctgtccccacattaggcttaaaaacagatgcaattcccggacgtctaaaccaaaccactttcaccgctacacgaccgggggtatactacggtcaatgctctgaaatctgtggagcaaaccacagtttcatgcccatcgtcctagaattaattcccctaaaaatctttgaaataggacccgtattcaccctatagcaccccctctaccccctctagagcccactgtaaagctaacttagcattaaccttttaagttaaagattaagagaaccaacacctctttacagtgaaatgccccaactaaatactaccgtatggcccaccataattacccccatactccttacactattcctcatcacccaactaaaaatattaaacacaaactaccacctacctccctcaccaaagcccataaaaataaaaaattataacaaaccctgagaaccaaaatgaacgaaaatctgttcgcttcattcattgcccccacaatcctaggcctacccgccgcagtactgatcattctatttccccctctatttatccccacctccaaatatctcatcaacaaccgactaatcaccacccaacaatgactaatcaaactaacctcaaaacaaatgataaccatacacaacactaaaggacgaacctgatctcttatactagtatccttaatcatttttattgccacaactaacctcctcggactcctgcctcactcatttacaccaaccacccaactatctataaacctagccatggccatccccttatgagcgggcgcagtgattataggctttcgctctaagattaaaaatgccctagcccacttcttaccacaaggcacacctacaccccttatccccatactagttattatcgaaaccatcagcctactcattcaaccaatagccctggccgtacgcctaaccgctaacattactgcaggccacctactcatgcacctaattggaagcgccaccctagcaatatcaaccattaaccttccctctacacttatcatcttcacaattctaattctactgactatcctagaaatcgctgtcgccttaatccaagcctacgttttcacacttctagtaagcctctacctgcacgacaacacataatgacccaccaatcacatgcctatcatatagtaaaacccagcccatgacccctaacaggggccctctcagccctcctaatgacctccggcctagccatgtgatttcacttccactccataacgctcctcatactaggcctactaaccaacacactaaccatataccaatgatggcgcgatgtaacacgagaaagcacataccaaggccaccacacaccacctgtccaaaaaggccttcgatacgggataatcctatttattacctcagaagtttttttcttcgcaggatttttctgagccttttaccactccagcctagcccctaccccccaattaggagggcactggcccccaacaggcatcaccccgctaaatcccctagaagtcccactcctaaacacatccgtattactcgcatcaggagtatcaatcacctgagctcaccatagtctaatagaaaacaaccgaaaccaaataattcaagcactgcttattacaattttactgggtctctattttaccctcctacaagcctcagagtacttcgagtctcccttcaccatttccgacggcatctacggctcaacattttttgtagccacaggcttccacggacttcacgtcattattggctcaactttcctcactatctgcttcatccgccaactaatatttcactttacatccaaacatcactttggcttcgaagccgccgcctgatactggcattttgtagatgtggtttgactatttctgtatatctccatctattgatgagggtcttactcttttagtataaatagtaccgttaacttccaattaactagctttgacaacattcaaaaaagagtaataaacttcgccttaattttaataatcaacaccctcctagccttactactaataattattacattttgactaccacaactcaacggctacatagaaaaatccaccccttacgagtgcggcttcgaccctatatcccccgcccgcgtccctttctccataaaattcttcttagtagctatcaccttcttattatttgatctagaaattgccctccttttacccctaccatgagccctacaaacaactaacctgccactaatagttatgtcatccctcttattaatcatcatcctagccctaagtctggcctatgagtgactacaaaaaggattagactgagccgaattggtatatagtttaaacaaaacgaatgatttcgactcattaaattatgataatcatatttaccaaatgcccctcatttacataaatattatactagcatttaccatctcacttctaggaatactagtatatcgctcacacctcatatcctccctactatgcctagaaggaataatactatcgctgttcattatagctactctcacaaccctcaacacccactccctcttagccaatattgtgcctattgccatactagtctttgccgcctgcgaagcagcggtgggcctagccctactagtctcaatctccaacacatatggcctagactacgtacataacctaaacctactccaatgctaaaactaatcgtcccaacaattatattactaccactgacatgactttccaaaaaacacataatttgaatcaacacaaccacccacagcctaattattagcatcatccctctactattttttaaccaaatcaacaacaacctatttagctgttccccaaccttttcctccgaccccctaacaacccccctcctaatactaactacctgactcctacccctcacaatcatggcaagccaacgccacttatccagtgaaccactatcacgaaaaaaactctacctctctatactaatctccctacaaatctccttaattataacattcacagccacagaactaatcatattttatatcttcttcgaaaccacacttatccccaccttggctatcatcacccgatgaggcaaccagccagaacgcctgaacgcaggcacatacttcctattctacaccctagtaggctcccttcccctactcatcgcactaatttacactcacaacaccctaggctcactaaacattctactactcactctcactgcccaagaactatcaaactcctgagccaacaacttaatatgactagcttacacaatagcttttatagtaaagatacctctttacggactccacttatgactccctaaagcccatgtcgaagcccccatcgctgggtcaatagtacttgccgcagtactcttaaaactaggcggctatggtataatacgcctcacactcattctcaaccccctgacaaaacacatagcctaccccttccttgtactatccctatgaggcataattataacaagctccatctgcctacgacaaacagacctaaaatcgctcattgcatactcttcaatcagccacatagccctcgtagtaacagccattctcatccaaaccccctgaagcttcaccggcgcagtcattctcataatcgcccacggacttacatcctcattactattctgcctagcaaactcaaactacgaacgcactcacagtcgcatcataatcctctctcaaggacttcaaactctactcccactaatagctttttgatgacttctagcaagcctcgctaacctcgccttaccccccactattaacctactgggagaactctctgtgctagtaaccacgttctcctgatcaaatatcactctcctacttacaggactcaacatactagtcacagccctatactccctctacatatttaccacaacacaatggggctcactcacccaccacattaacaacataaaaccctcattcacacgagaaaacaccctcatgttcatacacctatcccccattctcctcctatccctcaaccccgacatcattaccgggttttcctcttgtaaatatagtttaaccaaaacatcagattgtgaatctgacaacagaggcttacgaccccttatttaccgagaaagctcacaagaactgctaactcatgcccccatgtctaacaacatggctttctcaacttttaaaggataacagctatccattggtcttaggccccaaaaattttggtgcaactccaaataaaagtaataaccatgcacactactataaccaccctaaccctgacttccctaattccccccatccttaccaccctcgttaaccctaacaaaaaaaactcatacccccattatgtaaaatccattgtcgcatccacctttattatcagtctcttccccacaacaatattcatatgcctagaccaagaagttattatctcgaactgacactgagccacaacccaaacaacccagctctccctaagcttcaaactagactacttctccataatattcatccctgtagcattgttcgttacatggtccatcatagaattctcactgtgatatataaactcagacccaaacattaatcagttcttcaaatatctactcattttcctaattaccatactaatcttagttaccgctaacaacctattccaactgttcatcggctgagagggcgtaggaattatatccttcttgctcatcagttgatgatacgcccgagcagatgccaacacagcagccattcaagcaatcctatacaaccgcatcggcgatatcggtttcatcctcgccttagcatgatttatcctacactccaactcatgagacccacaacaaatagcccttctaaacgctaatccaagcctcaccccactactaggcctcctcctagcagcagcaggcaaatcagcccaattaggtctccacccctgactcccctcagccatagaaggccccaccccagtctcagccctactccactcaagcactatagttgtagcaggaatcttcttactcatccgcttccaccccctagcagaaaatagcccactaatccaaactctaacactatgcttaggcgctatcaccactctgttcgcagcagtctgcgcccttacacaaaatgacatcaaaaaaatcgtagccttctccacttcaagtcaactaggactcataatagttacaatcggcatcaaccaaccacacctagcattcctgcacatctgtacccacgccttcttcaaagccatactatttatgtgctccgggtccatcatccacaaccttaacaatgaacaagatattcgaaaaataggaggactactcaaaaccatacctctcacttcaacctccctcaccattggcagcctagcattagcaggaatacctttcctcacaggtttctactccaaagaccacatcatcgaaaccgcaaacatatcatacacaaacgcctgagccctatctattactctcatcgctacctccctgacaagcgcctatagcactcgaataattcttctcaccctaacaggtcaacctcgcttccccacccttactaacattaacgaaaataaccccaccctactaaaccccattaaacgcctggcagccggaagcctattcgcaggatttctcattactaacaacatttcccccgcatcccccttccaaacaacagtccccctctacctaaaactcacagccctcgctgtcactttcctaggacttctaacagccctagacctcaactacctaaccaacaaacttaaaataaaatccccactatgcacattttatttctccaacatactcggattctaccctagcatcacacaccgcacaatcccctatctaggccttcttacgagccaaaacctgcccctactcctcctagacctaacctgactagaaaagctattacctaaaacaatttcacagcaccaaatctccacctccatcatcacctcaacccaaaaaggcataattaaactttacttcctctctttcttcttcccactcatcctaaccctactcctaatcacataacctattcccccgagcaatctcaattacaatatatacaccaacaaacaatgttcaaccagtaactactactaatcaacgcccataatcatacaaagcccccgcaccaataggatcctcccgaatcaaccctgacccctctccttcataaattattcagcttcctacactattaaagtttaccacaaccaccaccccatcatactctttcacccacagcaccaatcctacctccatcgctaaccccactaaaacactcaccaagacctcaacccctgacccccatgcctcaggatactcctcaatagccatcgctgtagtatatccaaagacaaccatcattccccctaaataaattaaaaaaactattaaacccatataacctcccccaaaattcagaataataacacacccgaccacaccgctaacaatcaatactaaacccccataaataggagaaggcttagaagaaaaccccacaaaccccattactaaacccacactcaacagaaacaaagcatacatcattattctcgcacggactacaaccacgaccaatgatatgaaaaaccatcgttgtatttcaactacaagaacaccaatgaccccaatacgcaaaattaaccccctaataaaattaattaaccactcattcatcgacctccccaccccatccaacatctccgcatgatgaaacttcggctcactccttggcgcctgcctgatcctccaaatcaccacaggactattcctagccatgcactactcaccagacgcctcaaccgccttttcatcaatcgcccacatcactcgagacgtaaattatggctgaatcatccgctaccttcacgccaatggcgcctcaatattctttatctgcctcttcctacacatcggacgaggcctatattacggatcatttctctactcagaaacctgaaacatcggcattatcctcctgcttgcaactatagcaacagccttcataggctatgtcctcccgtgaggccaaatatcattctgaggggccacagtaattacaaacttactatccgccatcccatacattgggacagacctagttcaatgaatctgaggaggctactcagtagacagtcccaccctcacacgattctttacctttcacttcatcttgcccttcattattgcagccctagcagcactccacctcctattcttgcacgaaacgggatcaaacaaccccctaggaatcacctcccattccgataaaatcaccttccacccttactacacaatcaaagacgccctcggcttacttctcttccttctctccttaatgacattaacactattctcaccagacctcctaggcgacccagacaattataccctagccaaccccttaaacacccctccccacatcaagcccgaatgatatttcctattcgcctacacaattcttcgatccgtccctaacaaactaggaggcgtccttgccctattactatccatcctcatcctagcaataatccccatcctccatatatccaaacaacaaagcataatatttcgcccactaagccaatcactttattgactcctagccgcagacctcctcattctaacctgaatcggaggacaaccagtaagctacccttttaccatcattggacaagtagcatccgtactatacttcacaacaatcctaatcctaataccaactatctccctaattgaaaacaaaatactcaaatgggcctgtccttgtagtataaactaatacaccagtcttgtaaaccggagatgaaaacctttttccaaggacaaatcagagaaaaagtctttaactccaccattagcacccaaagctaagattctaatttaaactattctctgttctttcatggggaagcagatttgggtaccacccaagtattgactcacccatcaacaaccgctatgtatttcgtacattactgccagccaccatgaatattgtacggtaccataaatacttgaccacctgtagtacataaaaacccaatccacatcaaaaccccctccccatgcttacaagcaagtacagcaatcaaccctcaactatcacacatcaactgcaactccaaagccacccctcacccactaggataccaacaaacctacccacccttaacagtacatagtacataaagccatttaccgtacatagcacattacagtcaaatcccttctcgtccccatggatgacccccctcagataggggtcccttgaccaccatcctccgtgaaatcaatatcccgcacaagagtgctactctcctcgctccgggcccataacacttgggggtagctaaagtgaactgtatccgacatctggttcctacttcagggtcataaagcctaaatagcccacacgttccccttaaataagacatcacgatg

SEQ ID NO: 507 - DNA, 16569 bp, Homo sapiens mitochondrial
  3107: "n" refers to a nucleotide at position 3107 of the Cambridge Reference Sequence (CRS, Anderson et al. 1981 Nature 290:457-465), later determined to be absent from the human mtDNA sequence according to the revised CRS (rCRS, Andrews et al. 1999 Nature Genetics 23:147); "n" therefore represents a single nucleotide deletion at a position corresponding to nucleotide 3107 of SEQ ID NO:1 as provided herein.
gatcacaggtctatcaccctattaaccactcacgggagctctccatgcatttggtattttcgtctggggggtatgcacgcgatagcattgcgagacgctggagccggagcaccctatgtcgcagtatctgtctttgattcctgcctcatcctattatttatcgcacctacgttcaatattacaggcgaacatacttactaaagtgtgttaattaattaatgcttgtaggacataataataacaattgaatgtctgcacagccactttccacacagacatcataacaaaaaatttccaccaaaccccccctcccccgcttctggccacagcacttaaacacatctctgccaaaccccaaaaacaaagaaccctaacaccagcctaaccagatttcaaattttatcttttggcggtatgcacttttaacagtcaccccccaactaacacattattttcccctcccactcccatactactaatctcatcaatacaacccccgcccatcctacccagcacacacacaccgctgctaaccccataccccgaaccaaccaaaccccaaagacaccccccacagtttatgtagcttacctcctcaaagcaatacactgaaaatgtttagacgggctcacatcaccccataaacaaataggtttggtcctagcctttctattagctcttagtaagattacacatgcaagcatccccgttccagtgagttcaccctctaaatcaccacgatcaaaagggacaagcatcaagcacgcagcaatgcagctcaaaacgcttagcctagccacacccccacgggaaacagcagtgattaacctttagcaataaacgaaagtttaactaagctatactaaccccagggttggtcaatttcgtgccagccaccgcggtcacacgattaacccaagtcaatagaagccggcgtaaagagtgttttagatcaccccctccccaataaagctaaaactcacctgagttgtaaaaaactccagttgacacaaaatagactacgaaagtggctttaacatatctgaacacacaatagctaagacccaaactgggattagataccccactatgcttagccctaaacctcaacagttaaatcaacaaaactgctcgccagaacactacgagccacagcttaaaactcaaaggacctggcggtgcttcatatccctctagaggagcctgttctgtaatcgataaaccccgatcaacctcaccacctcttgctcagcctatataccgccatcttcagcaaaccctgatgaaggctacaaagtaagcgcaagtacccacgtaaagacgttaggtcaaggtgtagcccatgaggtggcaagaaatgggctacattttctaccccagaaaactacgatagcccttatgaaacttaagggtcgaaggtggatttagcagtaaactgagagtagagtgcttagttgaacagggccctgaagcgcgtacacaccgcccgtcaccctcctcaagtatacttcaaaggacatttaactaaaacccctacgcatttatatagaggagacaagtcgtaacatggtaagtgtactggaaagtgcacttggacgaaccagagtgtagcttaacacaaagcacccaacttacacttaggagatttcaacttaacttgaccgctctgagctaaacctagccccaaacccactccaccttactaccagacaaccttagccaaaccatttacccaaataaagtataggcgatagaaattgaaacctggcgcaatagatatagtaccgcaagggaaagatgaaaaattataaccaagcataatatagcaaggactaacccctataccttctgcataatgaattaactagaaataactttgcaaggagagccaaagctaagacccccgaaaccagacgagctacctaagaacagctaaaagagcacacccgtctatgtagcaaaatagtgggaagatttataggtagaggcgacaaacctaccgagcctggtgatagctggttgtccaagatagaatcttagttcaactttaaatttgcccacagaaccctctaaatccccttgtaaatttaactgttagtccaaagaggaacagctctttggacactaggaaaaaaccttgtagagagagtaaaaaatttaacacccatagtaggcctaaaagcagccaccaattaagaaagcgttcaagctcaacacccactacctaaaaaatcccaaacatataactgaactcctcacacccaattggaccaatctatcaccctatagaagaactaatgttagtataagtaacatgaaaacattctcctccgcataagcctgcgtcagattaaaacactgaactgacaattaacagcccaatatctacaatcaaccaacaagtcattattaccctcactgtcaacccaacacaggcatgctcataaggaaaggttaaaaaaagtaaaaggaactcggcaaatcttaccccgcctgtttaccaaaaacatcacctctagcatcaccagtattagaggcaccgcctgcccagtgacacatgtttaacggccgcggtaccctaaccgtgcaaaggtagcataatcacttgttccttaaatagggacctgtatgaatggctccacgagggttcagctgtctcttacttttaaccagtgaaattgacctgcccgtgaagaggcgggcataacacagcaagacgagaagaccctatggagctttaatttattaatgcaaacagtacctaacaaacccacaggtcctaaactaccaaacctgcattaaaaatttcggttggggcgacctcggagcagaacccaacctccgagcagtacatgctaagacttcaccagtcaaagcgaactactatactcaattgatccaataacttgaccaacggaacaagttaccctagggataacagcgcaatcctattctagagtccatatcaacaatagggtttacgacctcgatgttggatcaggacatcccaatggtgcagccgctattaaaggttcgtttgttcaacgattaaagtcctacgtgatctgagttcagaccggagtaatccaggtcggtttctatctacnttcaaattcctccctgtacgaaaggacaagagaaataaggcctacttcacaaagcgccttcccccgtaaatgatatcatctcaacttagtattatacccacacccacccaagaacagggtttgttaagatggcagagcccggtaatcgcataaaacttaaaactttacagtcagaggttcaattcctcttcttaacaacatacccatggccaacctcctactcctcattgtacccattctaatcgcaatggcattcctaatgcttaccgaacgaaaaattctaggctatatacaactacgcaaaggccccaacgttgtaggcccctacgggctactacaacccttcgctgacgccataaaactcttcaccaaagagcccctaaaacccgccacatctaccatcaccctctacatcaccgccccgaccttagctctcaccatcgctcttctactatgaacccccctccccatacccaaccccctggtcaacctcaacctaggcctcctatttattctagccacctctagcctagccgtttactcaatcctctgatcagggtgagcatcaaactcaaactacgccctgatcggcgcactgcgagcagtagcccaaacaatctcatatgaagtcaccctagccatcattctactatcaacattactaataagtggctcctttaacctctccacccttatcacaacacaagaacacctctgattactcctgccatcatgacccttggccataatatgatttatctccacactagcagagaccaaccgaacccccttcgaccttgccgaaggggagtccgaactagtctcaggcttcaacatcgaatacgccgcaggccccttcgccctattcttcatagccgaatacacaaacattattataataaacaccctcaccactacaatcttcctaggaacaacatatgacgcactctcccctgaactctacacaacatattttgtcaccaagaccctacttctaacctccctgttcttatgaattcgaacagcatacccccgattccgctacgaccaactcatacacctcctatgaaaaaacttcctaccactcaccctagcattacttatatgatatgtctccatacccattacaatctccagcattccccctcaaacctaagaaatatgtctgataaaagagttactttgatagagtaaataataggagcttaaacccccttatttctaggactatgagaatcgaacccatccctgagaatccaaaattctccgtgccacctatcacaccccatcctaaagtaaggtcagctaaataagctatcgggcccataccccgaaaatgttggttatacccttcccgtactaattaatcccctggcccaacccgtcatctactctaccatctttgcaggcacactcatcacagcgctaagctcgcactgattttttacctgagtaggcctagaaataaacatgctagcttttattccagttctaaccaaaaaaataaaccctcgttccacagaagctgccatcaagtatttcctcacgcaagcaaccgcatccataatccttctaatagctatcctcttcaacaatatactctccggacaatgaaccataaccaatactaccaatcaatactcatcattaataatcataatggctatagcaataaaactaggaatagccccctttcacttctgagtcccagaggttacccaaggcacccctctgacatccggcctgcttcttctcacatgacaaaaactagcccccatctcaatcatataccaaatctctccctcactaaacgtaagccttctcctcactctctcaatcttatccatcatagcaggcagttgaggtggattaaaccaaacccagctacgcaaaatcttagcatactcctcaattacccacataggatgaataatagcagttctaccgtacaaccctaacataaccattcttaatttaactatttatattatcctaactactaccgcattcctactactcaacttaaactccagcaccacgaccctactactatctcgcacctgaaacaagctaacatgactaacacccttaattccatccaccctcctctccctaggaggcctgcccccgctaaccggctttttgcccaaatgggccattatcgaagaattcacaaaaaacaatagcctcatcatccccaccatcatagccaccatcaccctccttaacctctacttctacctacgcctaatctactccacctcaatcacactactccccatatctaacaacgtaaaaataaaatgacagtttgaacatacaaaacccaccccattcctccccacactcatcgcccttaccacgctactcctacctatctccccttttatactaataatcttatagaaatttaggttaaatacagaccaagagccttcaaagccctcagtaagttgcaatacttaatttctgtaacagctaaggactgcaaaaccccactctgcatcaactgaacgcaaatcagccactttaattaagctaagcccttactagaccaatgggacttaaacccacaaacacttagttaacagctaagcaccctaatcaactggcttcaatctacttctcccgccgccgggaaaaaaggcgggagaagccccggcaggtttgaagctgcttcttcgaatttgcaattcaatatgaaaatcacctcggagctggtaaaaagaggcctaacccctgtctttagatttacagtccaatgcttcactcagccattttacctcacccccactgatgttcgccgaccgttgactattctctacaaaccacaaagacattggaacactatacctattattcggcgcatgagctggagtcctaggcacagctctaagcctccttattcgagccgagctgggccagccaggcaaccttctaggtaacgaccacatctacaacgttatcgtcacagcccatgcatttgtaataatcttcttcatagtaatacccatcataatcggaggctttggcaactgactagttcccctaataatcggtgcccccgatatggcgtttccccgcataaacaacataagcttctgactcttacctccctctctcctactcctgctcgcatctgctatagtggaggccggagcaggaacaggttgaacagtctaccctcccttagcagggaactactcccaccctggagcctccgtagacctaaccatcttctccttacacctagcaggtgtctcctctatcttaggggccatcaatttcatcacaacaattatcaatataaaaccccctgccataacccaataccaaacgcccctcttcgtctgatccgtcctaatcacagcagtcctacttctcctatctctcccagtcctagctgctggcatcactatactactaacagaccgcaacctcaacaccaccttcttcgaccccgccggaggaggagaccccattctataccaacacctattctgatttttcggtcaccctgaagtttatattcttatcctaccaggcttcggaataatctcccatattgtaacttactactccggaaaaaaagaaccatttggatacataggtatggtctgagctatgatatcaattggcttcctagggtttatcgtgtgagcacaccatatatttacagtaggaatagacgtagacacacgagcatatttcacctccgctaccataatcatcgctatccccaccggcgtcaaagtatttagctgactcgccacactccacggaagcaatatgaaatgatctgctgcagtgctctgagccctaggattcatctttcttttcaccgtaggtggcctgactggcattgtattagcaaactcatcactagacatcgtactacacgacacgtactacgttgtagcccacttccactatgtcctatcaataggagctgtatttgccatcataggaggcttcattcactgatttcccctattctcaggctacaccctagaccaaacctacgccaaaatccatttcactatcatattcatcggcgtaaatctaactttcttcccacaacactttctcggcctatccggaatgccccgacgttactcggactaccccgatgcatacaccacatgaaacatcctatcatctgtaggctcattcatttctctaacagcagtaatattaataattttcatgatttgagaagccttcgcttcgaagcgaaaagtcctaatagtagaagaaccctccataaacctggagtgactatatggatgccccccaccctaccacacattcgaagaacccgtatacataaaatctagacaaaaaaggaaggaatcgaaccccccaaagctggtttcaagccaaccccatggcctccatgactttttcaaaaaggtattagaaaaaccatttcataactttgtcaaagttaaattataggctaaatcctatatatcttaatggcacatgcagcgcaagtaggtctacaagacgctacttcccctatcatagaagagcttatcacctttcatgatcacgccctcataatcattttccttatctgcttcctagtcctgtatgcccttttcctaacactcacaacaaaactaactaatactaacatctcagacgctcaggaaatagaaaccgtctgaactatcctgcccgccatcatcctagtcctcatcgccctcccatccctacgcatcctttacataacagacgaggtcaacgatccctcccttaccatcaaatcaattggccaccaatggtactgaacctacgagtacaccgactacggcggactaatcttcaactcctacatacttcccccattattcctagaaccaggcgacctgcgactccttgacgttgacaatcgagtagtactcccgattgaagcccccattcgtataataattacatcacaagacgtcttgcactcatgagctgtccccacattaggcttaaaaacagatgcaattcccggacgtctaaaccaaaccactttcaccgctacacgaccgggggtatactacggtcaatgctctgaaatctgtggagcaaaccacagtttcatgcccatcgtcctagaattaattcccctaaaaatctttgaaatagggcccgtatttaccctatagcaccccctctaccccctctagagcccactgtaaagctaacttagcattaaccttttaagttaaagattaagagaaccaacacctctttacagtgaaatgccccaactaaatactaccgtatggcccaccataattacccccatactccttacactattcctcatcacccaactaaaaatattaaacacaaactaccacctacctccctcaccaaagcccataaaaataaaaaattataacaaaccctgagaaccaaaatgaacgaaaatctgttcgcttcattcattgcccccacaatcctaggcctacccgccgcagtactgatcattctatttccccctctattgatccccacctccaaatatctcatcaacaaccgactaatcaccacccaacaatgactaatcaaactaacctcaaaacaaatgataaccatacacaacactaaaggacgaacctgatctcttatactagtatccttaatcatttttattgccacaactaacctcctcggactcctgcctcactcatttacaccaaccacccaactatctataaacctagccatggccatccccttatgagcgggcgcagtgattataggctttcgctctaagattaaaaatgccctagcccacttcttaccacaaggcacacctacaccccttatccccatactagttattatcgaaaccatcagcctactcattcaaccaatagccctggccgtacgcctaaccgctaacattactgcaggccacctactcatgcacctaattggaagcgccaccctagcaatatcaaccattaaccttccctctacacttatcatcttcacaattctaattctactgactatcctagaaatcgctgtcgccttaatccaagcctacgttttcacacttctagtaagcctctacctgcacgacaacacataatgacccaccaatcacatgcctatcatatagtaaaacccagcccatgacccctaacaggggccctctcagccctcctaatgacctccggcctagccatgtgatttcacttccactccataacgctcctcatactaggcctactaaccaacacactaaccatataccaatgatggcgcgatgtaacacgagaaagcacataccaaggccaccacacaccacctgtccaaaaaggccttcgatacgggataatcctatttattacctcagaagtttttttcttcgcaggatttttctgagccttttaccactccagcctagcccctaccccccaattaggagggcactggcccccaacaggcatcaccccgctaaatcccctagaagtcccactcctaaacacatccgtattactcgcatcaggagtatcaatcacctgagctcaccatagtctaatagaaaacaaccgaaaccaaataattcaagcactgcttattacaattttactgggtctctattttaccctcctacaagcctcagagtacttcgagtctcccttcaccatttccgacggcatctacggctcaacattttttgtagccacaggcttccacggacttcacgtcattattggctcaactttcctcactatctgcttcatccgccaactaatatttcactttacatccaaacatcactttggcttcgaagccgccgcctgatactggcattttgtagatgtggtttgactatttctgtatgtctccatctattgatgagggtcttactcttttagtataaatagtaccgttaacttccaattaactagttttgacaacattcaaaaaagagtaataaacttcgccttaattttaataatcaacaccctcctagccttactactaataattattacattttgactaccacaactcaacggctacatagaaaaatccaccccttacgagtgcggcttcgaccctatatcccccgcccgcgtccctttctccataaaattcttcttagtagctattaccttcttattatttgatctagaaattgccctccttttacccctaccatgagccctacaaacaactaacctgccactaatagttatgtcatccctcttattaatcatcatcctagccctaagtctggcctatgagtgactacaaaaaggattagactgaaccgaattggtatatagtttaaacaaaacgaatgatttcgactcattaaattatgataatcatatttaccaaatgcccctcatttacataaatattatactagcatttaccatctcacttctaggaatactagtatatcgctcacacctcatatcctccctactatgcctagaaggaataatactatcgctgttcattatagctactctcataaccctcaacacccactccctcttagccaatattgtgcctattgccatactagtctttgccgcctgcgaagcagcggtgggcctagccctactagtctcaatctccaacacatatggcctagactacgtacataacctaaacctactccaatgctaaaactaatcgtcccaacaattatattactaccactgacatgactttccaaaaaacacataatttgaatcaacacaaccacccacagcctaattattagcatcatccctctactattttttaaccaaatcaacaacaacctatttagctgttccccaaccttttcctccgaccccctaacaacccccctcctaatactaactacctgactcctacccctcacaatcatggcaagccaacgccacttatccagtgaaccactatcacgaaaaaaactctacctctctatactaatctccctacaaatctccttaattataacattcacagccacagaactaatcatattttatatcttcttcgaaaccacacttatccccaccttggctatcatcacccgatgaggcaaccagccagaacgcctgaacgcaggcacatacttcctattctacaccctagtaggctcccttcccctactcatcgcactaatttacactcacaacaccctaggctcactaaacattctactactcactctcactgcccaagaactatcaaactcctgagccaacaacttaatatgactagcttacacaatagcttttatagtaaagatacctctttacggactccacttatgactccctaaagcccatgtcgaagcccccatcgctgggtcaatagtacttgccgcagtactcttaaaactaggcggctatggtataatacgcctcacactcattctcaaccccctgacaaaacacatagcctaccccttccttgtactatccctatgaggcataattataacaagctccatctgcctacgacaaacagacctaaaatcgctcattgcatactcttcaatcagccacatagccctcgtagtaacagccattctcatccaaaccccctgaagcttcaccggcgcagtcattctcataatcgcccacgggcttacatcctcattactattctgcctagcaaactcaaactacgaacgcactcacagtcgcatcataatcctctctcaaggacttcaaactctactcccactaatagctttttgatgacttctagcaagcctcgctaacctcgccttaccccccactattaacctactgggagaactctctgtgctagtaaccacgttctcctgatcaaatatcactctcctacttacaggactcaacatactagtcacagccctatactccctctacatatttaccacaacacaatggggctcactcacccaccacattaacaacataaaaccctcattcacacgagaaaacaccctcatgttcatacacctatcccccattctcctcctatccctcaaccccgacatcattaccgggttttcctcttgtaaatatagtttaaccaaaacatcagattgtgaatctgacaacagaggcttacgaccccttatttaccgagaaagctcacaagaactgctaactcatgcccccatgtctaacaacatggctttctcaacttttaaaggataacagctatccattggtcttaggccccaaaaattttggtgcaactccaaataaaagtaataaccatgcacactactataaccaccctaaccctgacttccctaattccccccatccttaccaccctcgttaaccctaacaaaaaaaactcatacccccattatgtaaaatccattgtcgcatccacctttattatcagtctcttccccacaacaatattcatgtgcctagaccaagaagttattatctcgaactgacactgagccacaacccaaacaacccagctctccctaagcttcaaactagactacttctccataatattcatccctgtagcattgttcgttacatggtccatcatagaattctcactgtgatatataaactcagacccaaacattaatcagttcttcaaatatctactcatcttcctaattaccatactaatcttagttaccgctaacaacctattccaactgttcatcggctgagagggcgtaggaattatatccttcttgctcatcagttgatgatacgcccgagcagatgccaacacagcagccattcaagcaatcctatacaaccgtatcggcgatatcggtttcatcctcgccttagcatgatttatcctacactccaactcatgagacccacaacaaatagcccttctaaacgctaatccaagcctcaccccactactaggcctcctcctagcagcagcaggcaaatcagcccaattaggtctccacccctgactcccctcagccatagaaggccccaccccagtctcagccctactccactcaagcactatagttgtagcaggaatcttcttactcatccgcttccaccccctagcagaaaatagcccactaatccaaactctaacactatgcttaggcgctatcaccactctgttcgcagcagtctgcgcccttacacaaaatgacatcaaaaaaatcgtagccttctccacttcaagtcaactaggactcataatagttacaatcggcatcaaccaaccacacctagcattcctgcacatctgtacccacgccttcttcaaagccatactatttatgtgctccgggtccatcatccacaaccttaacaatgaacaagatattcgaaaaataggaggactactcaaaaccatacctctcacttcaacctccctcaccattggcagcctagcattagcaggaatacctttcctcacaggtttctactccaaagaccacatcatcgaaaccgcaaacatatcatacacaaacgcctgagccctatctattactctcatcgctacctccctgacaagcgcctatagcactcgaataattcttctcaccctaacaggtcaacctcgcttccccacccttactaacattaacgaaaataaccccaccctactaaaccccattaaacgcctggcagccggaagcctattcgcaggatttctcattactaacaacatttcccccgcatcccccttccaaacaacaatccccctctacctaaaactcacagccctcgctgtcactttcctaggacttctaacagccctagacctcaactacctaaccaacaaacttaaaataaaatccccactatgcacattttatttctccaacatactcggattctaccctagcatcacacaccgcacaatcccctatctaggccttcttacgagccaaaacctgcccctactcctcctagacctaacctgactagaaaagctattacctaaaacaatttcacagcaccaaatctccacctccatcatcacctcaacccaaaaaggcataattaaactttacttcctctctttcttcttcccactcatcctaaccctactcctaatcacataacctattcccccgagcaatctcaattacaatatatacaccaacaaacaatgttcaaccagtaactactactaatcaacgcccataatcatacaaagcccccgcaccaataggatcctcccgaatcaaccctgacccctctccttcataaattattcagcttcctacactattaaagtttaccacaaccaccaccccatcatactctttcacccacagcaccaatcctacctccatcgctaaccccactaaaacactcaccaagacctcaacccctgacccccatgcctcaggatactcctcaatagccatcgctgtagtatatccaaagacaaccatcattccccctaaataaattaaaaaaactattaaacccatataacctcccccaaaattcagaataataacacacccgaccacaccgctaacaatcaatactaaacccccataaataggagaaggcttagaagaaaaccccacaaaccccattactaaacccacactcaacagaaacaaagcatacatcattattctcgcacggactacaaccacgaccaatgatatgaaaaaccatcgttgtatttcaactacaagaacaccaatgaccccaatacgcaaaactaaccccctaataaaattaattaaccactcattcatcgacctccccaccccatccaacatctccgcatgatgaaacttcggctcactccttggcgcctgcctgatcctccaaatcaccacaggactattcctagccatgcactactcaccagacgcctcaaccgccttttcatcaatcgcccacatcactcgagacgtaaattatggctgaatcatccgctaccttcacgccaatggcgcctcaatattctttatctgcctcttcctacacatcgggcgaggcctatattacggatcatttctctactcagaaacctgaaacatcggcattatcctcctgcttgcaactatagcaacagccttcataggctatgtcctcccgtgaggccaaatatcattctgaggggccacagtaattacaaacttactatccgccatcccatacattgggacagacctagttcaatgaatctgaggaggctactcagtagacagtcccaccctcacacgattctttacctttcacttcatcttgcccttcattattgcagccctagcagcactccacctcctattcttgcacgaaacgggatcaaacaaccccctaggaatcacctcccattccgataaaatcaccttccacccttactacacaatcaaagacgccctcggcttacttctcttccttctctccttaatgacattaacactattctcaccagacctcctaggcgacccagacaattataccctagccaaccccttaaacacccctccccacatcaagcccgaatgatatttcctattcgcctacacaattctccgatccgtccctaacaaactaggaggcgtccttgccctattactatccatcctcatcctagcaataatccccatcctccatatatccaaacaacaaagcataatatttcgcccactaagccaatcactttattgactcctagccgcagacctcctcattctaacctgaatcggaggacaaccagtaagctacccttttaccatcattggacaagtagcatccgtactatacttcacaacaatcctaatcctaataccaactatctccctaattgaaaacaaaatactcaaatgggcctgtccttgtagtataaactaatacaccagtcttgtaaaccggagatgaaaacctttttccaaggacaaatcagagaaaaagtctttaactccaccattagcacccaaagctaagattctaatttaaactattctctgttctttcatggggaagcagatttgggtaccacccaagtattgactcacccatcaacaaccgctatgtatttcgtacattactgccagccaccatgaatattgtacggtaccataaatacttgaccacctgtagtacataaaaacccaatccacatcaaaaccccctccccatgcttacaagcaagtacagcaatcaaccctcaactatcacacatcaactgcaactccaaagccacccctcacccactaggataccaacaaacctacccacccttaacagtacatagtacataaagccatttaccgtacatagcacattacagtcaaatcccttctcgtccccatggatgacccccctcagataggggtcccttgaccaccatcctccgtgaaatcaatatcccgcacaagagtgctactctcctcgctccgggcccataacacttgggggtagctaaagtgaactgtatccgacatctggttcctacttcagggtcataaagcctaaatagcccacacgttccccttaaataagacatcacgatg

SEQ ID NO: 508 - DNA, 16569 bp, Homo sapiens mitochondrial
  3107: "n" refers to a nucleotide at position 3107 of the Cambridge Reference Sequence (CRS, Anderson et al. 1981 Nature 290:457-465), later determined to be absent from the human mtDNA sequence according to the revised CRS (rCRS, Andrews et al. 1999 Nature Genetics 23:147); "n" therefore represents a single nucleotide deletion at a position corresponding to nucleotide 3107 of SEQ ID NO:1 as provided herein.
gatcacaggtctatcaccctattaaccactcacgggagctctccatgcatttggtattttcgtctggggggtatgcacgcgatagcattgcgagacgctggagccggagcaccctatgtcgcagtatctgtctttgattcctgcctcatcctattatttatcgcacctacgttcaatattacaggcgaacatacttactaaagtgtgttaattaattaatgcttgtaggacataataataacaattgaatgtctgcacagccactttccacacagacatcataacaaaaaatttccaccaaaccccccctcccccgcttctggccacagcacttaaacacatctctgccaaaccccaaaaacaaagaaccctaacaccagcctaaccagatttcaaattttatcttttggcggtatgcacttttaacagtcaccccccaactaacacattattttcccctcccactcccatactactaatctcatcaatacaacccccgcccatcctacccagcacacacacaccgctgctaaccccataccccgaaccaaccaaaccccaaagacaccccccacagtttatgtagcttacctcctcaaagcaatacactgaaaatgtttagacgggctcacatcaccccataaacaaataggtttggtcctagcctttctattagctcttagtaagattacacatgcaagcatccccgttccagtgagttcaccctctaaatcaccacgatcaaaagggacaagcatcaagcacgcagcaatgcagctcaaaacgcttagcctagccacacccccacgggaaacagcagtgattaacctttagcaataaacgaaagtttaactaagctatactaaccccagggttggtcaatttcgtgccagccaccgcggtcacacgattaacccaagtcaatagaagccggcgtaaagagtgttttagatcaccccctccccaataaagctaaaactcacctgagttgtaaaaaactccagttgacacaaaatagactacgaaagtggctttaacatatctgaacacacaatagctaagacccaaactgggattagataccccactatgcttagccctaaacctcaacagttaaatcaacaaaactgctcgccagaacactacgagccacagcttaaaactcaaaggacctggcggtgcttcatatccctctagaggagcctgttctgtaatcgataaaccccgatcaacctcaccacctcttgctcagcctatataccgccatcttcagcaaaccctgatgaaggctacaaagtaagcgcaagtacccacgtaaagacgttaggtcaaggtgtagcccatgaggtggcaagaaatgggctacattttctaccccagaaaactacgatagcccttatgaaacttaagggtcgaaggtggatttagcagtaaactgagagtagagtgcttagttgaacagggccctgaagcgcgtacacaccgcccgtcaccctcctcaagtatacttcaaaggacatttaactaaaacccctacgcatttatatagaggagacaagtcgtaacatggtaagtgtactggaaagtgcacttggacgaaccagagtgtagcttaacacaaagcacccaacttacacttaggagatttcaacttaacttgaccgctctgagctaaacctagccccaaacccactccaccttactaccagacaaccttagccaaaccatttacccaaataaagtataggcgatagaaattgaaacctggcgcaatagatatagtaccgcaagggaaagatgaaaaattataaccaagcataatatagcaaggactaacccctataccttctgcataatgaattaactagaaataactttgcaaggagagccaaagctaagacccccgaaaccagacgagctacctaagaacagctaaaagagcacacccgtctatgtagcaaaatagtgggaagatttataggtagaggcgacaaacctaccgagcctggtgatagctggttgtccaagatagaatcttagttcaactttaaatttgcccacagaaccctctaaatccccttgtaaatttaactgttagtccaaagaggaacagctctttggacactaggaaaaaaccttgtagagagagtaaaaaatttaacacccatagtaggcctaaaagcagccaccaattaagaaagcgttcaagctcaacacccactacctaaaaaatcccaaacatataactgaactcctcacacccaattggaccaatctatcaccctatagaagaactaatgttagtataagtaacatgaaaacattctcctccgcataagcctgcgtcagattaaaacactgaactgacaattaacagcccaatatctacaatcaaccaacaagtcattattaccctcactgtcaacccaacacaggcatgctcataaggaaaggttaaaaaaagtaaaaggaactcggcaaatcttaccccgcctgtttaccaaaaacatcacctctagcatcaccagtattagaggcaccgcctgcccagtgacacatgtttaacggccgcggtaccctaaccgtgcaaaggtagcataatcacttgttccttaaatagggacctgtatgaatggctccacgagggttcagctgtctcttacttttaaccagtgaaattgacctgcccgtgaagaggcgggcataacacagcaagacgagaagaccctatggagctttaatttattaatgcaaacagtacctaacaaacccacaggtcctaaactaccaaacctgcattaaaaatttcggttggggcgacctcggagcagaacccaacctccgagcagtacatgctaagacttcaccagtcaaagcgaactactatactcaattgatccaataacttgaccaacggaacaagttaccctagggataacagcgcaatcctattctagagtccatatcaacaatagggtttacgacctcgatgttggatcaggacatcccgatggtgcagccgctattaaaggttcgtttgttcaacgattaaagtcctacgtgatctgagttcagaccggagtaatccaggtcggtttctatctacnttcaaattcctccctgtacgaaaggacaagagaaataaggcctacttcacaaagcgccttcccccgtaaatgatatcatctcaacttagtattatacccacacccacccaagaacagggtttgttaagatggcagagcccggtaatcgcataaaacttaaaactttacagtcagaggttcaattcctcttcttaacaacatacccatggccaacctcctactcctcattgtacccattctaatcgcaatggcattcctaatgcttaccgaacgaaaaattctaggctatatacaactacgcaaaggccccaacgttgtaggcccctacgggctactacaacccttcgctgacgccataaaactcttcaccaaagagcccctaaaacccgccacatctaccatcaccctctacatcaccgccccgaccttagctctcaccatcgctcttctactatgaacccccctccccatacccaaccccctggtcaacctcaacctaggcctcctatttattctagccacctctagcctagccgtttactcaatcctctgatcagggtgagcatcaaactcaaactacgccctgatcggcgcactgcgagcagtagcccaaacaatctcatatgaagtcaccctagccatcattctactatcaacattactaataagtggctcctttaacctctccacccttatcacaacacaagaacacctctgattactcctgccatcatgacccttggccataatatgatttatctccacactagcagagaccaaccgaacccccttcgaccttgccgaaggggagtccgaactagtctcaggcttcaacatcgaatacgccgcaggccccttcgccctattcttcatagccgaatacacaaacattattataataaacaccctcaccactacaatcttcctaggaacaacatatgacgcactctcccctgaactctacacaacatattttgtcaccaagaccctacttctaacctccctgttcttatgaattcgaacagcatacccccgattccgctacgaccaactcatacacctcctatgaaaaaacttcctaccactcaccctagcattacttatatgatatgtctccatacccattacaatctccagcattccccctcaaacctaagaaatatgtctgataaaagagttactttgatagagtaaataataggagcttaaacccccttatttctaggactatgagaatcgaacccatccctgagaatccaaaattctccgtgccacctatcacaccccatcctaaagtaaggtcagctaaataagctatcgggcccataccccgaaaatgttggttatacccttcccgtactaattaatcccctggcccaacccgtcatctactctaccatctttgcaggcacactcatcacagcgctaagctcgcactgattttttacctgagtaggcctagaaataaacatgctagcttttattccagttctaaccaaaaaaataaaccctcgttccacagaagctgccatcaagtatttcctcacgcaagcaaccgcatccataatccttctaatagctatcctcttcaacaatatactctccggacaatgaaccataaccaatactaccaatcaatactcatcattaataatcataatggctatagcaataaaactaggaatagccccctttcacttctgagtcccagaggttacccaaggcacccctctgacatccggcctgcttcttctcacatgacaaaaactagcccccatctcaatcatataccaaatctctccctcactaaacgtaagccttctcctcactctctcaatcttatccatcatagcaggcagttgaggtggattaaaccaaacccagctacgcaaaatcttagcatactcctcaattacccacataggatgaataatagcagttctaccgtacaaccctaacataaccattcttaatttaactatttatattatcctaactactaccgcattcctactactcaacttaaactccagcaccacgaccctactactatctcgcacctgaaacaagctaacatgactaacacccttaattccatccaccctcctctccctaggaggcctgcccccgctaaccggctttttgcccaaatgggccattatcgaagaattcacaaaaaacaatagcctcatcatccccaccatcatagccaccatcaccctccttaacctctacttctacctacgcctaatctactccacctcaatcacactactccccatatctaacaacgtaaaaataaaatgacagtttgaacatacaaaacccaccccattcctccccacactcatcgcccttaccacgctactcctacctatctccccttttatactaataatcttatagaaatttaggttaaatacagaccaagagccttcaaagccctcagtaagttgcaatacttaatttctgtaacagctaaggactgcaaaaccccactctgcatcaactgaacgcaaatcagccactttaattaagctaagcccttactagaccaatgggacttaaacccacaaacacttagttaacagctaagcaccctaatcaactggcttcaatctacttctcccgccgccgggaaaaaaggcgggagaagccccggcaggtttgaagctgcttcttcgaatttgcaattcaatatgaaaatcacctcggagctggtaaaaagaggcctaacccctgtctttagatttacagtccaatgcttcactcagccattttacctcacccccactgatgttcgccgaccgttgactattctctacaaaccacaaagacattggaacactatacctattattcggcgcatgagctggagtcctaggcacagctctaagcctccttattcgagccgagctgggccagccaggcaaccttctaggtaacgaccacatctacaacgttatcgtcacagcccatgcatttgtaataatcttcttcatagtaatacccatcataatcggaggctttggcaactgactagttcccctaataatcggtgcccccgatatggcgtttccccgcataaacaacataagcttctgactcttacctccctctctcctactcctgctcgcatctgctatagtggaggccggagcaggaacaggttgaacagtctaccctcccttagcagggaactactcccaccctggagcctccgtagacctaaccatcttctccttacacctagcaggtgtctcctctatcttaggggccatcaatttcatcacaacaattatcaatataaaaccccctgccataacccaataccaaacgcccctcttcgtctgatccgtcctaatcacagcagtcctacttctcctatctctcccagtcctagctgctggcatcactatactactaacagaccgcaacctcaacaccaccttcttcgaccccgccggaggaggagaccccattctataccaacacctattctgatttttcggtcaccctgaagtttatattcttatcctaccaggcttcggaataatctcccatattgtaacttactactccggaaaaaaagaaccatttggatacataggtatggtctgagctatgatatcaattggcttcctagggtttatcgtgtgagcacaccacatatttacagtaggaatagacgtagacacacgagcatatttcacctccgctaccataatcatcgctatccccaccggcgtcaaagtatttagctgactcgccacactccacggaagcaatatgaaatgatctgctgcagtgctctgagccctaggattcatctttcttttcaccgtaggtggcctgactggcattgtattagcaaactcatcactagacatcgtactacacgacacgtactacgttgtagcccacttccactatgtcctatcaataggagctgtatttgccatcataggaggcttcattcactgatttcccctattctcaggctacaccctagaccaaacctacgccaaaatccatttcactatcatattcatcggcgtaaatctaactttcttcccacaacactttctcggcctatccggaatgccccgacgttactcggactaccccgatgcatacaccacatgaaacatcctatcatctgtaggctcattcatttctctaacagcagtaatattaataattttcatgatttgagaagccttcgcttcgaagcgaaaagtcctaatagtagaagaaccctccataaacctggagtgactatatggatgccccccaccctaccacacattcgaagaacccgtatacataaaatctagacaaaaaaggaaggaatcgaaccccccaaagctggtttcaagccaaccccatggcctccatgactttttcaaaaaggtattagaaaaaccatttcataactttgtcaaagttaaattataggctaaatcctatatatcttaatggcacatgcagcgcaagtaggtctacaagacgctacttcccctatcatagaagagcttatcacctttcatgatcacgccctcataatcattttccttatctgcttcctagtcctgtatgcccttttcctaacactcacaacaaaactaactaatactaacatctcagacgctcaggaaatagaaaccgtctgaactatcctgcccgccatcatcctagtcctcatcgccctcccatccctacgcatcctttacataacagacgaggtcaacgatccctcccttaccatcaaatcaattggccaccaatggtactgaacctacgagtacaccgactacggcggactaatcttcaactcctacatacttcccccattattcctagaaccaggcgacctgcgactccttgacgttgacaatcgagtagtactcccgattgaagcccccattcgtataataattacatcacaagacgtcttgcactcatgagctgtccccacattaggcttaaaaacagatgcaattcccggacgtctaaaccaaaccactttcaccgctacacgaccgggggtatactacggtcaatgctctgaaatctgtggagcaaaccacagtttcatgcccatcgtcctagaattaattcccctaaaaatctttgaaatagggcccgtatttaccctatagcaccccctctaccccctctagagcccactgtaaagctaacttagcattaaccttttaagttaaagattaagagaaccaacacctctttacagtgaaatgccccaactaaatactaccgtatggcccaccataattacccccatactccttacactattcctcatcacccaactaaaaatattaaacacaaactaccacctacctccctcaccaaagcccataaaaataaaaaattataacaaaccctgagaaccaaaatgaacgaaaatctgttcgcttcattcattgcccccacaatcctaggcctacccgccgcagtactgatcattctatttccccctctattgatccccacctccaaatatctcatcaacaaccgactaatcaccacccaacaatgactaatcaaactaacctcaaaacaaatgataaccatacacaacactaaaggacgaacctgatctcttatactagtatccttaatcatttttattgccacaactaacctcctcggactcctgcctcactcatttacaccaaccacccaactatctataaacctagccatggccatccccttatgagcgggcgcagtgattataggctttcgctctaagattaaaaatgccctagcccacttcttaccacaaggcacacctacaccccttatccccatactagttattatcgaaaccatcagcctactcattcaaccaatagccctggccgtacgcctaaccgctaacattactgcaggccacctactcatgcacctaattggaagcgccaccctagcaatatcaaccattaaccttccctctacacttatcatcttcacaattctaattctactgactatcctagaaatcgctgtcgccttaatccaagcctacgttttcacacttctagtaagcctctacctgcacgacaacacataatgacccaccaatcacatgcctatcatatagtaaaacccagcccatgacccctaacaggggccctctcagccctcctaatgacctccggcctagccatgtgatttcacttccactccataacgctcctcatactaggcctactaaccaacacactaaccatataccaatgatggcgcgatgtaacacgagaaagcacataccaaggccaccacacaccacctgtccaaaaaggccttcgatacgggataatcctatttattacctcagaagtttttttcttcgcaggatttttctgagccttttaccactccagcctagcccctaccccccaattaggagggcactggcccccaacaggcatcaccccgctaaatcccctagaagtcccactcctaaacacatccgtattactcgcatcaggagtatcaatcacctgagctcaccatagtctaatagaaaacaaccgaaaccaaataattcaagcactgcttattacaattttactgggtctctattttaccctcctacaagcctcagagtacttcgagtctcccttcaccatttccgacggcatctacggctcaacattttttgtagccacaggcttccacggacttcacgtcattattggctcaactttcctcactatctgcttcatccgccaactaatatttcactttacatccaaacatcactttggcttcgaagccgccgcctgatactggcattttgtagatgtggtttgactatttctgtatgtctccatctattgatgagggtcttactcttttagtataaatagtaccgttaacttccaattaactagttttgacaacattcaaaaaagagtaataaacttcgccttaattttaataatcaacaccctcctagccttactactaataattattacattttgactaccacaactcaacggctacatagaaaaatccaccccttacgagtgcggcttcgaccctatatcccccgcccgcgtccctttctccataaaattcttcttagtagctattaccttcttattatttgatctagaaattgccctccttttacccctaccatgagccctacaaacaactaacctgccactaatagttatgtcatccctcttattaatcatcatcctagccctaagtctggcctatgagtgactacaaaaaggattagactgaaccgaattggtatatagtttaaacaaaacgaatgatttcgactcattaaattatgataatcatatttaccaaatgcccctcatttacataaatattatactagcatttaccatctcacttctaggaatactagtatatcgctcacacctcatatcctccctactatgcctagaaggaataatactatcgctgttcattatagctactctcataaccctcaacacccactccctcttagccaatattgtgcctattgccatactagtctttgccgcctgcgaagcagcggtgggcctagccctactagtctcaatctccaacacatatggcctagactacgtacataacctaaacctactccaatgctaaaactaatcgtcccaacaattatattactaccactgacatgactttccaaaaaacacataatttgaatcaacacaaccacccacagcctaattattagcatcatccctctactattttttaaccaaatcaacaacaacctatttagctgttccccaaccttttcctccgaccccctaacaacccccctcctaatactaactacctgactcctacccctcacaatcatggcaagccaacgccacttatccagtgaaccactatcacgaaaaaaactctacctctctatactaatctccctacaaatctccttaattataacattcacagccacagaactaatcatattttatatcttcttcgaaaccacacttatccccaccttggctatcatcacccgatgaggcaaccagccagaacgcctgaacgcaggcacatacttcctattctacaccctagtaggctcccttcccctactcatcgcactaatttacactcacaacaccctaggctcactaaacattctactactcactctcactgcccaagaactatcaaactcctgagccaacaacttaatatgactagcttacacaatagcttttatagtaaagatacctctttacggactccacttatgactccctaaagcccatgtcgaagcccccatcgctgggtcaatagtacttgccgcagtactcttaaaactaggcggctatggtataatacgcctcacactcattctcaaccccctgacaaaacacatagcctaccccttccttgtactatccctatgaggcataattataacaagctccatctgcctacgacaaacagacctaaaatcgctcattgcatactcttcaatcagccacatagccctcgtagtaacagccattctcatccaaaccccctgaagcttcaccggcgcagtcattctcataatcgcccacgggcttacatcctcattactattctgcctagcaaactcaaactacgaacgcactcacagtcgcatcataatcctctctcaaggacttcaaactctactcccactaatagctttttgatgacttctagcaagcctcgctaacctcgccttaccccccactattaacctactgggagaactctctgtgctagtaaccacgttctcctgatcaaatatcactctcctacttacaggacttaacatactagtcacagccctatactccctctacatatttaccacaacacaatggggctcactcacccaccacattaacaacataaaaccctcattcacacgagaaaacaccctcatgttcatacacctatcccccattctcctcctatccctcaaccccgacatcattaccgggttttcctcttgtaaatatagtttaaccaaaacatcagattgtgaatctgacaacagaggcttacgaccccttatttaccgagaaagctcacaagaactgctaactcatgcccccatgtctaacaacatggatttctcaacttttaaaggataacagctatccattggtcttaggccccaaaaattttggtgcaactccaaataaaagtaataaccatgcacactactataaccaccctaaccctgacttccctaattccccccatccttaccaccctcgttaaccctaacaaaaaaaactcatacccccattatgtaaaatccattgtcgcatccacctttattatcagtctcttccccacaacaatattcatgtgcctagaccaagaagttattatctcgaactgacactgagccacaacccaaacaacccagctctccctaagcttcaaactagactacttctccataatattcatccctgtagcattgttcgttacatggtccatcatagaattctcactgtgatatataaactcagacccaaacattaatcagttcttcaaatatctactcatcttcctaattaccatactaatcttagttaccgctaacaacctattccaactgttcatcggctgagagggcgtaggaattatatccttcttgctcatcagttgatgatacgcccgagcagatgccaacacagcagccattcaagcaatcctatacaaccgtatcggcgatatcggtttcatcctcgccttagcatgatttatcctacactccaactcatgagacccacaacaaatagcccttctaaacgctaatccaagcctcaccccactactaggcctcctcctagcagcagcaggcaaatcagcccaattaggtctccacccctgactcccctcagccatagaaggccccaccccagtctcagccctactccactcaagcactatagttgtagcaggaatcttcttactcatccgcttccaccccctagcagaaaatagcccactaatccaaactctaacactatgcttaggcgctatcaccactctgttcgcagcagtctgcgcccttacacaaaatgacatcaaaaaaatcgtagccttctccacttcaagtcaactaggactcataatagttacaatcggcatcaaccaaccacacctagcattcctgcacatctgtacccacgccttcttcaaagccatactatttatgtgctccgggtccatcatccacaaccttaacaatgaacaagatatccgaaaaataggaggactactcaaaaccatacctctcacttcaacctccctcaccattggcagcctagcattagcaggaatacctttcctcacaggtttctactccaaagaccacatcatcgaaaccgcaaacatatcatacacaaacgcctgagccctatctattactctcatcgctacctccctgacaagcgcctatagcactcgaataattcttctcaccctaacaggtcaacctcgcttccccacccttactaacattaacgaaaataaccccaccctactaaaccccattaaacgcctggcagccggaagcctattcgcaggatttctcattactaacaacatttcccccgcatcccccttccaaacaacaatccccctctacctaaaactcacagccctcgctgtcactttcctaggacttctaacagccctagacctcaactacctaaccaacaaacttaaaataaaatccccactatgcacattttatttctccaacatactcggattctaccctagcatcacacaccgcacaatcccctatctaggccttcttacgagccaaaacctgcccctactcctcctagacctaacctgactagaaaagctattacctaaaacaatttcacagcaccaaatctccacctccatcatcacctcaacccaaaaaggcataattaaactttacttcctctctttcttcttcccactcatcctaaccctactcctaatcacataacctattcccccgagcaatctcaattacaatatatacaccaacaaacaatgttcaaccagtaactactactaatcaacgcccataatcatacaaagcccccgcaccaataggatcctcccgaatcaaccctgacccctctccttcataaattattcagcttcctacactattaaagtttaccacaaccaccaccccatcatactctttcacccacagcaccaatcctacctccatcgctaaccccactaaaacactcaccaagacctcaacccctgacccccatgcctcaggatactcctcaatagccatcgctgtagtatatccaaagacaaccatcattccccctaaataaattaaaaaaactattaaacccatataacctcccccaaaattcagaataataacacacccgaccacaccgctaacaatcaatactaaacccccataaataggagaaggcttagaagaaaaccccacaaaccccattactaaacccacactcaacagaaacaaagcatacatcattattctcgcacggactacaaccacgaccaatgatatgaaaaaccatcgttgtatttcaactacaagaacaccaatgaccccaatacgcaaaactaaccccctaataaaattaattaaccactcattcatcgacctccccaccccatccaacatctccgcatgatgaaacttcggctcactccttggcgcctgcctgatcctccaaatcaccacaggactattcctagccatgcactactcaccagacgcctcaaccgccttttcatcaatcgcccacatcactcgagacgtaaattatggctgaatcatccgctaccttcacgccaatggcgcctcaatattctttatctgcctcttcctacacatcgggcgaggcctatattacggatcatttctctactcagaaacctgaaacatcggcattatcctcctgcttgcaactatagcaacagccttcataggctatgtcctcccgtgaggccaaatatcattctgaggggccacagtaattacaaacttactatccgccatcccatacattgggacagacctagttcaatgaatctgaggaggctactcagtagacagtcccaccctcacacgattctttacctttcacttcatcttgcccttcattattgcagccctagcagcactccacctcctattcttgcacgaaacgggatcaaacaaccccctaggaatcacctcccattccgataaaatcaccttccacccttactacacaatcaaagacgccctcggcttacttctcttccttctctccttaatgacattaacactattctcaccagacctcctaggcgacccagacaattataccctagccaaccccttaaacacccctccccacatcaagcccgaatgatatttcctattcgcctacacaattctccgatccgtccctaacaaactaggaggcgtccttgccctattactatccatcctcatcctagcaataatccccatcctccatatatccaaacaacaaagcataatatttcgcccactaagccaatcactttattgactcctagccgcagacctcctcattctaacctgaatcggaggacaaccagtaagctacccttttaccatcattggacaagtagcatccgtactatacttcacaacaatcctaatcctaataccaactatctccctaattgaaaacaaaatactcaaatgggcctgtccttgtagtataaactaatacaccagtcttgtaaaccggagatgaaaacctttttccaaggacaaatcagagaaaaagtctttaactccaccattagcacccaaagctaagattctaatttaaactattctctgttctttcatggggaagcagatttgggtaccacccaagtattgactcacccatcaacaaccgctatgtatttcgtacattactgccagccaccatgaatattgtacggtaccataaatacttgaccacctgtagtacataaaaacccaatccacatcaaaaccccctccccatgcttacaagcaagtacagcaatcaaccctcaactatcacacatcaactgcaactccaaagccacccctcacccactaggataccaacaaacctacccacccttaacagtacatagtacataaagccatttaccgtacatagcacattacagtcaaatcccttctcgtccccatggatgacccccctcagataggggtcccttgaccaccatcctccgtgaaatcaatatcccgcacaagagtgctactctcctcgctccgggcccataacacttgggggtagctaaagtgaactgtatccgacatctggttcctacttcagggtcataaagcctaaatagcccacacgttccccttaaataagacatcacgatg

SEQ ID NO: 509 - DNA, 16569 bp, Homo sapiens mitochondrial
  3107: "n" refers to a nucleotide at position 3107 of the Cambridge Reference Sequence (CRS, Anderson et al. 1981 Nature 290:457-465), later determined to be absent from the human mtDNA sequence according to the revised CRS (rCRS, Andrews et al. 1999 Nature Genetics 23:147); "n" therefore represents a single nucleotide deletion at a position corresponding to nucleotide 3107 of SEQ ID NO:1 as provided herein.
gatcacaggtctatcaccctattaaccactcacgggagctctccatgcatttggtattttcgtctggggggtatgcacgcgatagcattgcgagacgctggagccggagcaccctatgtcgcagtatctgtctttgattcctgcctcatcctattatttatcgcacctacgttcaatattacaggcgaacatacttactaaagtgtgttaattaattaatgcttgtaggacataataataacaattgaatgtctgcacagccactttccacacagacatcataacaaaaaatttccaccaaaccccccctcccccgcttctggccacagcacttaaacacatctctgccaaaccccaaaaacaaagaaccctaacaccagcctaaccagatttcaaattttatcttttggcggtatgcacttttaacagtcaccccccaactaacacattattttcccctcccactcccatactactaatctcatcaatacaacccccgcccatcctacccagcacacacacaccgctgctaaccccataccccgaaccaaccaaaccccaaagacaccccccacagtttatgtagcttacctcctcaaagcaatacactgaaaatgtttagacgggctcacatcaccccataaacaaataggtttggtcctagcctttctattagctcttagtaagattacacatgcaagcatccccattccagtgagttcaccctctaaatcaccacgatcaaaagggacaagcatcaagcacgcagcaatgcagctcaaaacgcttagcctagccacacccccacgggaaacagcagtgattaacctttagcaataaacgaaagtttaactaagctatactaaccccagggttggtcaatttcgtgccagccaccgcggtcacacgattaacccaagtcaatagaaaccggcgtaaagagtgttttagatcaccccctccccaataaagctaaaactcacctgagttgtaaaaaactccagttgacacaaaatagactacgaaagtggctttaacatatctgaacacacaatagctaagacccaaactgggattagataccccactatgcttagccctaaacctcaacagttaaatcaacaaaactgctcgccagaacactacgagccacagcttaaaactcaaaggacctggcggtgcttcatatccctctagaggagcctgttctgtaatcgataaaccccgatcaacctcaccacctcttgctcagcctatataccgccatcttcagcaaaccctgatgaaggctacaaagtaagcgcaagtacccacgtaaagacgttaggtcaaggtgtagcccatgaggtggcaagaaatgggctacattttctaccccagaaaactacgatagcccttatgaaacttaagggtcgaaggtggatttagcagtaaactgagagtagagtgcttagttgaacagggccctgaagcgcgtacacaccgcccgtcaccctcctcaagtatacttcaaaggacatttaactaaaacccctacgcatttatatagaggagacaagtcgtaacatggtaagtgtactggaaagtgcacttggacgaaccagagtgtagcttaacacaaagcacccaacttacacttaggagatttcaacttaacttgaccgctctgagctaaacctagccccaaacccactccaccttactaccagacaaccttagccaaaccatttacccaaataaagtataggcgatagaaattgaaacctggcgcaatagatatagtaccgcaagggaaagatgaaaaattataaccaagcataatatagcaaggactaacccctataccttctgcataatgaattaactagaaataactttgcaaggagaaccaaagctaagacccccgaaaccagacgagctacctaagaacagctaaaagagcacacccgtctatgtagcaaaatagtgggaagatttataggtagaggcgacaaacctaccgagcctggtgatagctggttgtccaagatagaatcttagttcaactttaaatttgcccacagaaccctctaaatccccttgtaaatttaactgttagtccaaagaggaacagctctttggacactaggaaaaaaccttgtagagagagtaaaaaatttaacacccatagtaggcctaaaagcagccaccaattaagaaagcgttcaagctcaacacccactacctaaaaaatcccaaacatataactgaactcctcacacccaattggaccaatctatcaccctatagaagaactaatgttagtataagtaacatgaaaacattctcctccgcataagcctgcgtcagattaaaacactgaactgacaattaacagcccaatatctacaatcaaccaacaagtcattattaccctcactgtcaacccaacacaggcatgctcataaggaaaggttaaaaaaagtaaaaggaactcggcaaatcttaccccgcctgtttaccaaaaacatcacctctagcatcaccagtattagaggcaccgcctgcccagtgacacatgtttaacggccgcggtaccctaaccgtgcaaaggtagcataatcacttgttccttaaatagggacctgtatgaatggctccacgagggttcagctgtctcttacttttaaccagtgaaattgacctgcccgtgaagaggcgggcatgacacagcaagacgagaagaccctatggagctttaatttattaatgcaaacagtacctaacaaacccacaggtcctaaactaccaaacctgcattaaaaatttcggttggggcgacctcggagcagaacccaacctccgagcagtacatgctaagacttcaccagtcaaagcgaactactatactcaattgatccaataacttgaccaacggaacaagttaccctagggataacagcgcaatcctattctagagtccatatcaacaatagggtttacgacctcgatgttggatcaggacatcccgatggtgcagccgctattaaaggttcgtttgttcaacgattaaagtcctacgtgatctgagttcagaccggagtaatccaggtcggtttctatctacnttcaaattcctccctgtacgaaaggacaagagaaataaggcctacttcacaaagcgccttcccccgtaaatgatatcatctcaacttagtattatacccacacccacccaagaacagggtttgttaagatggcagagcccggtaatcgcataaaacttaaaactttacagtcagaggttcaattcctcttcttaacaacatacccatggccaacctcctactcctcattgtacccattctaatcgcaatggcattcctaatgcttaccgaacgaaaaattctaggctatatacaactacgcaaaggccccaacgttgtaggcccctacgggctactacaacccttcgctgacgccataaaactcttcaccaaagagcccctaaaacccgccacatctaccatcaccctctacatcaccgccccgaccttagctctcaccatcgctcttctactatgaacccccctccccatacccaaccccctggtcaacctcaacctaggcctcctatttattctagccacctctagcctagccgtttactcaatcctctgatcagggtgagcatcaaactcaaactacgccctgatcggcgcactgcgagcagtagcccaaacaatctcatatgaagtcaccctagccatcattctactatcaacattactaataagtggctcctttaacctctccacccttatcacaacacaagaacacctctgattactcctgccatcatgacccttggccataatatgatttatctccacactagcagagaccaaccgaacccccttcgaccttgccgaaggggagtccgaactagtctcaggcttcaacatcgaatacgccgcaggccccttcgccctattcttcatagccgaatacacaaacattattataataaacaccctcaccactacaatcttcctaggaacaacatatgacgcactctcccctgaactctacacaacatattttgtcaccaagaccctacttctaacctccctgttcttatgaattcgaacagcatacccccgattccgctacgaccaactcatacacctcctatgaaaaaacttcctaccactcaccctagcattacttatatgacatgtctccatacccattacaatctccagcattccccctcaaacctaagaaatatgtctgataaaagagttactttgatagagtaaataataggagcttaaacccccttatttctaggactatgagaatcgaacccatccctgagaatccaaaattctccgtgccacctatcacaccccatcctaaagtaaggtcagctaaataagctatcgggcccataccccgaaaatgttggttatacccttcccgtactaattaatcccctggcccaacccgtcatctactctaccatctttgcaggcacactcatcacagcgctaagctcgcactgattttttacctgagtaggcctagaaataaacatgctagcttttattccagttctaaccaaaaaaataaaccctcgttccacagaagctgccatcaagtatttcctcacgcaagcaaccgcatccataatccttctaatagctatcctcttcaacaatatactctccggacaatgaaccataaccaatactaccaatcaatactcatcattaataatcataatggctatagcaataaaactaggaatagccccctttcacttctgagtcccagaggttacccaaggcacccctctgacatccggcctgcttcttctcacatgacaaaaactagcccccatctcaatcatataccaaatctctccctcactagacgtaagccttctcctcactctctcaatcttatccatcatagcaggcagttgaggtggattaaaccaaacccagctacgcaaaatcttagcatactcctcaattacccacataggatgaataatagcagttctaccgtacaaccctaacataaccattcttaatttaactatttatattatcctaactactaccgcattcctactactcaacttaaactccagcaccacaaccctactactatctcgcacctgaaacaagctaacatgactaacacccttaattccatccaccctcctctccctaggaggcctgcccccgctaaccggctttttgcccaaatgggccattatcgaagaattcacaaaaaacaatagcctcatcatccccaccatcatagccaccatcaccctccttaacctctacttctacctacgcctaatctactccacctcaatcacactactccccatatctaacaacgtaaaaataaaatgacagtttgaacatacaaaacccaccccattcctccccacactcatcgcccttaccacgctactcctacctatctccccttttatactaataatcttatagaaatttaggttaaatacagaccaagagccttcaaagccctcagtaagttgcaatacttaatttctgtaacagctaaggactgcaaaaccccactctgcatcaactgaacgcaaatcagccactttaattaagctaagcccttactagaccaatgggacttaaacccacaaacacttagttaacagctaagcaccctaatcaactggcttcaatctacttctcccgccgccgggaaaaaaggcgggagaagccccggcaggtttgaagctgcttcttcgaatttgcaattcaatatgaaaatcacctcggagctggtaaaaagaggcctaacccctgtctttagatttacagtccaatgcttcactcagccattttacctcacccccactgatgttcgccgaccgttgactattctctacaaaccacaaagacattggaacactatacctattattcggcgcatgagctggagtcctaggcacagctctaagcctccttattcgagccgagctgggccagccaggcaaccttctaggtaacgaccacatctacaacgttatcgtcacagcccatgcatttgtaataatcttcttcatagtaatacccatcataatcggaggctttggcaactgactagttcccctaataatcggtgcccccgatatggcgtttccccgcataaacaacataagcttctgactcttacctccctctctcctactcctgctcgcatctgctatagtggaggccggagcaggaacaggttgaacagtctaccctcccttagcagggaactactcccaccctggagcctccgtagacctaaccatcttctccttacacctagcaggtgtctcctctatcttaggggccatcaatttcatcacaacaattatcaatataaaaccccctgccataacccaataccaaacgcccctcttcgtctgatccgtcctaatcacagcagtcctacttctcctatctctcccagtcctagctgctggcatcactatactactaacagaccgcaacctcaacaccaccttcttcgaccccgccggaggaggagaccccattctataccaacacctattctgatttttcggtcaccctgaagtttatattcttatcctaccaggcttcggaataatctcccatattgtaacttactactccggaaaaaaagaaccatttggatacataggtatggtctgagctatgatatcaattggcttcctagggtttatcgtgtgagcacaccatatatttacagtaggaatagacgtagacacacgagcatatttcacctccgctaccataatcatcgctatccccaccggcgtcaaagtatttagctgactcgccacactccacggaagcaatatgaaatgatctgctgcagtgctctgagccctaggattcatctttcttttcaccgtaggtggcctgactggcattgtattagcaaactcatcactagacatcgtactacacgacacgtactacgttgtagctcacttccactatgtcctatcaataggagctgtatttgccatcataggaggcttcattcactgatttcccctattctcaggctacaccctagaccaaacctacgccaaaatccatttcactatcatattcatcggcgtaaatctaactttcttcccacaacactttctcggcctatccggaatgccccgacgttactcggactaccccgatgcatacaccacatgaaacatcctatcatctgtaggctcattcatttctctaacagcagtaatattaataattttcatgatttgagaagccttcgcttcgaagcgaaaagtcctaatagtagaagaaccctccataaacctggagtgactatatggatgccccccaccctaccacacattcgaagaacccgtatacataaaatctagacaaaaaaggaaggaatcgaaccccccaaagctggtttcaagccaaccccatggcctccatgactttttcaaaaaggtattagaaaaaccatttcataactttgtcaaagttaaattataggctaaatcctatatatcttaatggcacatgcagcgcaagtaggtctacaagacgctacttcccctatcatagaagagcttatcacctttcatgatcacgccctcataatcattttccttatctgcttcctagtcctgtatgcccttttcctaacactcacaacaaaactaactaatactaacatctcagacgctcaggaaatagaaaccgtctgaactatcctgcccgccatcatcctagtcctcatcgccctcccatccctacgcatcctttacataacagacgaggtcaacgatccctcccttaccatcaaatcaattggccaccaatggtactgaacctacgagtacaccgactacggcggactaatcttcaactcctacatacttcccccattattcctagaaccaggcgacctgcgactccttgacgttgacaatcgagtagtactcccgattgaagcccccattcgtataataattacatcacaagacgtcttgcactcatgagctgtccccacattaggcttaaaaacagatgcaattcccggacgtctaaaccaaaccactttcaccgctacacgaccgggggtatactacggtcaatgctctgaaatctgtggagcaaaccacagtttcatgcccatcgtcctagaattaattcccctaaaaatctttgaaatagggcccgtatttaccctatagcaccccctctaccccctctagagcccactgtaaagctaacttagcattaaccttttaagttaaagattaagagaaccaacacctctttacagtgaaatgccccaactaaatactaccgtatggcccaccataattacccccatactccttacactattcctcatcacccaactaaaaatattaaacacaaactaccacctacctccctcaccaaagcccataaaaataaaaaattataacaaaccctgagaaccaaaatgaacgaaaatctgttcgcttcattcattgcccccacaatcctaggcctacccgccgcagtactgatcattctatttccccctctattgatccccacctccaaatatctcatcaacaaccgactaatcaccacccaacaatgactaatcaaactaacctcaaaacaaataataaccatacacaacactaaaggacgaacctgatctcttatactagtatccttaatcatttttattgccacaactaacctcctcggactcctgcctcactcatttacaccaaccacccaactatctataaacctagccatggccatccccttatgagcgggcgcagtgattataggctttcgctctaagattaaaaatgccctagcccacttcttaccacaaggcacacctacaccccttatccccatactagttattatcgaaaccatcagcctactcattcaaccaatagccctggccgtacgcctaaccgctaacattactgcaggccacctactcatgcacctaattggaagcgccaccctagcaatatcaaccattaaccttccctctacacttatcatcttcacaattctaattctactgactatcctagaaatcgctgtcgccttaatccaagcctacgttttcacacttctagtaagcctctacctgcacgacaacacataatgacccaccaatcacatgcctatcatatagtaaaacccagcccatgacccctaacaggggccctctcagccctcctaatgacctccggcctagccatgtgatttcacttccactccataacgctcctcatactaggcctactaaccaacacactaaccatataccaatgatggcgcgatgtaacacgagaaagcacataccaaggccaccacacaccacctgtccaaaaaggccttcgatacgggataatcctatttattacctcagaagtttttttcttcgcaggatttttctgagccttttaccactccagcctagcccctaccccccaattaggagggcactggcccccaacaggcatcaccccgctaaatcccctagaagtcccactcctaaacacatccgtattactcgcatcaggagtatcaatcacctgagctcaccatagtctaatagaaaacaaccgaaaccaaataattcaagcactgcttattacaattttactgggtctctattttaccctcctacaagcctcagagtacttcgagtctcccttcaccatttccgacggcatctacggctcaacattttttgtagccacaggcttccacggacttcacgtcattattggctcaactttcctcactatctgcttcatccgccaactaatatttcactttacatccaaacatcactttggcttcgaagccgccgcctgatactggcattttgtagatgtggtttgactatttctgtatgtctccatctattgatgagggtcttactcttttagtataaatagtaccgttaacttccaattaactagttttgacaacattcaaaaaagagtaataaacttcgccttaattttaataatcaacaccctcctagccttactactaataattattacattttgactaccacaactcaacggctacatagaaaaatccaccccttacgagtgcggcttcgaccctatatcccccgcccgcgtccctttctccataaaattcttcttagtagctattaccttcttattatttgatctagaaattgccctccttttacccctaccatgagccctacaaacaactaacctgccactaatagttatgtcatccctcttattaatcatcatcctagccctaagtctggcctatgagtgactacaaaaaggattagactgaaccgaattggtatatagtttaaacaaaacgaatgatttcgactcattaaattatgataatcatatctaccaaatgcccctcatttacataaatattatactagcatttaccatctcacttctaggaatactagtatatcgctcacacctcatatcctccctactatgcctagaaggaataatactatcgctgttcattatagctactctcataaccctcaacacccactccctcttagccaatattgtgcctattgccatactagtctttgccgcctgcgaagcagcggtgggcctagccctactagtctcaatctccaacacatatggcctagactacgtacataacctaaacctactccaatgctaaaactaatcgtcccaacaattatattactaccactgacatgactttccaaaaaacacataatttgaatcaacacaaccacccacagcctaattattagcatcatccctctactattttttaaccaaatcaacaacaacctatttagctgttccccaaccttttcctccgaccccctaacaacccccctcctaatactaactacctgactcctacccctcacaatcatggcaagccaacgccacttatccagtgaaccactatcacgaaaaaaactctacctctctatactaatctccctacaaatctccttaattataacattcacagccacagaactaatcatattttatatcttcttcgaaaccacacttatccccaccttggctatcatcacccgatgaggcaaccagccagaacgcctgaacgcaggcacatacttcctattctacaccctagtaggctcccttcccctactgatcgcactgatttacactcacaacaccctaggctcactaaacattctactactcactctcactgcccaagaactatcaaactcctgagccaacaacttaatatgactagcttacacaatagcttttatagtaaagatacctctttacggactccacttatgactccctaaagcccatgtcgaagcccccatcgctgggtcaatagtacttgccgcagtactcttaaaactaggcggctatggtataatacgcctcacactcattctcaaccccctgacaaaacacatagcctaccccttccttgtactatccctatgaggcataattataacaagctccatctgcctacgacaaacagacctaaaatcgctcattgcatactcttcaatcagccacatagccctcgtagtaacagccattctcatccaaaccccctgaagcttcaccggcgcagtcattctcataatcgcccacggacttacatcctcattactattctgcctagcaaactcaaactacgaacgcactcacagtcgcatcataatcctctctcaaggacttcaaactctgctcccactaatagctttttgatgacttctagcaagcctcgctaacctcgccttaccccccactattaacctactgggagaactctctgtgctagtaaccacgttctcctgatcaaatatcactctcctacttacaggactcaacatactagtcacagccctatactccctctacatatttaccacaacacaatggggctcactcacccaccacattaacaacataaaaccctcattcacacgagaaaacaccctcatgttcatacacctatcccccattctcctcctatccctcaaccccgacatcattaccgggttttcctcttgtaaatatagtttaaccaaaacatcagattgtggatctgacaacagaggcttacgaccccttatttaccgagaaagctcacaagaactgctaactcatgcccccatgtctaacaacatggctttctcaacttttaaaggataacagctatccattggtcttaggccccaaaaattttggtgcaactccaaataaaagtaataaccatgcacactactataaccaccctaaccctgacttccctaattccccccatccttaccaccctcgttaaccctaacaaaaaaaactcatacccccattatgtaaaatccattgtcgcatccacctttattatcagtctcttccccacaacaatattcatgtgcctagaccaagaagttattatctcgaactgacactgagccacaacccaaacaacccagctctccctaagcttcaaactagactacttctccataatattcatccctgtagcattgttcgttacatggtccatcatagaattctcactgtgatatataaactcagacccaaacattaatcagttcttcaaatatctactcatcttcctaattaccatactaatcttagttaccgctaacaacctattccaactgttcatcggctgagagggcgtaggaattatatccttcttgctcatcagttgatgatacgcccgagcagatgccaacacagcagccattcaagcaatcctatacaaccgtatcggcgatatcggtttcatcctcgccttagcatgatttatcctacactccaactcatgagacccacaacaaatagcccttctaaacgctaatccaagcctcaccccactactaggcctcctcctagcagcagcaggcaaatcagcccaattaggtctccacccctgactcccctcagccatagaaggccccaccccagtctcagccctactccactcaagcactatagttgtagcaggaatcttcttactcatccgcttccaccccctagcagaaaatagcccactaatccaaactctaacactatgcttaggcgctatcaccactctgttcgcagcagtctgcgcccttacacaaaatgacatcaaaaaaatcgtagccttctccacttcaagtcaactaggactcataatagttacaatcggcatcaaccaaccacacctagcattcctgcacatctgtacccacgccttcttcaaagccatactatttatgtgctccggatccatcatccacaaccttaacaatgaacaagatattcgaaaaataggaggactactcaaaaccatacctctcacttcaacctccctcaccattggcagcctagcattagcaggaatacctttcctcacaggtttctactccaaagaccacatcatcgaaaccgcaaacatatcatacacaaacgcctgagccctatctattactctcatcgctacctccctgacaagcgcctatagcactcgaataattcttctcaccctaacaggtcaacctcgcttccccacccttactaacattaacgaaaataaccccaccctactaaaccccattaaacgcctggcagccggaagcctattcgcaggatttctcattactaacaacatttcccccgcatcccccttccaaacaacaatccccctctacctaaaactcacagccctcgctgtcactttcctaggacttctaacagccctagacctcaactacctaaccaacaaacttaaaataaaatccccactatgcacattttatttctccaacatactcggattctaccctagcatcacacaccgcacaatcccctatctaggccttcttacgagccaaaacctgcccctactcctcctagacctaacctgactagaaaagctattacctaaaacaatttcacagcaccaaatctccacctccatcatcacctcaacccaaaaaggcataattaaactttacttcctctctttcttcttcccactcatcctaaccctactcctaatcacataacctattcccccgagcaatctcaattacaatatatacaccaacaaacaatgttcaaccagtaactactactaatcaacgcccatagtcatacaaagcccccgcaccaataggatcctcccgaatcaaccctgacccctctccttcataaattattcagcttcctacactattaaagtttaccacaaccaccaccccatcatactctttcacccacagcaccaatcctacctccatcgctaaccccactaaaacactcaccaagacctcaacccctgacccccatgcctcaggatactcctcaatagccatcgctgtagtatatccaaagacaaccatcattccccctaaataaattaaaaaaactattaaacccatataacctcccccaaaattcagaataataacacacccgaccacaccgctaacaatcaatactaaacccccataaataggagaaggcttagaagaaaaccccacaaaccccattactaaacccacactcaacagaaacaaagcatacatcattattctcgcacggactacaaccacgaccaatgatatgaaaaaccatcgttgtatttcaactacaagaacaccaatgaccccaatacgcaaaattaaccccctaataaaattaattaaccactcattcatcgacctccccaccccatccaacatctccgcatgatgaaacttcggctcactccttggcgcctgcctgatcctccaaatcaccacaggactattgctagccatacactactcaccagacgcctcaaccgccttttcatcaatcgcccacatcactcgagacgtaaattatggctgaatcatccgctaccttcacgccaatggcgcctcaatattctttatctgcctcttcctacacatcgggcgaggcctatattacggatcatttctctactcagaaacctgaaacatcggcattatcctcctgcttgcaactatagcaacagccttcataggctatgtcctcccgtgaggccaaatatcattctgaggggccacagtaattacaaacttactatccgccatcccatacattgggacagacctagttcaatgaatctgaggaggctactcagtagacagtcccaccctcacacgattctttacctttcacttcatcttgcccttcattattgcagccctagcagcactccacctcctattcttgcacgaaacgggatcaaacaaccccctaggaatcacctcccattccgataaaatcaccttccacccttactacacaatcaaagacgccctcggcttacttctcttcattctctccttaatgacattaacactattctcaccagacctcctaggcgacccagacaattataccctagccaaccccttaaacacccctccccacatcaagcccgaatgatatttcctattcgcctacacaattctccgatccgtccctaacaagctaggaggcgtccttgccctattactatccatcctcatcctagcaataatccccatcctccatatatccaaacaacaaagcataatatttcgcccactaagccaatcactttattgactcctagccgcagacctcctcattctaacctgaatcggaggacaaccagtaagctacccttttaccatcattggacaagtagcatccgtactatacttcacaacaatcctaatcctaataccaactatctccctaattgaaaacaaaatactcaaatgggcctgtccttgtagtataaactaatacaccagtcttgtaaaccgaagatgaaaacctttttccaaggacaaatcagagaaaaagtctttaactccaccattagcacccaaagctaagattctaatttaaactattctctgttctttcatggggaagcagatttgggtaccacccaagtattgactcacccatcaacaaccgctatgtatttcgtacattactgccagccaccatgaatattgtacggtaccataaatacttgaccacctgtagtacataaaaacccaatccacatcaaaaccccctccccatgcttacaagcaagtacagcaatcaaccctcaactatcacacatcaactgcaactccaaagccacccctcacccactaggataccaacaaacctacccacccttaacagtacatagtacataaagccatttaccgtacatagcacattacagtcaaatcccttctcgtccccatggatgacccccctcagataggggtcccttgaccaccatcctccgtgaaatcaatatcccgcacaagagtgctactctcctcgctccgggcccataacacttgggggtagctaaagtgaactgtatccgacatctggttcctacttcagggtcataaagcctaaatagcccacacgttccccttaaataagacatcacgatg

SEQ ID NO: 510 - DNA, 16569 bp, Homo sapiens mitochondrial
  3107: "n" refers to a nucleotide at position 3107 of the Cambridge Reference Sequence (CRS, Anderson et al. 1981 Nature 290:457-465), later determined to be absent from the human mtDNA sequence according to the revised CRS (rCRS, Andrews et al. 1999 Nature Genetics 23:147); "n" therefore represents a single nucleotide deletion at a position corresponding to nucleotide 3107 of SEQ ID NO:1 as provided herein.
gatcacaggtctatcaccctattaaccactcacgggagctctccatgcatttggtattttcgtctggggggtatgcacgcgatagcattgcgagacgctggagccggagcaccctatgtcgcagtatctgtctttgattcctgcctcatcctattatttatcgcacctacgttcaatattacaggcgaacatacttactaaagtgtgttaattaattaatgcttgtaggacataataataacaattgaatgtctgcacagccactttccacacagacatcataacaaaaaatttccaccaaaccccccctcccccgcttctggccacagcacttaaacacatctctgccaaaccccaaaaacaaagaaccctaacaccagcctaaccagatttcaaattttatcttttggcggtatgcacttttaacagtcaccccccaactaacacattattttcccctcccactcccatactactaatctcatcaatacaacccccgcccatcctacccagcacacacacaccgctgctaaccccataccccgaaccaaccaaaccccaaagacaccccccacagtttatgtagcttacctcctcaaagcaatacactgaaaatgtttagacgggctcacatcaccccataaacaaataggtttggtcctagcctttctattagctcttagtaagattacacatgcaagcatccccattccagtgagttcaccctctaaatcaccacgatcaaaagggacaagcatcaagcacgcagcaatgcagctcaaaacgcttagcctagccacacccccacgggaaacagcagtgattaacctttagcaataaacgaaagtttaactaagctatactaaccccagggttggtcaatttcgtgccagccaccgcggtcacacgattaacccaagtcaatagaagccggcgtaaagagtgttttagatcaccccctccccaataaagctaaaactcacctgagttgtaaaaaactccagttgacacaaaatagactacgaaagtggctttaacatatctgaacacacaatagctaagacccaaactgggattagataccccactatgcttagccctaaacctcaacagttaaatcaacaaaactgctcgccagaacactacgagccacagcttaaaactcaaaggacctggcggtgcttcatatccctctagaggagcctgttctgtaatcgataaaccccgatcaacctcaccacctcttgctcagcctatataccgccatcttcagcaaaccctgatgaaggctacaaagtaagcgcaagtacccacgtaaagacgttaggtcaaggtgtagcccatgaggtggcaagaaatgggctacattttctaccccagaaaactacgatagcccttatgaaacttaagggtcgaaggtggatttagcagtaaactgagagtagagtgcttagttgaacagggccctgaagcgcgtacacaccgcccgtcaccctcctcaagtatacttcaaaggacatttaactaaaacccctacgcatttatatagaggagacaagtcgtaacatggtaagtgtactggaaagtgcacttggacgaaccagagtgtagcttaacacaaagcacccaacttacacttaggagatttcaacttaacttgaccgctctgagctaaacctagccccaaacccactccaccttactaccagacaaccttagccaaaccatttacccaaataaagtataggcgatagaaattgaaacctggcgcaatagatatagtaccgcaagggaaagatgaaaaattataaccaagcataatatagcaaggactaacccctataccttctgcataatgaattaactagaaataactttgcaaggagaaccaaagctaagacccccgaaaccagacgagctacctaagaacagctaaaagagcacacccgtctatgtagcaaaatagtgggaagatttataggtagaggcgacaaacctaccgagcctggtgatagctggttgtccaagatagaatcttagttcaactttaaatttgcccacagaaccctctaaatccccttgtaaatttaactgttagtccaaagaggaacagctctttggacactaggaaaaaaccttgtagagagagtaaaaaatttaacacccatagtaggcctaaaagcagccaccaattaagaaagcgttcaagctcaacacccactacctaaaaaatcccaaacatataactgaactcctcacacccaattggaccaatctatcaccctatagaagaactaatgttagtataagtaacatgaaaacattctcctccgcataagcctgcgtcagattaaaacactgaactgacaattaacagcccaatatctacaatcaaccaacaagtcattattaccctcactgtcaacccaacacaggcatgctcataaggaaaggttaaaaaaagtaaaaggaactcggcaaatcttaccccgcctgtttaccaaaaacatcacctctagcatcaccagtattagaggcaccgcctgcccagtgacacatgtttaacggccgcggtaccctaaccgtgcaaaggtagcataatcacttgttccttaaatagggacctgtatgaatggctccacgagggttcagctgtctcttacttttaaccagtgaaattgacctgcccgtgaagaggcgggcatgacacagcaagacgagaagaccctatggagctttaatttattaatgcaaacagtacctaacaaacccacaggtcctaaactaccaaacctgcattaaaaatttcggttggggcgacctcggagcagaacccaacctccgagcagtacatgctaagacttcaccagtcaaagcgaactactatactcaattgatccaataacttgaccaacggaacaagttaccctagggataacagcgcaatcctattctagagtccatatcaacaatagggtttacgacctcgatgttggatcaggacatcccgatggtgcagccgctattaaaggttcgtttgttcaacgattaaagtcctacgtgatctgagttcagaccggagtaatccaggtcggtttctatctacnttcaaattcctccctgtacgaaaggacaagagaaataaggcctacttcacaaagcgccttcccccgtaaatgatatcatctcaacttagtattatacccacacccacccaagaacagggtttgttaagatggcagagcccggtaatcgcataaaacttaaaactttacagtcagaggttcaattcctcttcttaacaacatacccatggccaacctcctactcctcattgtacccattctaatcgcaatggcattcctaatgcttaccgaacgaaaaattctaggctatatacaactacgcaaaggccccaacgttgtaggcccctacgggctactacaacccttcgctgacgccataaaactcttcaccaaagagcccctaaaacccgccacatctaccatcaccctctacatcaccgccccgaccttagctctcaccatcgctcttctactatgaacccccctccccatacccaaccccctggtcaacctcaacctaggcctcctatttattctagccacctctagcctagccgtttactcaatcctctgatcagggtgagcatcaaactcaaactacgccctgatcggcgcactgcgagcagtagcccaaacaatctcatatgaagtcaccctagccatcattctactatcaacattactaataagtggctcctttaacctctccacccttatcacaacacaagaacacctctgattactcctgccatcatgacccttggccataatatgatttatctccacactagcagagaccaaccgaacccccttcgaccttgccgaaggggagtccgaactagtctcaggcttcaacatcgaatacgccgcaggccccttcgccctattcttcatagccgaatacacaaacattattataataaacaccctcaccactacaatcttcctaggaacaacatatgacgcactctcccctgaactctacacaacatattttgtcaccaagaccctacttctaacctccctgttcttatgaattcgaacagcatacccccgattccgctacgaccaactcatacacctcctatgaaaaaacttcctaccactcaccctagcattacttatatgacatgtctccatacccattacaatctccagcattccccctcaaacctaagaaatatgtctgataaaagagttactttgatagagtaaataataggagcttaaacccccttatttctaggactatgagaatcgaacccatccctgagaatccaaaattctccgtgccacctatcacaccccatcctaaagtaaggtcagctaaataagctatcgggcccataccccgaaaatgttggttatacccttcccgtactaattaatcccctggcccaacccgtcatctactctaccatctttgcaggcacactcatcacagcgctaagctcgcactgattttttacctgagtaggcctagaaataaacatgctagcttttattccagttctaaccaaaaaaataaaccctcgttccacagaagctgccatcaagtatttcctcacgcaagcaaccgcatccataatccttctaatagctatcctcttcaacaatatactctccggacaatgaaccataaccaatactaccaatcaatactcatcattaataatcataatggctatagcaataaaactaggaatagccccctttcacttctgagtcccagaggttacccaaggcacccctctgacatccggcctgcttcttctcacatgacaaaaactagcccccatctcaatcatataccaaatctctccctcactagacgtaagccttctcctcactctctcaatcttatccatcatagcaggcagttgaggtggattaaaccaaacccagctacgcaaaatcttagcatactcctcaattacccacataggatgaataatagcagttctaccgtacaaccctaacataaccattcttaatttaactatttatattatcctaactactaccgcattcctactactcaacttaaactccagcaccacgaccctactactatctcgcacctgaaacaagctaacatgactaacacccttaattccatccaccctcctctccctaggaggcctgcccccgctaaccggctttttgcccaaatgggccattatcgaagaattcacaaaaaacaatagcctcatcatccccaccatcatagccaccatcaccctccttaacctctacttctacctacgcctaatctactccacctcaatcacactactccccatatctaacaacgtaaaaataaaatggcagtttgaacatacaaaacccaccccattcctccccacactcatcgcccttaccacgctactcctacctatctccccttttatactaataatcttatagaaatttaggttaaatacagaccaagagccttcaaagccctcagtaagttgcaatacttaatttctgtaacagctaaggactgcaaaaccccactctgcatcaactgaacgcaaatcagccactttaattaagctaagcccttactagaccaatgggacttaaacccacaaacacttagttaacagctaagcaccctaatcaactggcttcaatctacttctcccgccgccgggaaaaaaggcgggagaagccccggcaggtttgaagctgcttcttcgaatttgcaattcaatatgaaaatcacctcggagctggtaaaaagaggcctaacccctgtctttagatttacagtccaatgcttcactcagccattttacctcacccccactgatgttcgccgaccgttgactattctctacaaaccacaaagacattggaacactatacctattattcggcgcatgagctggagtcctaggcacagctctaagcctccttattcgagccgagctgggccagccaggcaaccttctaggtaacgaccacatctacaacgttatcgtcacagcccatgcatttgtaataatcttcttcatagtaatacccatcataatcggaggctttggcaactgactagttcccctaataatcggtgcccccgatatggcgtttccccgcataaacaacataagcttctgactcttacctccctctctcctactcctgctcgcatctgctatagtggaggccggagcaggaacaggttgaacagtctaccctcccttagcagggaactactcccaccctggagcctccgtagacctaaccatcttctccttacacctagcaggtgtctcctctatcttaggggccatcaatttcatcacaacaattatcaatataaaaccccctgccataacccaataccaaacgcccctcttcgtctgatccgtcctaatcacagcagtcctacttctcctatctctcccagtcctagctgctggcatcactatactactaacagaccgcaacctcaacaccaccttcttcgaccccgccggaggaggagaccccattctataccaacacctattctgatttttcggtcaccctgaagtttatattcttatcctaccaggcttcggaataatctcccatattgtaacttactactccggaaaaaaagaaccatttggatacataggtatggtctgagctatgatatcaattggcttcctagggtttatcgtgtgagcacaccatatatttacagtaggaatagacgtagacacacgagcatatttcacctccgctaccataatcatcgctatccccaccggcgtcaaagtatttagctgactcgccacactccacggaagcaatatgaaatgatctgctgcagtgctctgagccctaggattcatctttcttttcaccgtaggtggcctgactggcattgtattagcaaactcatcactagacatcgtactacacgacacgtactacgttgtagctcacttccactatgtcctatcaataggagctgtatttgccatcataggaggcttcattcactgatttcccctattctcaggctacaccctagaccaaacctacgccaaaatccatttcactatcatattcatcggcgtaaatctaactttcttcccacaacactttctcggcctatccggaatgccccgacgttactcggactaccccgatgcatacaccacatgaaacatcctatcatctgtaggctcattcatttctctaacagcagtaatattaataattttcatgatttgagaagccttcgcttcgaagcgaaaagtcctaatagtagaagaaccctccataaacctggagtgactatatggatgccccccaccctaccacacattcgaagaacccgtatacataaaatctagacaaaaaaggaaggaatcgaaccccccaaagctggtttcaagccaaccccatggcctccatgactttttcaaaaaggtattagaaaaaccatttcataactttgtcaaagttaaattataggctaaatcctatatatcttaatggcacatgcagcgcaagtaggtctacaagacgctacttcccctatcatagaagagcttatcacctttcatgatcacgccctcataatcattttccttatctgcttcctagtcctgtatgcccttttcctaacactcacaacaaaactaactaatactaacatctcagacgctcaggaaatagaaaccgtctgaactatcctgcccgccatcatcctagtcctcatcgccctcccatccctacgcatcctttacataacagacgaggtcaacgatccctcccttaccatcaaatcaattggccaccaatggtactgaacctacgagtacaccgactacggcggactaatcttcaactcctacatacttcccccattattcctagaaccaggcgacctgcgactccttgacgttgacaatcgagtagtactcccgattgaagcccccattcgtataataattacatcacaagacgtcttgcactcatgagctgtccccacattaggcttaaaaacagatgcaattcccggacgtctaaaccaaaccactttcaccgctacacgaccgggggtatactacggtcaatgctctgaaatctgtggagcaaaccacagtttcatgcccatcgtcctagaattaattcccctaaaaatctttgaaatagggcccgtatttaccctatagcaccccctctaccccctctagagcccactgtaaagctaacttagcattaaccttttaagttaaagattaagagaaccaacacctctttacagtgaaatgccccaactaaatactaccgtatggcccaccataattacccccatactccttacactattcctcatcacccaactaaaaatattaaacacaaactaccacctacctccctcaccaaagcccataaaaataaaaaattataacaaaccctgagaaccaaaatgaacgaaaatctgttcgcttcattcattgcccccacaatcctaggcctacccgccgcagtactgatcattctatttccccctctattgatccccacctccaaatatctcatcaacaaccgactaatcaccacccaacaatgactaatcaaactaacctcaaaacaaataataaccatacacaacactaaaggacgaacctgatctcttatactagtatccttaatcatttttattgccacaactaacctcctcggactcctgcctcactcatttacaccaaccacccaactatctataaacctagccatggccatccccttatgagcgggcgcagtgattataggctttcgctctaagattaaaaatgccctagcccacttcttaccacaaggcacacctacaccccttatccccatactagttattatcgaaaccatcagcctactcattcaaccaatagccctggccgtacgcctaaccgctaacattactgcaggccacctactcatgcacctaattggaagcgccaccctagcaatatcaaccattaaccttccctctacacttatcatcttcacaattctaattctactgactatcctagaaatcgctgtcgccttaatccaagcctacgttttcacacttctagtaagcctctacctgcacgacaacacataatgacccaccaatcacatgcctatcatatagtaaaacccagcccatgacccctaacaggggccctctcagccctcctaatgacctccggcctagccatgtgatttcacttccactccataacgctcctcatactaggcctactaaccaacacactaaccatataccaatgatggcgcgatgtaacacgagaaagcacataccaaggccaccacacaccacctgtccaaaaaggccttcgatacgggataatcctatttattacctcagaagtttttttcttcgcaggatttttctgagccttttaccactccagcctagcccctaccccccaattaggagggcactggcccccaacaggcatcaccccgctaaatcccctagaagtcccactcctaaacacatccgtattactcgcatcaggagtatcaatcacctgagctcaccatagtctaatagaaaacaaccgaaaccaaataattcaagcactgcttattacaattttactgggtctctattttaccctcctacaagcctcagagtacttcgagtctcccttcaccatttccgacggcatctacggctcaacattttttgtagccacaggcttccacggacttcacgtcattattggctcaactttcctcactatctgcttcatccgccaactaatatttcactttacatccaaacaccactttggcttcgaagccgccgcctgatactggcattttgtagatgtggtttgactatttctgtatgtctccatctattgatgagggtcttactcttttagtataaatagtaccgttaacttccaattaactagttttgacaacattcaaaaaagagtaataaacttcgccttaattttaataatcaacaccctcctagccttactactaataattattacattttgactaccacaactcaacggctacatagaaaaatccaccccttacgagtgcggcttcgaccctatatcccccgcccgcgtccctttctccataaaattcttcttagtagctattaccttcttattatttgatctagaaattgccctccttttacccctaccatgagccctacaaacaactaacctgccactaatagttatgtcatccctcttattaatcatcatcctagccctaagtctggcctatgagtgactacaaaaaggattagactgaaccgaattggtatatagtttaaacaaaacgaatgatttcgactcattaaattatgataatcatatctaccaaatgcccctcatttacataaatattatactagcatttaccatctcacttctaggaatactagtatatcgctcacacctcatatcctccctactatgcctagaaggaataatactatcgctgttcattatagctactctcataaccctcaacacccactccctcttagccaatattgtgcctattgccatactagtctttgccgcctgcgaagcagcggtgggcctagccctactagtctcaatctccaacacatatggcctagactacgtacataacctaaacctactccaatgctaaaactaatcgtcccaacaattatattactaccactgacatgactttccaaaaaacacataatttgaatcaacacaaccacccacagcctaattattagcatcatccctctactattttttaaccaaatcaacaacaacctatttagctgttccccaaccttttcctccgaccccctaacaacccccctcctaatactaactacctgactcctacccctcacaatcatggcaagccaacgccacttatccagtgaaccactatcacgaaaaaaactctacctctctatactaatctccctacaaatctccttaattataacattcacagccacagaactaatcatattttatatcttcttcgaaaccacacttatccccaccttggctatcatcacccgatgaggcaaccagccagaacgcctgaacgcaggcacatacttcctattctacaccctagtaggctcccttcccctactcatcgcactgatttacactcacaacaccctaggctcactaaacattctactactcactctcactgcccaagaactatcaaactcctgagccaacaacttaatatgactagcttacacaatagcttttatagtaaagatacctctttacggactccacttatgactccctaaagcccatgtcgaagcccccatcgctgggtcaatagtacttgccgcagtactcttaaaactaggcggctatggtataatacgcctcacactcattctcaaccccctgacaaaacacatagcctaccccttccttgtactatccctatgaggcataattataacaagctccatctgcctacgacaaacagacctaaaatcgctcattgcatactcttcaatcagccacatagccctcgtagtaacagccattctcatccaaaccccctgaagcttcaccggcgcagtcattctcataatcgcccacggacttacatcctcattactattctgcctagcaaactcaaactacgaacgcactcacagtcgcatcataatcctctctcaaggacttcaaactctactcccactaatagctttttgatgacttctagcaagcctcgctaacctcgccttaccccccactattaacctactgggagaactctctgtgctagtaaccacgttctcctgatcaaatatcactctcctacttacaggactcaacatactagtcacagccctatactccctctacatatttaccacaacacaatggggctcactcacccaccacattaacaacataaaaccctcattcacacgagaaaacaccctcatgttcatacacctatcccccattctcctcctatccctcaaccccgacatcattaccgggttttcctcttgtaaatatagtttaaccaaaacatcagattgtgaatctgacaacagaggcttacgaccccttatttaccgagaaagctcacaagaactgctaactcatgcccccatgtctaacaacatggctttctcaacttttaaaggataacagctatccattggtcttaggccccaaaaattttggtgcaactccaaataaaagtaataaccatgcacactactataaccaccctaaccctgacttccctaattccccccatccttaccaccctcgttaaccctaacaaaaaaaactcatacccccattatgtaaaatccattgtcgcatccacctttattatcagtctcttccccacaacaatattcatgtgcctagaccaagaagttattatctcgaactgacactgagccacaacccaaacaacccagctctccctaagcttcaaactagactacttctccataatattcatccctgtagcattgttcgttacatggtcaatcatagaattctcactgtgatatataaactcagacccaaacattaatcagttcttcaaatatctactcatcttcctaattaccatactaatcttagttaccgctaacaacctattccaactgttcatcggctgagagggcgtaggaattatatccttcttgctcatcagttgatgatacgcccgagcagatgccaacacagcagccattcaagcaatcctatacaaccgtatcggcgatatcggtttcatcctcgccttagcatgatttatcctacactccaactcatgagacccacaacaaatagcccttctaaacgctaatccaagcctcaccccactactaggcctcctcctagcagcagcaggcaaatcagcccaattaggtctccacccctgactcccctcagccatagaaggccccaccccagtctcagccctactccactcaagcactatagttgtagcaggaatcttcttactcatccgcttccaccccctagcagaaaatagcccactaatccaaactctaacactatgcttaggcgctatcaccactctgttcgcagcagtctgcgcccttacacaaaatgacatcaaaaaaatcgtagccttctccacttcaagtcaactaggactcataatagttacaatcggcatcaaccaaccacacctagcattcctgcacatctgtacccacgccttcttcaaagccatactatttatgtgctccggatccatcatccacaaccttaacaatgaacaagatattcgaaaaataggaggactactcaaaaccatacctctcacttcaacctccctcaccattggcagcctagcattagcaggaatacctttcctcacaggtttctactccaaagaccacatcatcgaaaccgcaaacatatcatacacaaacgcctgagccctatctattactctcatcgctacctccctgacaagcgcctatagcactcgaataattcttctcaccctaacaggtcaacctcgcttccccacccttactaacattaacgaaaataaccccaccctactaaaccccattaaacgcctggcagccggaagcctattcgcaggatttctcattactaacaacatttcccccgcatcccccttccaaacaacaatccccctctacctaaaactcacagccctcgctgtcactttcctaggacttctaacagccctagacctcaactacctaaccaacaaacttaaaataaaatccccactatgcacattttatttctccaacatactcggattctaccctagcatcacacaccgcacaatcccctatctaggccttcttacgagccaaaacctgcccctactcctcctagacctaacctgactagaaaagctattacctaaaacaatttcacagcaccaaatctccacctccatcatcacctcaacccaaaaaggcataattaaactttacttcctctctttcttcttcccactcatcctaaccctactcctaatcacataacctattcccccgagcaatctcaattacaatatatacaccaacaaacaatgttcaaccagtaactactactaatcaacgcccataatcatacaaagcccccgcaccaataggatcctcccgaatcaaccctgacccctctccttcataaattattcagcttcctacactattaaagtttaccacaaccaccaccccatcatactctttcacccacagcaccaatcctacctccatcgctaaccccactaaaacactcaccaagacctcaacccctgacccccatgcctcaggatactcctcaatagccatcgctgtagtatatccaaagacaaccatcattccccctaaataaattaaaaaaactattaaacccatataacctcccccaaaattcagaataataacacacccgaccacaccgctaacaatcaatactaaacccccataaataggagaaggcttagaagaaaaccccacaaaccccattactaaacccacactcaacagaaacaaagcatacatcattattctcgcacggactacaaccacgaccaatgatacgaaaaaccatcgttgtatttcaactacaagaacaccaatgaccccaatacgcaaaattaaccccctaataaaattaattaaccactcattcatcgacctccccaccccatccaacatctccgcatgatgaaacttcggctcactccttggcgcctgcctgatcctccaaatcaccacaggactattcctagccatacactactcaccagacgcctcaaccgccttttcatcaatcgcccacatcactcgagacgtaaattatggctgaatcatccgctaccttcacgccaatggcgcctcaatattctttatctgcctcttcctacacatcgggcgaggcctatattacggatcatttctctactcagaaacctgaaacatcggcattatcctcctgcttgcaactatagcaacagccttcataggctatgtcctcccgtgaggccaaatatcattctgaggggccacagtaattacaaacttactatccgccatcccatacattgggacagacctagttcaatgaatctgaggaggctactcagtagacagtcccaccctcacacgattctttacctttcacttcatcttgcccttcattattgcagccctagcagcactccacctcctattcttgcacgaaacgggatcaaacaaccccctaggaatcacctcccattccgataaaatcaccttccacccctactacacaatcaaagacgccctcggcttacttctcttcattctctccttaatgacattaacactattctcaccagacctcctaggcgacccagacaattataccctagccaaccccttaaacacccctccccacatcaagcccgaatgatatttcctattcgcctacacaattctccgatccgtccctaacaagctaggaggcgtccttgccctattactatccatcctcatcctagcaataatccccatcctccatatatccaaacaacaaagcataatatttcgcccactaagccaatcactttattgactcctagccgcagacctcctcattctaacctgaatcggaggacaaccagtaagctacccttttaccatcattggacaagtagcatccgtactatacttcacaacaatcctaatcctaataccaactatctccctaattgaaaacaaaatactcaaatgggcctgtccttgtagtataaactaatacaccagtcttgtaaaccgaagatgaaaacctttttccaaggacaaatcagagaaaaagtctttaactccaccattagcacccaaagctaagattctaatttaaactattctctgttctttcatggggaagcagatttgggtaccacccaagtattgactcacccatcaacaaccgctatgtatttcgtacattactgccagccaccatgaatattgtacggtaccataaatacttgaccacctgtagtacataaaaacccaatccacatcaaaaccccctccccatgcttacaagcaagtacagcaatcaaccctcaactatcacacatcaactgcaactccaaagccacccctcacccactaggataccaacaaacctacccacccttaacagtacatagtacataaagccatttaccgtacatagcacattacagtcaaatcccttctcgtccccatggatgacccccctcagataggggtcccttgaccaccatcctccgtgaaatcaatatcccgcacaagagtgctactctcctcgctccgggcccataacacttgggggtagctaaagtgaactgtatccgacatctggttcctacttcagggtcataaagcctaaatagcccacacgttccccttaaataagacatcacgatg

SEQ ID NO: 511 - DNA, 16569 bp, Homo sapiens mitochondrial
  3107: "n" refers to a nucleotide at position 3107 of the Cambridge Reference Sequence (CRS, Anderson et al. 1981 Nature 290:457-465), later determined to be absent from the human mtDNA sequence according to the revised CRS (rCRS, Andrews et al. 1999 Nature Genetics 23:147); "n" therefore represents a single nucleotide deletion at a position corresponding to nucleotide 3107 of SEQ ID NO:1 as provided herein.
gatcacaggtctatcaccctattaaccactcacgggagctctccatgcatttggtattttcgtctggggggtatgcacgcgatagcattgcgagacgctggagccggagcaccctatgtcgcagtatctgtctttgattcctgcctcatcctattatttatcgcacctacgttcaatattacaggcgaacatacttactaaagtgtgttaattaattaatgcttgtaggacataataataacaattgaatgtctgcacagccactttccacacagacatcataacaaaaaatttccaccaaaccccccctcccccgcttctggccacagcacttaaacacatctctgccaaaccccaaaaacaaagaaccctaacaccagcctaaccagatttcaaattttatcttttggcggtatgcacttttaacagtcaccccccaactaacacattattttcccctcccactcccatactactaatctcatcaatacaacccccgcccatcctacccagcacacacacaccgctgctaaccccataccccgaaccaaccaaaccccaaagacaccccccacagtttatgtagcttacctcctcaaagcaatacactgaaaatgtttagacgggctcacatcaccccataaacaaataggtttggtcctagcctttctattagctcttagtaagattacacatgcaagcatccccgttccagtgagttcaccctctaaatcaccacgatcaaaagggacaagcatcaagcacgcagcaatgcagctcaaaacgcttagcctagccacacccccacgggaaacagcagtgattaacctttagcaataaacgaaagtttaactaagctatactaaccccagggttggtcaatttcgtgccagccaccgcggtcacacgattaacccaagtcaatagaagccggcgtaaagagtgttttagatcaccccctccccaataaagctaaaactcacctgagttgtaaaaaactccagttgacacaaaatagactacgaaagtggctttaacatatctgaacacacaatagctaagacccaaactgggattagataccccactatgcttagccctaaacctcaacagttaaatcaacaaaactgctcgccagaacactacgagccacagcttaaaactcaaaggacctggcggtgcttcatacccctctagaggagcctgttctgtaatcgataaaccccgatcaacctcaccacctcttgctcagcctatataccgccatcttcagcaaaccctgatgaaggctacaaagtaagcgcaagtacccacgtaaagacgttaggtcaaggtgtagcccatgaggtggcaagaaatgggctacattttctaccccagaaaactacgatagcccttatgaaacttaagggtcgaaggtggatttagcagtaaactgagagtagagtgcttagttgaacagggccctgaagcgcgtacacaccgcccgtcaccctcctcaagtatacttcaaaggacatttaactaaaacccctacgcatttatatagaggagacaagtcgtaacatggtaagtgtactggaaagtgcacttggacgaaccagagtgtagcttaacacaaagcacccaacttacacttaggagatttcaacttaacttgaccgctctgagctaaacctagccccaaacccactccaccttactaccagacaaccttagccaaaccatttacccaaataaagtataggcgatagaaattgaaacctggcgcaatagatatagtaccgcaagggaaagatgaaaaattatagccaagcataatatagcaaggactaacccctataccttctgcataatgaattaactagaaataactttgcaaggagagccaaagctaagacccccgaaaccagacgagctacctaagaacagctaaaagagcacacccgtctatgtagcaaaatagtgggaagatttataggtagaggcgacaaacctaccgagcctggtgatagctggttgtccaagatagaatcttagttcaactttaaatttgcccacagaaccctctaaatccccttgtaaatttaactgttagtccaaagaggaacagctctttggacactaggaaaaaaccttgtagagagagtaaaaaatttaacacccatagtaggcctaaaagcagccaccaattaagaaagcgttcaagctcaacacccactacctaaaaaatcccaaacatataactgaactcctcacacccaattggaccaatctatcaccctatagaagaactaatgttagtataagtaacatgaaaacattctcctccgcataagcctgcgtcagattaaaacactgaactgacaattaacagcccaatatctacaatcaaccaacaagtcattattaccctcactgtcaacccaacacaggcatgctcataaggaaaggttaaaaaaagtaaaaggaactcggcaaatcttaccccgcctgtttaccaaaaacatcacctctagcatcaccagtattagaggcaccgcctgcccagtgacacatgtttaacggccgcggtaccctaaccgtgcaaaggtagcataatcacttgttccttaaatagggacctgtatgaatggctccacgagggttcagctgtctcttacttttaaccagtgaaattgacctgcccgtgaagaggcgggcatgacacagcaagacgagaagaccctatggagctttaatttattaatgcaaacagtacctaacaaacccacaggtcctaaactaccaaacctgcattaaaaatttcggttggggcgacctcggagcagaacccaacctccgagcagtacatgctaagacttcaccagtcaaagcgaactactatactcaattgatccaataacttgaccaacggaacaagttaccctagggataacagcgcaatcctattctagagtccatatcaacaatagggtttacgacctcgatgttggatcaggacatcccgatggtgcagccgctattaaaggttcgtttgttcaacgattaaagtcctacgtgatctgagttcagaccggagtaatccaggtcggtttctatctacnttcaaattcctccctgtacgaaaggacaagagaaataaggcctacttcacaaagcgccttcccccgtaaatgatatcatctcaacttagtattatacccacacccacccaagaacagggtttgttaagatggcagagcccggtaatcgcataaaacttaaaactttacagtcagaggttcaattcctcttcttaacaacatacccatggccaacctcctactcctcattgtacccattctaatcgcaatggcattcctaatgcttaccgaacgaaaaattctaggctatatacaactacgcaaaggccccaacgttgtaggcccctacgggctactacaacccttcgctgacgccataaaactcttcaccaaggagcccctaaaacccgccacatctaccatcaccctctacatcaccgccccgaccttagctctcaccatcgctcttctactatgaacccccctccccatacccaaccccctggtcaacctcaacctaggcctcctatttattctagccacctctagcctagccgtttactcaatcctctgatcagggtgagcatcaaactcaaactacgccctgatcggcgcactgcgagcagtagcccaaacaatctcatatgaagtcaccctagccatcattctactatcaacattactaataagtggctcctttaacctctccacccttatcacaacacaagaacacctctgattactcctgccatcatgacccttggccataatatgatttatctccacactagcagagaccaaccgaacccccttcgaccttgccgaaggggagtccgaactagtctcaggcttcaacatcgaatacgccgcaggccccttcgccctattcttcatagccgaatacacaaacattattataataaacaccctcaccactacaatcttcctaggaacaacatatgacgcactctcccctgaactctacacaacatattttgtcaccaagaccctacttctaacctccctattcttatgaattcgaacagcatacccccgattccgctacgaccaactcatacacctcctatgaaaaaacttcctaccactcaccctagcattacttatatgatatgtctccatacccattacaatctccagcattccccctcaaacctaagaaatatgtctgataaaagagttactttgatagagtaaataataggagcttaaacccccttatttctaggactatgagaatcgaacccatccctgagaatccaaaattctccgtgccacctatcacaccccatcctaaagtaaggtcagctaaataagctatcgggcccataccccgaaaatgttggttatacccttcccgtactaattaatcccctggcccaacccgtcatctactctaccatctttgcaggcacactcatcacagcgctaagctcgcactgattttttacctgagtaggcctagaaataaacatgctagcttttattccagttctaaccaaaaaaataaaccctcgttccacagaagctgccatcaagtatttcctcacgcaagcaaccgcatccataatccttctaatagctatcctcttcaacaatatactctccggacaatgaaccataaccaatactaccaatcaatactcatcattaataatcataatggctatagcaataaaactaggaatagccccctttcacttctgagtcccagaggttacccaaggcacccctctgacatcccgcctgcttcttctcacatgacaaaaactagcccccatctcaatcatataccaaatctctccctcactaaacgtaagccttctcctcactctctcaatcttatccatcatagcaggcagttgaggtggattaaaccaaacccagctacgcaaaatcttagcatactcctcaattacccacataggatgaataatagcagttctaccgtacaaccctaacataaccattcttaatttaactatttatattatcctaactactaccgcattcctactactcaacttaaactccagcaccacgaccctactactatctcgcacctgaaacaagctaacatgactaacacccttaattccatccaccctcctctccctaggaggcctgcccccgctaaccggctttttgcccaaatgggccattatcgaagaattcacaaaaaacaatagcctcatcatccccaccatcatagccaccatcaccctccttaacctctacttctacctacgcctaatctactccacctcaatcacactactccccatatctaacaacgtaaaaataaaatgacagtttgaacatacaaaacccaccccattcctccccacactcatcgcccttaccacgctactcctacctatctccccttttatactaataatcttatagaaatttaggttaaatacagaccaagagccttcaaagccctcagtaagttgcaatacttaatttctgtaacagctaaggactgcaaaaccccactctgcatcaactgaacgcaaatcagccactttaattaagctaagcccttactagaccaatgggacttaaacccacaaacacttagttaacagctaagcaccctaatcaactggcttcaatctacttctcccgccgccgggaaaaaaggcgggagaagccccggcaggtttgaagctgcttcttcgaatttgcaattcaatatgaaaatcacctcggagctggtaaaaagaggcctaacccctgtctttagatttacagtccaatgcttcactcagccattttacctcacccccactgatgttcgccgaccgttgactattctctacaaaccacaaagacattggaacactatacctattattcggcgcatgagctggagtcctaggcacagctctaagcctccttattcgagccgagctgggccagccaggcaaccttctaggtaacgaccacatctacaacgttatcgtcacagcccatgcatttgtaataatcttcttcatagtaatacccatcataatcggaggctttggcaactgactagttcccctaataatcggtgcccccgatatggcgtttccccgcataaacaacataagcttctgactcttacctccctctctcctactcctgctcgcatctgctatagtggaagccggagcaggaacaggttgaacagtctaccctcccttagcagggaactactcccaccctggagcctccgtagacctaaccatcttctccttacacctagcaggtgtctcctctatcttaggggccatcaatttcatcacaacaattatcaatataaaaccccctgccataacccaataccaaacgcccctcttcgtctgatccgtcctaatcacagcagtcctacttctcctatctctcccagtcctagctgctggcatcactatactactaacagaccgcaacctcaacaccaccttcttcgaccccgccggaggaggagaccccattctataccaacacctattctgatttttcggtcaccctgaagtttatattcttatcctaccaggcttcggaataatctcccatattgtaacttactactccggaaaaaaagaaccatttggatacataggtatggtctgagctatgatatcaattggcttcctagggtttatcgtgtgagcacaccatatatttacagtaggaatagacgtagacacacgagcatatttcacctccgctaccataatcatcgctatccccaccggcgtcaaagtatttagctgactcgccacactccacggaagcaatatgaaatgatctgctgcagtgctctgagccctaggattcatctttcttttcaccgtaggtggcctgactggcattgtattagcaaactcatcactagacatcgtactacacgacacgtactacgttgtagctcacttccactatgtcctatcaataggagctgtatttgccatcataggaggcttcattcactgatttcccctattctcaggctacaccctagaccaaacctacgccaaaatccatttcactatcatattcatcggcgtaaatctaactttcttcccacaacactttctcggcctatccggaatgccccgacgttactcggactaccccgatgcatacaccacatgaaacatcctatcatctgtaggctcattcatttctctaacagcagtaatattaataattttcatgatttgagaagccttcgcttcgaagcgaaaagtcctaatagtagaagaaccctccataaacctggagtgactatatggatgccccccaccctaccacacattcgaagaacccgtatacataaaatctagacaaaaaaggaaggaatcgaaccccccaaagctggtttcaagccaaccccatggcctccatgactttttcaaaaaggtattagaaaaaccatttcataactttgtcaaagttaaattataggctaaatcctatatatcttaatggcacatgcagcgcaagtaggcctacaagacgctacttcccctatcatagaagagcttatcacctttcatgatcacgccctcataatcattttccttatctgcttcctagtcctgtatgcccttttcctaacactcacaacaaaactaactaatactaacatctcagacgctcaggaaatagaaaccgtctgaactatcctgcccgccatcatcctagtcctcatcgccctcccatccctacgcatcctttacataacagacgaggtcaacgatccctcccttaccatcaaatcaattggccaccaatggtactgaacctacgagtacaccgactacggcggactaatcttcaactcctacatacttcccccattattcctagaaccaggcgacctgcgactccttgacgttgacaatcgagtagtactcccgattgaagcccccattcgtataataattacatcacaagacgtcttgcactcatgagctgtccccacattaggcttaaaaacagatgcaattcccggacgtctaaaccaaaccactttcaccgctacacgaccgggggtatactacggtcaatgctctgaaatctgtggagcaaaccacagtttcatgcccatcgtcctagaattaattcccctaaaaatctttgaaatagggcccgtatttaccctatagcaccccctctaccccctctagagcccactgtaaagctaacttagcattaaccttttaagttaaagattaagagaaccaacacctctttacagtgaaatgccccaactaaatactaccgtatggcccaccataattacccccatactccttacactattcctcatcacccaactaaaaatattaaacacaaactaccacctacctccctcaccaaagcccataaaaataaaaaattataacaaaccctgagaaccaaaatgaacgaaaatctgttcgcttcattcattgcccccacaatcctaggcctacccgccgcagtactgatcattctatttccccctctattgatccccacctccaaatatctcatcaacaaccgactaatcaccacccaacaatgactaatcaaactaacctcaaaacaaatgataaccatacacaacactaaaggacgaacctgatctcttatactagtatccttaatcatttttattgccacaactaacctcctcggactcctgcctcactcatttacaccaaccacccaactatctataaacctagccatggccatccccttatgagcgggcgcagtgattataggctttcgctctaagattaaaaatgccctagcccacttcttaccacaaggcacacctacaccccttatccccatactagttattatcgaaaccatcagcctactcattcaaccaatagccctggccgtacgcctaaccgctaacattactgcaggccacctactcatgcacctaattggaagcaccaccctagcaatatcaaccattaaccttccctctacacttatcatcttcacaattctaattctactgactatcctagaaatcgctgtcgccttaatccaagcctacgttttcacacttctagtaagcctctacctgcacgacaacacataatgacccaccaatcacatgcctatcatatagtaaaacccagcccatgacccctaacaggggccctctcagccctcctaatgacctccggcctagccatgtgatttcacttccactccataacgctcctcatactaggcctactaaccaacacactaaccatataccaatgatggcgcgatgtaacacgagaaagcacataccaaggccaccacacaccacctgtccaaaaaggccttcgatacgggataatcctatttattacctcagaagtttttttcttcgcaggatttttctgagccttttaccactccagcctagcccctaccccccaattaggagggcactggcccccaacaggcatcaccccgctaaatcccctagaagtcccactcctaaacacatccgtattactcgcatcaggagtatcaatcacctgagctcaccatagtctaatagaaaacaaccgaaaccaaataattcaagcactgctcattacaattttactgggtctctattttaccctcctacaagcctcagagtacttcgagtctcccttcaccatttccgacggcatctacggctcaacattttttgtagccacaggcttccacggacttcacgtcattattggctcaactttcctcactatctgcttcatccgccaactaatatttcactttacatccaaacatcactttggcttcgaagccgccgcctgatactggcattttgtagatgtggtttgactatttctgtatgtctccatctattgatgagggtcttactcttttagtataaatagtaccgttaacttccaattaactagttttgacaacattcaaaaaagagtaataaacttcgccttaattttaataatcaacaccctcctagccttactactaataattattacattttgactaccacaactcaacggctacatagaaaaatccaccccttacgagtgcggcttcgaccctatatcccccgcccgcgtccctttctccataaaattcttcttagtagctattaccttcttattatttgatctagaaattgccctccttttacccctaccatgagccctacaaacaactaacctgccactaatagttatgtcatccctcttattaatcatcatcctagccctaagtctggcctatgagtgactacaaaaaggattagactgaaccgaattggtatatagtttaaacaaaacgaatgatttcgactcattaaattatgataatcatatttaccaaatgcccctcatttacataaatattatactagcatttaccatctcacttctaggaatactagtatatcgctcacacctcatgtcctccctactatgcctagaaggaataatactatcgctgttcattatagctactctcataaccctcaacacccactccctcttagccaatattgtgcctattgccatactagtctttgccgcctgcgaagcagcggtgggcctagccctactagtctcaatctccaacacatatggcctagactacgtacataacctaaacctactccaatgctaaaactaatcgtcccaacaattatattactaccactgacatgactttccaaaaaacacataatttgaatcaacacaaccacccacagcctaattattagcatcatccctctactattttttaaccaaatcaacaacaacctatttagctgttccccaaccttttcctccgaccccctaacaacccccctcctaatactaactacctgactcctacccctcacaatcatggcaagccaacgccacttatccagtgaaccactatcacgaaaaaaactctacctctctatactaatctccctacaaatctccttaattataacattcacagccacagaactaatcatattttatatcttcttcgaaaccacacttatccccaccttggctatcatcacccgatgaggcaaccagccagaacgcctgaacgcaggcacatacttcctattctacaccctagtaggctcccttcccctactcatcgcactaatttacactcacaacaccctaggctcactaaacattctactactcaccctcactgcccaagaactatcaaactcctgagccaacaacttaatatgactagcttacacaatagcttttatagtaaagatacctctttacggactccacttatgactccctaaagcccatgtcgaagcccccatcgctgggtcaatagtacttgccgcagtactcttgaaactaggcggctatggtataatacgcctcacactcattctcaaccccctgacaaaacacatagcctaccccttccttgtactatccctatgaggcataattataacaagctccatctgcctacgacaaacagacctaaaatcgctcattgcatactcttcaatcagccacatagccctcgtagtaacagccattctcatccaaaccccctgaagcttcaccggcgcagtcattctcataatcgcccacggacttacatcctcattactattctgcctagcaaactcaaactacgaacgcactcacagtcgcatcataatcctctctcaaggacttcaaactctactcccactaatagctttttgatgacttttagcaagcctcgctaacctcgccttaccccccactattaacctactgggagaactctctgtgctagtaaccacgttctcctgatcaaatatcactctcctacttacaggactcaacatactagtcacagccctatactccctctacatatttaccacaacacaatggggctcactcacccaccacattaacaacataaaaccctcattcacacgagaaaacaccctcatgttcatacacctatcccccattctcctcctatccctcaaccccgacatcattaccgggttttcctcttgtaaatatagtttaaccaaaacatcagattgtgaatctgacaacagaggcttacgaccccttatttaccgagaaagctcacaagaactgctaactcatgcccccatgtctaacaacatggctttctcaacttttaaaggataacagctatccattggtcttaggccccaagaattttggtgcaactccaaataaaagtaataaccatgcacactactataaccaccctaaccctaacttccctaattccccccatccttaccaccctcgttaaccctaacaaaaaaaactcatacccccattatgtaaaatccattgtcgcatccacctttattatcagtctcttccccacaacaatattcatgtgcctagaccaagaagttattatctcgaactgacactgagccacaacccaaacaacccagctctccctaagcttcaaactagactacttctccataatattcatccctgtagcattgttcgttacatggtccatcatagaattctcactgtgatatataaactcagacccaaacattaatcagttcttcaaatatctactcatcttcctaattaccatactaatcttagttaccgctaacaacctattccaactgttcatcggctgagagggcgtaggaattatatccttcttgctcatcagttgatgacacgcccgagcagatgccaacacagcagccattcaagcaatcctatacaaccgtatcggcgatatcggtttcatcctcgccttagcatgatttatcctacactccaactcatgagacccacaacaaatagcccttctaaacgctaatccaagcctcaccccactactaggcctcctcctagcagcagcaggcaaatcagcccaattaggtctccacccctgactcccctcagccatagaaggccccaccccagtctcagccctactccactcaagcactatagttgtagcaggaatcttcttactcatccgcttccaccccctagcagaaaatagcccactaatccaaactctaacactatgcttaggcgctatcaccactctgttcgcagcagtctgcgcccttacacaaaatgacatcaaaaaaatcgtagccttctccacttcaagtcaactaggactcataatagttacaatcggcatcaaccaaccacacctagcattcctgcacatctgtacccacgccttcttcaaagccatactatttatgtgctccgggtccatcatccacaaccttaacaatgaacaagatattcgaaaaatgggaggactactcaaaaccatacctctcacttcaacctccctcaccattggcagcctagcattagcaggaatacctttcctcacaggtttctactccaaagaccacatcatcgaaaccgcaaacatatcatacacaaacgcctgagccctatctattactctcatcgctacctccctgacaagcgcctatagcactcgaataattcttctcaccctaacaggtcaacctcgcttccccacccttactaacattaacgaaaataaccccaccctactaaaccccattaaacgcctggcagccggaagcctattcgcaggatttctcatcactaacaacatttcccccgcatcccccttccaaacaacaatccccctctacctaaaactcacagccctcgctgtcactttcctaggacttctaacagccctagacctcaactacctaaccaacaaacttaaaataaaatccccactatgcacattttatttctccaacatactcggattctaccctagcatcacacaccgcacaatcccctatctaggccttcttacgagccaaaacctgcccctactcctcctagacctaacctgactagaaaagctattacctaaaacaatttcacagcaccaaatctccacctccatcatcacctcaacccaaaaaggcataattaaactttacttcctctctttcttcttcccactcatcctaaccctactcctaatcacataacctattcccccgagcaatttcaattacaatatatacaccaacaaacaatgttcaaccagtaactactactaatcaacgcccataatcatacaaagcccccgcaccaataggatcctcccgaatcaaccctgacccctctccttcataaattattcagcttcctacactattaaagtttaccacaaccaccaccccatcatactctttcacccacagcaccaatcctacctccatcgctaaccccactaaaacactcaccaagacctcaacccctgacccccatgcctcaggatactcctcaatagccatcgctgtagtatatccaaagacaaccatcattccccctaaataaattaaaaaaactattaaacccatataacctcccccaaaattcagaataataacacacccgaccacaccgctaacaatcaatactaaacccccataaataggagaaggcttagaagaaaaccccacaaaccccattactaaacccacactcaacagaaacaaagcatacatcattattctcgcacggactacaaccacgaccaatgatatgaaaaaccatcgttgtatttcaactacaagaacaccaatgaccccaatacgcaaaattaaccccctaataaaattaattaaccactcactcatcgacctccccaccccatccaacatctccgcatgatgaaacttcggctcactccttggcgcctgcctgatcctccaaatcaccacaggactattcctagccatgcactactcaccagacgcctcaaccgccttttcatcaatcgcccacatcactcgagacgtaaattatggctgaatcatccgctaccttcacgccaatggcgcctcaatattctttatctgcctcttcctacacatcgggcgaggcctatattacggatcatttctctactcagaaacctgaaacatcggcattatcctcctgcttgcaactatagcaacagccttcataggctatgtcctcccgtgaggccaaatatcattctgaggggccacagtaattacaaacttactatccgccatcccatacattgggacagacctagttcaatgaatctgaggaggctactcagtagacagtcccaccctcacacgattctttacctttcacttcatcttgcccttcattattgcagccctagcagcactccacctcctattcttgcacgaaacgggatcaaacaaccccctaggaatcacctcccattccgataaaatcaccttccacccttactacacaatcaaagacgccctcggcttacttctcttccttctctccttaatgacattaacactattctcaccagacctcctaggcgacccagacaattataccctagccaaccccttaaacacccctccccacatcaagcccgaatgatatttcctattcgcctacacaattctccgatccgtccctaacaaactaggaggcgtccttgccctattactatccatcctcatcctagcaataatccccatcctccatatatccaaacaacaaagcataatatttcgcccactaagccaatcactttattgactcctagccgcagacctcctcattctaacctgaatcggaggacaaccagtaagctacccttttaccatcattggacaagtagcatccgtactatacttcacaacaatcctaatcctaataccaactatctccctaattgaaaacaaaatactcaaatgggcctgtccttgtagtataaactaatacaccagtcttgtaaaccggagatgaaaacctttttccaaggacaaatcagagaaaaagtctttaactccaccattagcacccaaagctaagattctaatttaaactattctctgttctttcatggggaagcagatttgggtaccacccaagtattgactcacccatcaacaaccgctatgtatttcgtacattactgccagccaccatgaatattgtacggtaccataaatacttgaccacctgtagtacataaaaacccaatccacatcaaaaccccctccccatgcttacaagcaagtacagcaatcaaccctcaactatcacacatcaactgcaactccaaagccacccctcacccactaggataccaacaaacctacccacccttaacagtacatagtacataaagccatttaccgtacatagcacattacagtcaaatcccttctcgtccccatggatgacccccctcagataggggtcccttgaccaccatcctccgtgaaatcaatatcccgcacaagagtgctactctcctcgctccgggcccataacacttgggggtagctaaagtgaactgtatccgacatctggttcctacttcagggtcataaagcctaaatagcccacacgttccccttaaataagacatcacgatg

SEQ ID NO: 512 - DNA, 16569 bp, Homo sapiens mitochondrial
  3107: "n" refers to a nucleotide at position 3107 of the Cambridge Reference Sequence (CRS, Anderson et al. 1981 Nature 290:457-465), later determined to be absent from the human mtDNA sequence according to the revised CRS (rCRS, Andrews et al. 1999 Nature Genetics 23:147); "n" therefore represents a single nucleotide deletion at a position corresponding to nucleotide 3107 of SEQ ID NO:1 as provided herein.
gatcacaggtctatcaccctattaaccactcacgggagctctccatgcatttggtattttcgtctggggggtatgcacgcgatagcattgcgagacgctggagccggagcaccctatgtcgcagtatctgtctttgattcctgcctcatcctattatttatcgcacctacgttcaatattacaggcgaacatacttactaaagtgtgttaattaattaatgcttgtaggacataataataacaattgaatgtctgcacagccactttccacacagacatcataacaaaaaatttccaccaaaccccccctcccccgcttctggccacagcacttaaacacatctctgccaaaccccaaaaacaaagaaccctaacaccagcctaaccagatttcaaattttatcttttggcggtatgcacttttaacagtcaccccccaactaacacattattttcccctcccactcccatactactaatctcatcaatacaacccccgcccatcctacccagcacacacacaccgctgctaaccccataccccgaaccaaccaaaccccaaagacaccccccacagtttatgtagcttacctcctcaaagcaatacactgaaaatgtttagacgggctcacatcaccccataaacaaataggtttggtcctagcctttctattagctcttagtaagattacacatgcaagcatccccattccagtgagttcaccctctaaatcaccacgatcaaaagggacaagcatcaagcacgcagcaatgcagctcaaaacgcttagcctagccacacccccacgggaaacagcagtgattaacctttagcaataaacgaaagtttaactaagctatactaaccccagggttggtcaatttcgtgccagccaccgcggtcacacgattaacccaagtcaatagaagccggcgtaaagagtgttttagatcaccccctccccaataaagctaaaactcacctgagttgtaaaaaactccagttgacacaaaatagactacgaaagtggctttaacatatctgaacacacaatagctaagacccaaactgggattagataccccactatgcttagccctaaacctcaacagttaaatcaacaaaactgctcgccagaacactacgagccacagcttaaaactcaaaggacctggcggtgcttcatatccctctagaggagcctgttctgtaatcgataaaccccgatcaacctcaccaccccttgctcagcctatataccgccatcttcagcaaaccctgatgaaggctacaaagtaagcgcaagtacccacgtaaagacgttaggtcaaggtgtagcccatgaggtggcaagaaatgggctacattttctaccccagaaaactacgatagcccttatgaaacttaagggtcgaaggtggatttagcagtaaactgagagtagagtgcttagttgaacagggccctgaagcgcgtacacaccgcccgtcaccctcctcaagtatacttcaaaggacatttaactaaaacccctacgcatttatatagaggagacaagtcgtaacatggtaagtgtactggaaagtgcacttggacgaaccagagtgtagcttaacacaaagcacccaacttacacttaggagatttcaacttaacttgaccgctctgagctaaacctagccccaaacccactccaccttactaccagacaaccttagccaaaccatttacccaaataaagtataggcgatagaaattgaaacctggcgcaatagatatagtaccgcaagggaaagatgaaaaattataaccaagcataatatagcaaggactaacccctataccttctgcataatgaattaactagaaataactttgcaaggagagccaaagctaagacccccgaaaccagacgagctacctaagaacagctaaaagagcacacccgtctatgtagcaaaatagtgggaagatttataggtagaggcgacaaacctaccgagcctggtgatagctggttgtccaagatagaatcttagttcaactttaaatttgcccacagaaccctctaaatccccttgtaaatttaactgttagtccaaagaggaacagctctttggacactaggaaaaaaccttgtagagagagtaaaaaatttaacacccatagtaggcctaaaagcagccaccaattaagaaagcgttcaagctcaacacccactacctaaaaaatcccaaacatataactgaactcctcacacccaattggaccaatctatcaccctatagaagaactaatgttagtataagtaacatgaaaacattctcctccgcataagcctgcgtcagattaaaacactgaactgacaattaacagcccaatatctacaatcaaccaacaagtcattattaccctcactgtcaacccaacacaggcatgctcataaggaaaggttaaaaaaagtaaaaggaactcggcaaatcttaccccgcctgtttaccaaaaacatcacctctagcatcaccagtattagaggcaccgcctgcccagtgacacatgtttaacggccgcggtaccctaaccgtgcaaaggtagcataatcacttgttccttaaatagggacctgtatgaatggctccacgagggttcagctgtctcttacttttaaccagtgaaattgacctgcccgtgaagaggcgggcatgacacagcaagacgagaagaccctatggagctttaatttattaatgcaaacagtacctaacaaacccacaggtcctaaactaccaaacctgcattaaaaatttcggttggggcgacctcggagcagaacccaacctccgagcagtacatgctaagacttcaccagtcaaagcgaactactatactcaattgatccaataacttgaccaacggaacaagttaccctagggataacagcgcaatcctattctagagtccatatcaacaatagggtttacgacctcgatgttggatcaggacatcccgatggtgcagccgctattaaaggttcgtttgttcaacgattaaagtcctacgtgatctgagttcagaccggagtaatccaggtcggtttctatctacnttcaaattcctccctgtacgaaaggacaagagaaataaggcctacttcacaaagcgccttcccccgtaaatgatatcatctcaacttagtattatacccacacccacccaagaacagggtttgttaagatggcagagcccggtaatcgcataaaacttaaaactttacagtcagaggttcaattcctcttcttaacaacatacccatggccaacctcctactcctcattgtacccattctaatcgcaatggcattcctaatgcttaccgaacgaaaaattctaggctatatacaactacgcaaaggccccaacgttgtaggcccctacgggctactacaacccttcgctgacgccataaaactcttcaccaaagagcccctaaaacccgccacatctgccatcaccctctacatcaccgccccgaccttagctctcaccatcgctcttctactatgaacccccctccccatacccaaccccctggtcaacctcaacctaggcctcctatttattctagccacctctagcctagccgtttactcaatcctctgatcagggtgagcatcaaactcaaactacgccctgatcggcgcactgcgagcagtagcccaaacaatctcatatgaagtcaccctagccatcattctactatcaacattactaataagtggctcctttaacctctccacccttatcacaacacaagaacacctctgattactcctgccatcatgacccttggccataatatgatttatctccacactagcagagaccaaccgaacccccttcgaccttgccgaaggggagtccgaactagtctcaggcttcaacatcgaatacgccgcaggccctttcgccctattcttcatagccgaatacacaaacattattataataaacaccctcaccactacaatcttcctaggaacaacatatgacgcactctcccctgaactctacacaacatattttgtcaccaagaccctacttctaacctccctgttcttatgaattcgaacagcatacccccgattccgctacgaccaactcatacacctcctatgaaaaaacttcctaccactcaccctagcattacttatatgatatgtctccatacccattacaatctccagcattccccctcaaacctaagaaatatgtctgataaaagagttactttgatagagtaaataataggagcttaaacccccttatttctaggactatgagaatcgaacccatccctgagaatccaaaattctccgtgccacctatcacaccccatcctaaagtaaggtcagctaaataagctatcgggcccataccccgaaaatgttggttatacccttcccgtactaattaatcccctggcccaacccgtcatctactctaccatctttgcaggcacactcatcacagcgctaagctcgcactgattttttacctgagtaggcctagaaataaacatgctagcttttattccagttctaaccaaaaaaataaaccctcgttccacagaagctgccatcaagtatttcctcacgcaagcaaccgcatccataatccttctaatagctatcctcttcaacaatatactctccggacaatgaaccataaccaatactaccaatcaatactcatcattaataatcataatggctatagcaataaaactaggaatagccccctttcacttctgagtcccagaggttacccaaggcacccctctgacatccggcctgcttcttctcacatgacaaaaactagcccccatctcaatcatataccaaatctctccctcactaaacgtaagccttctcctcactctctcaatcttatccatcatagcaggcagttgaggtggattaaaccaaacccagctacgcaaaatcttagcatactcctcaattacccacataggatgaataatagcaattctaccgtacaaccctaacataaccattcttaatttaactatttatattatcctaactactaccgcattcctactactcaacttaaactccagcaccacgaccctactactatctcgcacctgaaacaagctaacatgactaacacccttaattccatccaccctcctctccctaggaggcctgcccccgctaaccggctttttgcccaaatgggccattatcgaagaattcacaaaaaacaatagcctcatcatccccaccatcatagccaccatcaccctccttaacctctacttctacctacgcctaatctactccacctcaatcacactactccccatatctaacaacgtaaaaataaaatgacagtttgaacatacaaaacccaccccattcctccccacactcatcacccttaccacgctactcctacctatctccccttttatactaataatcttatagaaatttaggttaaatacagaccaagagccttcaaagccctcagtaagttgcaatacttaatttctgtaacagctaaggactgcaaaaccccactctgcatcaactgaacgcaaatcagccactttaattaagctaagcccttactagaccaatgggacttaaacccacaaacacttagttaacagctaagcaccctaatcaactggcttcaatctacttctcccgccgccgggaaaaaaggcgggagaagccccggcaggtttgaagctgcttcttcgaatttgcaattcaatatgaaaatcacctcggagctggtaaaaagaggcctaacccctgtctttagatttacagtccaatgcttcactcagccattttacctcacccccactgatgttcgccgaccgttgactattctctacaaaccacaaagacattggaacactatacctattattcggcgcatgagctggagtcctaggcacagctctaagcctccttattcgagccgagctgggccagccaggcaaccttctaggtaacgaccacatctacaacgttatcgtcacagcccatgcatttgtaataatcttcttcatagtaatacccatcataatcggaggctttggcaactgactagttcccctaataatcggtgcccccgatatggcgtttccccgcataaacaacataagcttctgactcttacctccctctctcctactcctgctcgcatctgctatagtggaggccggagcaggaacaggttgaacagtctaccctcccttagcagggaactactcccaccctggagcctccgtagacctaaccatcttctccttacacctagcaggtgtctcctctatcttaggggccatcaatttcatcacaacaattatcaatataaaaccccctgccataacccaataccaaacgcccctcttcgtctgatccgtcctaatcacagcagtcctacttctcctatctctcccagtcctagctgctggcatcactatattactaacagaccgcaacctcaacaccaccttcttcgaccccgccggaggaggagaccccattctataccaacacctattctgatttttcggtcaccctgaagtttatattcttatcctaccaggcttcggaataatctcccatattgtaacttactactccggaaaaaaagaaccatttggatacataggtatggtctgagctatgatatcaattggcttcctagggtttatcgtgtgagcacaccatatatttacagtaggaatagacgtagacacacgagcatatttcacctccgctaccataatcatcgctatccccaccggcgtcaaagtatttagctgactcgccacactccacggaagcaatatgaaatgatctgctgcagtgctctgagccctaggattcatctttcttttcaccgtaggtggcctgactggcattgtattagcaaactcatcactagacatcgtactacacgacacgtactacgttgtagctcacttccactatgtcctatcaataggagctgtatttgccatcataggaggcttcattcactgatttcccctattctcaggctacaccctagaccaaacctacgccaaaatccatttcactatcatattcatcggcgtaaatctaactttcttcccacaacactttctcggcctatccggaatgccccgacgttactcggactaccccgatgcatacaccacatgaaacatcctatcatctgtaggctcattcatttctctaacagcagtaatattaataattttcatgatttgagaagccttcgcttcgaagcgaaaagtcctaatagtagaagaaccctccataaacctggagtgactatatggatgccccccaccctaccacacattcgaagaacccgtatacataaaatctagacaaaaaaggaaggaatcgaaccccccaaagctggtttcaagccaaccccatggcctccatgactttttcaaaaaggtattagaaaaaccatttcataactttgtcaaagttaaattataggctaaatcctatatatcttaatggcacatgcagcgcaagtaggtctacaagacgctacttcccctatcatagaagagcttatcacctttcatgatcacgccctcataatcattttccttatctgcttcctagtcctgtatgcccttttcctaacactcacaacaaaactaactaatactaacatctcagacgctcaggaaatagaaaccgtctgaactatcctgcccgccatcatcctagtcctcatcgccctcccatccctacgcatcctttacataacagacgaggtcaacgatccctcccttaccatcaaatcaattggccaccaatggtactgaacctacgagtacaccgactacggcggactaatcttcaactcctacatacttcccccattattcctagaaccaggcgacctgcgactccttgacgttgacaatcgagtagtactcccgattgaagcccccattcgtataataattacatcacaagacgtcttgcactcatgagctgtccccacattaggcttaaaaacagatgcaattcccggacgtctaaaccaaaccactttcaccgctacacgaccgggggtatactacggtcaatgctctgaaatctgtggagcaaaccacagtttcatgcccatcgtcctagaattaattcccctaaaaatctttgaaataggacccgtatttaccctatagcaccccctctaccccctctagagcccactgtaaagctaacttagcattaaccttttaagttaaagattaagagaaccaacacctctttacagtgaaatgccccaactaaatactaccgtatggcccaccataattacccccatactccttacactattcctcatcacccaactaaaaatattaaacacaaactaccacctacctccctcaccaaagcccataaaaataaaaaattataacaaaccctgagaaccaaaatgaacgaaaatctgttcgcttcattcattgcccccacaatcctaggcctacccgccgcagtactgatcattctatttccccctctattgatccccacctccaaatatctcatcaacaaccgactaatcaccacccaacaatgactaatcaaactaacctcaaaacaaatgataaccatacacaacactaaaggacgaacctgatctcttatactagtatccttaatcatttttattgccacaactaacctcctcggactcctgcctcactcatttacaccaaccacccaactatctataaacctagccatggccatccccttatgagcgggcgcagtgattataggctttcgctctaagattaaaaatgccctagcccacttcttaccacaaggcacacctacaccccttatccccatactagttattatcgaaaccatcagcctactcattcaaccaatagccctagccgtacgcctaaccgctaacattactgcaggccacctactcatgcacctaattggaagcgccaccctagcaatatcaaccattaaccttccctctacacttatcatcttcacaattctaattctactgactatcctagaaatcgctgtcgccttaatccaagcctacgttttcacacttctagtaagcctctacctgcacgacaacacataatgacccaccaatcacatgcctatcatatagtaaaacccagcccatgacccctaacaggggccctctcagccctcctaatgacctccggcctagccatgtgatttcacttccactccataacgctcctcatactaggcctactaaccaacacactaaccatataccaatgatggcgcgatgtaacacgagaaagcacataccaaggccaccacacaccacctgtccaaaaaggccttcgatacgggataatcctatttattacctcagaagtttttttcttcgcaggatttttctgagccttttaccactccagcctagcccctaccccccaattaggagggcactggcccccaacaggcatcaccccgctaaatcccctagaagtcccactcctaaacacatccgtattactcgcatcaggagtatcaatcacctgagctcaccatagtctaatagaaaacaaccgaaaccaaataattcaagcactgcttattacaattttactgggtctctattttaccctcctacaagcctcagagtacttcgagtctcccttcaccatttccgacggcatctacggctcaacattttttgtagccacaggcttccacggacttcacgtcattattggctcaactttcctcactatctgcttcatccgccaactaatatttcactttacatccaaacatcactttggcttcgaagccgccgcctgatactggcattttgtagatgtggtttgactatttctgtatgtctccatctattgatgagggtcttactcttttagtataaatagtaccgttaacttccaattaactagttttgacaacattcaaaaaagagtaataaacttcgccttaattttaataatcaacaccctcctggccttactactaataattattacattttgactaccacaactcaacggctacatagaaaaatccaccccttacgagtgcggcttcgaccctatatcccccgcccgcgtccctttctccataaaattcttcttagtagctattaccttcttattatttgatctagaaattgccctccttttacccctaccatgagccctacaaacaactaacctgccactaatagttatgtcatccctcttattaatcatcatcctagccctaagtctggcctatgagtgactacaaaaaggattagactgaaccgaattggtacatagtttaaacaaaacgaatgatttcgactcattaaattatgataatcatatttaccaaatgcccctcatttacataaatattatactagcatttaccatctcacttctaggaatactagtatatcgctcacacctcatatcctccctactatgcctagaaggaataatactatcgctgttcattatagctactctcataaccctcaacacccactccctcttagccaatattgtgcctattgccatactagtctttgccgcctgcgaagcagcggtgggcctagccctactagtctcaatctccaacacatatggcctagactacgtacataacctaaacctactccaatgctaaaactaatcgtcccaacaattatattactaccactgacatgactttccaaaaaacacataatttgaatcaacacaaccacccacagcctaattattagcatcatccctctactattttttaaccaaatcaacaacaacctatttagctgttccccaaccttttcctccgaccccctaacaacccccctcctaatactaactacctgactcctacccctcacaatcatggcaagccaacgccacttatccagtgaaccactatcacgaaaaaaactctacctctctatactaatctccctacaaatctccttaattataacattcacagccacagaactaatcatattttatatcttcttcgaaaccacacttatccccaccttggctatcatcacccgatgaggcaaccagccagaacgcctgaacgcaggcacatacttcctattctacaccctagtaggctcccttcccctactcatcgcactaatttacactcacaacaccctaggctcactaaacattctactactcactctcactgcccaagaactatcaaactcctgagccaacaacttaatatgactagcttacacaatagcttttatagtaaagatacctctttacggactccacttatgactccctaaagcccatgtcgaagcccccatcgctgggtcaatagtacttgccgcagtactcttaaaactaggcggctatggtataatacgcctcacactcattctcaaccccctgacaaaacacatagcctaccccttccttgtactatccctatgaggcataattataacaagctccatctgcctacgacaaacagacctaaaatcgctcattgcatactcttcaatcagccacatggccctcgtagtaacagccattctcatccaaactccctgaagcttcaccggcgcagtcattctcataatcgcccacggacttacatcctcattactattctgcctagcaaactcaaactacgaacgcactcacagtcgcatcataatcctctctcaaggacttcaaactctactcccactaatagctttttgatgacttctagcaagcctcgctaacctcgccttaccccccactattaacctactgggagaactctctgtgctagtaaccacgttctcctgatcaaatatcactctcctacttacgggactcaacatactagtcacagccctatactccctctacatatttaccacaacacaatggggctcactcacccaccacattaacaacataaaaccctcattcacacgagaaaacaccctcatgttcatacacctatcccccattctcctcctatccctcaaccccgacatcattaccgggttttcctcttgtaaatatagtttaaccaaaacatcagattgtgaatctgacaacagaggcttacgaccccttatttaccgagaaagctcacaagaactgctaactcatgcccccatgtctaacaacatggctttctcaacttttaaaggataacagctatccattggtcttaggccccaaaaattttggtgcaactccaaataaaagtaataaccatgcacactactataaccaccctaaccctgacttccctaattccccccatccttaccaccctcgttaaccccaacaaaaaaaactcatacccccattatgtaaaatccattgtcgcatccacctttattatcagtctcttccccacaacaatattcatgtgcctagaccaagaagttattatctcgaactgacactgagccacaacccaaacaacccagctctccctaagcttcaaactagactacttctccataatattcatccctgtagcattgttcgttacatggtccatcatagaattctcactgtgatatataaactcagacccaaacattaatcagttcttcaaatatctactcattttcctaattaccatactaatcttagttaccgctaacaacctattccaactgttcatcggctgagagggcgtaggaattatatccttcttgctcatcagttgatgatacgcccgagcagatgccaacacagcagccattcaagcaatcctatacaaccgtatcggcgatatcggtttcatcctcgccttagcatgatttatcctacactccaactcatgagacccacaacaaatagcccttctaaacgctaatccaagcctcaccccactactaggcctcctcctagcagcagcaggcaaatcagcccaattaggtctccacccctgactcccctcagccatagaaggccccaccccagtctcagccctactccactcaagcactatagttgtagcaggaatcttcttactcatccgcttccaccccctagcagaaaatagcccactaatccaaactctaacactatgcttaggcgctatcaccactctgttcgcagcagtctgcgcccttacacaaaatgacatcaaaaaaatcgtagccttctccacttcaagtcaactaggactcataatagttacaatcggcatcaaccaaccacacctagcattcctgcacatctgtacccacgccttcttcaaagccatactatttatgtgctccgggtccatcatccacaaccttaacaatgaacaagatattcgaaaaataggaggactactcaaaaccatacctctcacttcaacctccctcaccattggcagcctagcattagcaggaatacctttcctcacaggtttctactccaaagaccacatcatcgaaaccgcaaacatatcatacacaaacgcctgagccctatctattactctcatcgctacctccctgacaagcgcctatagcactcgaataattcttctcaccctaacaggtcaacctcgcttccccacccttactaacattaacgaaaataaccccaccctactaaaccccattaaacgcctggcagccggaagcctattcgcaggatttctcattactaacaacatttcccccgcatcccccttccaaacaacaatccccctctacctaaaactcacagccctcgctgtcactttcctaggacttctaacagccctagacctcaactacctaaccaacaaacttaaaataaaatccccactatgcacattttatttctccaacatactcggattctaccctagcatcacacaccgcacaatcccctatctaggccttcttacgagccaaaacctgcccctactcctcctagacctaacctgactagaaaagctattacctaaaacaatttcacagcaccaaatctccacctccatcatcacctcaacccaaaaaggcataattaaactttacttcctctctttcttcttcccactcatcctaaccctactcctaatcacataacctattcccccgagcaatctcaattacaatatatacaccaacaaacaatgttcaaccagtaactactactaatcaacgcccataatcatacaaagcccccgcaccaataggatcctcccgaatcaaccctgacccctctccttcataaattattcagcttcctacactattaaagtttaccacaaccaccaccccatcatactctttcacccacagcaccaatcctacctccatcgctaaccccactaaaacactcaccaagacctcaacccctgacccccatgcctcaggatactcctcaatagccatcgctgtagtatatccaaagacaaccatcattccccctaaataaattaaaaaaactattaaacccatataacctcccccaaaattcagaataataacacacccgaccacaccgctaacaatcaatactaaacccccataaataggagaaggcttagaagaaaaccccacaaaccccattactaaacccacactcaacagaaacaaagcatacatcattattctcgcacggactacaaccacgaccaatgatatgaaaaaccatcgttgtatttcaactacaagaacaccaatgaccccaatacgcaaaattaaccccctaataaaattaattaaccactcattcatcgacctccccaccccatccaacatctccgcatgatgaaacttcggctcactccttggcgcctgcctgatcctccaaatcaccacaggactattcctagccatgcactactcaccagacgcctcaaccgccttttcatcaatcgcccacatcactcgagacgtaaattatggctgaatcatccgctaccttcacgccaatggcgcctcaatattctttatctgcctcttcctacacatcgggcgaggcctatattacggatcatttctctactcagaaacctgaaacatcggcattatcctcctgcttgcaactatagcaacagccttcataggctatgtcctcccgtgaggccaaatatcattctgaggggccacagtaattacaaacttactatccgccatcccatacattgggacagacctagttcaatgaatctgaggaggctactcagtagacagtcccaccctcacacgattctttacctttcacttcatcttgcccttcattattgcagccctagcagcactccacctcctattcttgcacgaaacgggatcaaacaaccccctaggaatcacctcccattccgataaaatcaccttccacccttactacacaatcaaagacgccctcggcttacttctcttccttctctccttaatgacattaacactattctcaccagacctcctaggcgacccagacaattataccctagccaaccccttaaacacccctccccacatcaagcccgaatgatatttcctattcgcctacacaattctccgatccgtccctaacaaactaggaggcgtccttgccctattactatccatcctcatcctagcaataatccccatcctccatatatccaaacaacaaagcataatatttcgcccactaagccaatcactttattgactcctagccgcagacctcctcattctaacctgaatcggaggacaaccagtgagctacccttttaccatcattggacaagtagcatccgtactatacttcacaacaatcctaatcctaataccaactatctccctaattgaaaacaaaatactcaaatggccctgtccttgtagtataaactaatacaccagtcttgtaaaccggagatgaaaacctttttccaaggacaaatcagagaaaaagtctttaactccaccattagcacccaaagctaagattctaatttaaactattctctgttctttcatggggaagcagatttgggtaccacccaagtattgactcacccatcaacaaccgctatgtatttcgtacattactgccagccaccatgaatattgtacggtaccataaatacttgaccacctgtagtacataaaaacccaatccacatcaaaaccccctccccatgcttacaagcaagtacagcaatcaaccctcaactatcacacatcaactgcaactccaaagccacccctcacccactaggataccaacaaacctacccacccttaacagtacatagtacataaagccatttaccgtacatagcacattacagtcaaatcccttctcgtccccatggatgacccccctcagataggggtcccttgaccaccatcctccgtgaaatcaatatcccgcacaagagtgctactctcctcgctccgggcccataacacttgggggtagctaaagtgaactgtatccgacatctggttcctacttcagggtcataaagcctaaatagcccacacgttccccttaaataagacatcacgatg

SEQ ID NO: 513 - DNA, 16569 bp, Homo sapiens mitochondrial
  3107: "n" refers to a nucleotide at position 3107 of the Cambridge Reference Sequence (CRS, Anderson et al. 1981 Nature 290:457-465), later determined to be absent from the human mtDNA sequence according to the revised CRS (rCRS, Andrews et al. 1999 Nature Genetics 23:147); "n" therefore represents a single nucleotide deletion at a position corresponding to nucleotide 3107 of SEQ ID NO:1 as provided herein.
gatcacaggtctatcaccctattaaccactcacgggagctctccatgcatttggtattttcgtctggggggtatgcacgcgatagcattgcgagacgctggagccggagcaccctatgtcgcagtatctgtctttgattcctgcctcatcctattatttatcgcacctacgttcaatattacaggcgaacatacttactaaagtgtgttaattaattaatgcttgtaggacataataataacaattgaatgtctgcacagccactttccacacagacatcataacaaaaaatttccaccaaaccccccctcccccgcttctggccacagcacttaaacacatctctgccaaaccccaaaaacaaagaaccctaacaccagcctaaccagatttcaaattttatcttttggcggtatgcacttttaacagtcaccccccaactaacacattattttcccctcccactcccatactactaatctcatcaatacaacccccgcccatcctacccagcacacacacaccgctgctaaccccataccccgaaccaaccaaaccccaaagacaccccccacagtttatgtagcttacctcctcaaagcaatacactgaaaatgtttagacgggctcacatcaccccataaacaaataggtttggtcctagcctttctattagctcttagtaagattacacatgcaagcatccccgttccagtgagttcaccctctaaatcaccacgatcaaaagggacaagcatcaagcacgcagcaatgcagctcaaaacgcttagcctagccacacccccacgggaaacagcagtgattaacctttagcaataaacgaaagtttaactaagctatactaaccccagggttggtcaatttcgtgccagccaccgcggtcacacgattaacccaagtcaatagaagccggcgtaaagagtgttttagatcaccccctccccaataaagctaaaactcacctgagttgtaaaaaactccagttgacacaaaatagactacgaaagtggctttaacatatctgaacacacaatagctaagacccaaactgggattagataccccactatgcttagccctaaacctcaacagttaaatcaacaaaactgctcgccagaacactacgagccacagcttaaaactcaaaggacctggcggtgcttcatatccctctagaggagcctgttctgtaatcgataaaccccgatcaacctcaccacctcttgctcagcctatataccgccatcttcagcaaaccctgatgaaggctacaaagtaagcgcaagtacccacgtaaagacgttaggtcaaggtgtagcccatgaggtggcaagaaatgggctacattttctaccccagaaaactacgatagcccttatgaaacttaagggtcgaaggtggatttagcagtaaactgagagtagagtgcttagttgaacagggccctgaagcgcgtacacaccgcccgtcaccctcctcaagtatacttcaaaggacatttaactaaaacccctacgcatttatatagaggagacaagtcgtaacatggtaagtgtactggaaagtgcacttggacgaaccagagtgtagcttaacacaaagcacccaacttacacttaggagatttcaacttaacttgaccgctctgagctaaacctagccccaaacccactccaccttactaccagacaaccttagccaaaccatttacccaaataaagtataggcgatagaaattgaaacctggcgcaatagatatagtaccgcaagggaaagatgaaaaattatagccaagcataatatagcaaggactaacccctataccttctgcataatgaattaactagaaataactttgcaaggagagccaaagctaagacccccgaaaccagacgagctacctaagaacagctaaaagagcacacccgtctatgtagcaaaatagtgggaagatttataggtagaggcgacaaacctaccgagcctggtgatagctggttgtccaagatagaatcttagttcaactttaaatttgcccacagaaccctctaaatccccttgtaaatttaactgttagtccaaagaggaacagctctttggacactaggaaaaaaccttgtagagagagtaaaaaatttaacacccatagtaggcctaaaagcagccaccaattaagaaagcgttcaagctcaacacccactacctaaaaaatcccaaacatataactgaactcctcacacccaattggaccaatctatcaccctatagaagaactaatgttagtataagtaacatgaaaacattctcctccgcataagcctgcgtcagattaaaacactgaactgacaattaacagcccaatatctacaatcaaccaacaagtcattattaccctcactgtcaacccaacacaggcatgctcataaggaaaggttaaaaaaagtaaaaggaactcggcaaatcttaccccgcctgtttaccaaaaacatcacctctagcatcaccagtattagaggcaccgcctgcccagtgacacatgtttaacggccgcggtaccctaaccgtgcaaaggtagcataatcacttgttccttaaatagggacctgtatgaatggctccacgagggttcagctgtctcttacttttaaccagtgaaattgacctgcccgtgaagaggcgggcatgacacagcaagacgagaagaccctatggagctttaatttattaatgcaaacagtacctaacaaacccacaggtcctaaactaccaaacctgcattaaaaatttcggttggggcgacctcggagcagaacccaacctccgagcagtacatgctaagacttcaccagtcaaagcgaactactatactcaattgatccaataacttgaccaacggaacaagttaccctagggataacagcgcaatcctattctagagtccatatcaacaatagggtttacgacctcgatgttggatcaggacatcccgatggtgcagccgctattaaaggttcgtttgttcaacgattaaagtcctacgtgatctgagttcagaccggagtaatccaggtcggtttctatctacnttcaaattcctccctgtacgaaaggacaagagaaataaggcctacttcacaaagcgccttcccccgtaaatgatatcatctcaacttagtattatacccacacccacccaagaacagggtttgttaagatggcagagcccggtaatcgcataaaacttaaaactttacagtcagaggttcaattcctcttcttaacaacatacccatggccaacctcctactcctcattgtacccattctaatcgcaatggcattcctaatgcttaccgaacgaaaaattctaggctatatacaactacgcaaaggccccaacgttgtaggcccctacgggctactacaacccttcgctgacgccataaaactcttcaccaaagagcccctaaaacccgccacatctaccatcaccctctacatcaccgccccgaccttagctctcaccatcgctcttctactatgaacccccctccccatacccaaccccctggtcaacctcaacctaggcctcctatttattctagccacctctagcctagccgtttactcaatcctctgatcagggtgagcatcaaactcaaactacgccctgatcggcgcactgcgagcagtagcccagacaatctcatatgaagtcaccctagccatcattctactatcaacattactaataagtggctcctttaacctctccacccttatcacaacacaagaacacctctgattactcctgccatcatgacccttagccataatatgatttatctccacactagcagagaccaaccgaacccccttcgaccttgccgaaggggagtccgaactagtctcaggcttcaacatcgaatacgccgcaggccccttcgccctattcttcatagccgaatacacaaacattattataataaacaccctcaccactacaatcttcctaggaacaacatatgacgcactctcccctgaactctacacaacatattttgtcaccaagaccctacttctaacctccctgttcttatgaattcgaacagcatacccccgattccgctacgaccaactcatacacctcctatgaaaaaacttcctaccactcaccctagcattacttatatgatatgtctccatacccattacaatctccagcattccccctcaaacctaagaaatatgtctgataaaagagttactttgatagagtaaataataggagcttaaacccccttatttctaggactatgagaatcgaacccatccctgagaatccaaaattctccgtgccacctatcacaccccatcctaaagtaaggtcagctaaataagctatcgggcccataccccgaaaatgttggttatacccttcccgtactaattaatcccctggcccaacccgtcatctactctaccatctttgcaggcacactcatcacagcgctaagctcgcactgatttttcacctgagtaggcctagaaataaacatgctagcttttattccagttctaaccaaaaaaataaaccctcgttccacagaagctgccatcaagtatttcctcacgcaagcaaccgcatccataatccttctaatagctatcctcttcaacaatatactctccggacaatgaaccataaccaatactaccaatcaatactcatcattaataatcataatggctatagcaataaaactaggaatagccccctttcacttctgagtcccagaggttacccaaggcacccctctgacatccggcctgcttcttctcacatgacaaaaactagcccccatctcaatcatataccaaatctctccctcactaaacgtaagccttctcctcactctctcaatcttatccatcatagcaggcagttgaggtggattaaaccaaacccagctacgcaaaatcttagcatactcctcaattacccacataggatgaataatagcagttctaccgtacaaccctaacataaccattcttaatttaactatttatattatcctaactactaccgcattcctactactcaacttaaactccagcaccacgaccctactactatctcgcacctgaaacaagctaacatgactaacacccttaattccatccaccctcctctccctaggaggcctgcccccgctaaccggctttttgcccaaatgggccattatcgaagaattcacaaaaaacaatagcctcatcatccccaccatcatagccaccatcaccctccttaacctctacttctacctacgcctaatctactccacctcaatcacactactccccatgtctaacaacgtaaaaataaaatgacagtttgaacacacaaaacccaccccattcctccccacactcatcgcccttaccacgctactcctacctatctccccttttatactaataatcttatagaaatttaggttaaatacagaccaagagccttcaaagccctcagtaagttgcaatacttaatttctgtaacagctaaggactgcaaaaccccactctgcatcaactgaacgcaaatcagccactttaattaagctaagcccttactagaccaatgggacttaaacccacaaacacttagttaacagctaagcaccctaatcaactggcttcaatctacttctcccgccgccggaaaaaaaggcgggagaagccccggcaggtttgaagctgcttcttcgaatttgcaattcaatatgaaaatcacctcggagctggtaaaaagaggcctaacccctgtctttagatttacagtccaatgcttcactcagccattttacctcacccccactgatgttcgccgaccgttgactattctctacaaaccacaaagacattggaacactatacctattattcggcgcatgagctggagtcctaggcacagctctaagcctccttattcgagccgagctgggccagccaggcaaccttttaggtaacgaccacatctacaacgttatcgtcacagcccatgcatttgtaataatcttcttcatagtaatacccatcataatcggaggctttggcaactgactagtccccctaataatcggtgcccccgatatggcgtttccccgcataaacaacataagcttctgactcttacctccctctctcctactcctgctcgcatctgctatagtggaggccggagcaggaacaggttgaacagtctaccctcccttagcagggaactactcccaccctggagcctccgtagacctaaccatcttctccttacacctagcaggtgtctcctctatcttaggggccatcaatttcatcacaacaattatcaatataaaaccccctgccataacccaataccaaacgcccctcttcgtctgatccgtcctaatcacagcagtcctacttctcctatctctcccagtcctagctgctggcatcactatactactaacagaccgcaacctcaacaccaccttcttcgaccccgccggaggaggagaccccattctataccaacacctattctgatttttcggtcaccctgaagtttatattcttatcctaccaggcttcggaataatctcccatattgtaacttactactccggaaaaaaagaaccatttggatacataggtatggtctgagctatgatatcaattggcttcctagggtttatcgtgtgagcacaccatatatttacagtaggaatagacgtagacacacgagcatatttcacctccgctaccataatcatcgctatccccaccggcgtcaaagtatttagctgactcgccacactccacggaagcaatatgaaatgatctgctgcagtgctctgagccctaggattcatctttcttttcaccgtaggtggcctgactggcattgtattagcaaactcatcactagacatcgtactacacgacacgtactacgttgtagctcacttccactatgtcctatcaataggagctgtatttgccatcataggaggcttcattcactgatttcccctattctcaggctacaccctagaccaaacctacgccaaaatccatttcactatcatattcatcggcgtaaatctaactttcttcccacaacactttctcggcctatccggaatgccccgacgttactcggactaccccgatgcatacaccacatgaaacatcctatcatctgtaggctcattcatttctctaacagcagtaatattaataattttcatgatttgagaagccttcgcttcgaagcgaaaagtcctaatagtagaagaaccctccataaacctggagtgactatatggatgccccccaccctaccacacattcgaagaacccgtatacataaaatctagacaaaaaaggaaggaatcgaaccccccaaagctggtttcaagccaaccccatggcctccatgactttttcaaaaaggtattagaaaaaccatttcataactttgtcaaagttaaattataggctaaatcctatatatcttaatggcacatgcagcgcaagtaggtctacaagacgctacttcccctatcatagaagagcttatcacctttcatgatcacgccctcataatcattttccttatctgcttcctagtcctgtatgcccttttcctaacactcacaacaaaactaactaatactaacatctcagacgctcaggaaatagaaaccgtctgaactatcctgcccgccatcatcctagtcctcatcgccctcccatccctacgcatcctttacataacagacgaggtcaacgatccctcccttaccatcaaatcaattggccaccaatggtactgaacctacgagtacaccgactacggcggactaatcttcaactcctacatacttcccccattattcctagaaccaggcgacctgcgactccttgacgttgacaatcgagtagtactcccgattgaagcccccattcgtataataattacatcacaagacgtcttgcactcatgagctgtccccacattaggcttaaaaacagatgcaattcccggacgtctaaaccaaaccactttcaccgctacacgaccgggggtatactacggtcaatgctctgaaatctgtggagcaaaccacagtttcatgcccatcgtcctagaattaattcccctaaaaatctttgaaatagggcccgtatttaccctatagcaccccctctaccccctctagagcccactgtaaagctaacttagcattaaccttttaagttaaagattaagagaaccaacacctctttacagtgaaatgccccaactaaatactaccgtatggcccaccataattacccccatactccttacactattcctcatcacccaactaaaaatattaaacacaaactaccacctacccccctcaccaaagcccataaaaataaaaaattataacaaaccctgagaaccaaaatgaacgaaaatctgttcgcttcattcattgcccccacaatcctaggcctacccgccgcagtactgatcattctatttccccctctattgatccccacctccaaatatctcatcaacaaccgactaatcaccacccaacaatgactaatcaaactaacctcaaaacaaatgataaccatacacaacactaaaggacgaacctgatctcttatactagtatccttaatcatttttattgccacaactaacctcctcggactcctgcctcactcatttacaccaaccacccaactatctataaacctagccatggccatccccttatgagcgggcgcagtgattataggctttcgctctaagattaaaaatgccctagcccacttcttaccacaaggcacacctacaccccttatccccatactagttattatcgaaaccatcagcctactcattcaaccaatagccctggccgtacgcctaaccgctaacattactgcaggccacctactcatgcacctaattggaagcgccaccctagcaatatcaaccattaaccttccctctacacttatcatcttcacaattctaattctactgactatcctagaaatcgctgtcgccttaatccaagcctacgttttcacacttctagtaagcctctacctgcacgacaacacataatgacccaccaatcacatgcctatcatatagtaaaacccagcccatgacccctaacaggggccctctcagccctcctaatgacctccggcctagccatgtgatttcacttccactccataacgctcctcatactaggcctactaaccaacacactaaccatataccaatgatggcgcgatgtaacacgagaaagcacataccaaggccaccacacaccacctgtccaaaaaggccttcgatacgggataatcctatttattacctcagaagtttttttcttcgcaggatttttctgagccttttaccactccagcctagcccctaccccccaattaggagggcactggcccccaacaggcatcaccccgctaaatcccctagaagtcccactcctaaacacatccgtattactcgcatcaggagtatcaatcacctgagctcaccatagtctaatagaaaacaaccgaaaccaaataattcaagcactgcttattacaattttactgggtctctattttaccctcctacaagcctcagagtacttcgagtctcccttcaccatttccgacggcatctacggctcaacattttttgtagccacaggcttccacggacttcacgtcattattggctcaactttcctcactatctgcttcatccgccaactaatatttcactttacatccaaacatcactttggcttcgaagccgccgcctgatactggcattttgtagatgtggtttgactatttctgtatgtctccatctattgatgagggtcttactcttttagtataaatagtaccgttaacttccaattaactagttttgacaacattcaaaaaagagtaataaacttcgccttaattttaataatcaacaccctcctagccttactactaataattattacattttgactaccacaactcaacggctacatagaaaaatccaccccttacgagtgcggcttcgaccctatatcccccgcccgcgtccctttctccataaaattcttcttagtagctattaccttcttattatttgatctagaaattgccctccttttacccctaccatgagccctacaaacaactaacctgccactaatagttatgtcatccctcttattaatcatcatcctagccctaagtctggcctatgagtgactacaaaaaggattagactgaaccgaattggtatatagtttaaacaaaacgaatgatttcgactcattaaattatgataatcatatttaccaaatgcccctcatttacataaatattatactagcatttaccatctcacttctaggaatactagtatatcgctcacacctcatatcctccctactatgcctagaaggaataatactatcgctgttcattatagctactctcataaccctcaacacccactccctcttagccaatattgtgcctattgccatactagtctttgccgcctgcgaagcagcggtgggcctagccctactagtctcaatctccaacacatatggcctagactacgtacataacctaaacctactccaatgctaaaactaatcgtcccaacaattatattactaccactgacatgactttccaaaaaacacataatttgaatcaacacaaccacccacagcctaattattagcatcatccctctgctattttttaaccaaatcaacaacaacctatttagctgttccccaaccttttcctccgaccccctaacaacccccctcctaatactaactacctgactcctacccctcacaatcatggcaagccaacgccacttatccagtgaaccactatcacgaaaaaaactctacctctctatactaatctccctacaaatctccttaattataacattcacagccacagaactaatcatattttatatcttcttcgaaaccacacttatccccaccttggctatcatcacccgatgaggcaaccagccagaacgcctgaacgcaggcacatacttcctattctacaccctagtaggctcccttcccctactcatcgcactaatttacactcacaacaccctaggctcactaaacattctactactcactctcactgcccaagaactatcaaactcctgagccaacaacttaatatgactagcttacacaatagcttttatagtaaagatacctctttacggactccacttatgactccctaaagcccatgtcgaagcccccatcgctgggtcaatagtacttgccgcagtactcttgaaactaggcggctatggtataatacgcctcacactcattctcaaccccctgacaaaacacatagcctaccccttccttgtactatccctatgaggcataattataacaagctccatctgcctacgacaaacagacctaaaatcgctcattgcatactcttcaatcagccacatagccctcgtagtaacagccattctcatccaaaccccctgaagcttcaccggcgcagtcattctcataatcgcccacggacttacatcctcattactattctgcctagcaaactcaaactacgaacgcactcacagtcgcatcataatcctctctcaaggacttcaaactctactcccactaatagctttttgatgacttctagcaagcctcgctaacctcgccttaccccccactattaacctactgggagaactctctgtgctagtaaccacgttctcctgatcaaatatcactctcctacttacaggactcaacatactagtcacagccctatactccctctacatatttaccacaacacaatggggctcactcacccaccacattaacaacataaaaccctcattcacacgagaaaacaccctcatgttcatacacctatcccccattctcctcctatccctcaaccccgacatcattaccgggttttcctcttgtaaatatagtttaaccaaaacatcagattgtgaatctgacaacagaggcttacgaccccttatttaccgagaaagctcacaagaactgctaactcatgcccccatgtctaacaacatggctttctcaacttttaaaggataacagctatccattggtcttaggccccaagaattttggtgcaactccaaataaaagtaataaccatgcacactactataaccaccctaaccctaacttccctaattccccccatccttaccaccctcgttaaccctaacaaaaaaaactcatacccccattatgtaaaatccattgtcgcatccacctttattatcagtctcttccccacaacaatattcatgtgcctagaccaagaagttattatctcgaactgacactgagccacaacccaaacaatccagctctccctaagcttcaaactagactacttctccataatattcatccctgtagcattgttcgttacatggtccatcatagaattctcactgtgatatataaactcagacccaaacattaatcagttcttcaaatatctactcatcttcctaattaccatactaatcttagttaccgctaacaacctattccaactgttcatcggctgagagggcgtaggaattatatccttcttgctcatcagttgatgatacgcccgagcagatgccaacacagcagccattcaagcaatcctatacaaccgtatcggcgatatcggtttcatcctcgccttagcatgatttatcctacactccaactcatgagacccacaacaaatagcccttctaaacgctaatccaagcctcaccccactactaggcctcctcctagcagcagcaggcaaatcagcccaattaggcctccacccctgactcccctcagccatagaaggccccaccccagtctcagccctactccactcaagcactatagttgtagcaggaatcttcttactcatccgcttccaccccctagcagaaaatagcccactaatccaaactctaacactatgcttaggcgctatcaccactctgttcgcagcagtctgcgcccttacacaaaatgacatcaaaaaaatcgtagccttctccacttcaagtcaactaggactcataatagttacaatcggcatcaaccaaccacacctagcattcctgcacatctgtacccacgccttcttcaaagccatactatttatgtgctccgggtccatcatccacaaccttaacaatgaacaagatattcgaaaaataggaggactactcaaaaccatacctctcacttcaacctccctcaccattggcagcctagcattagcaggaatacctttcctcacaggtttctactccaaagaccacatcatcgaaaccgcaaacatatcatacacaaacgcctgagccctatctattactctcatcgctacctccctgacaagcgcctatagcactcgaataattcttctcaccctaacaggtcaacctcgcttccccacccttactaacattaacgaaaataaccccaccctactaaaccccattaaacgcctggcagccggaagcctattcgcaggattcctcattactaacaacatttcccccgcatcccccttccaaacaacaatccccctctacctaaaactcacagccctcgctgtcactttcctaggacttctaacagccctagacctcaactacctaaccaacaaacttaaaataaaatccccactatgcacattttatttctccaacatactcggattctaccctagcatcacacaccgcacaatcccctatctaggccttcttacgagccaaaacctgcccctactcctcctagacctaacctgactagaaaagctattacctaaaacaatttcacagcaccaaatctccacctccatcatcacctcaacccaaaaaggcataattaaactttacttcctctctttcttcttcccactcatcctaaccctactcctaatcacataacctattcccccgagcaatctcaattacaatatatacaccaacaaacaatgttcaaccagtaactactactaatcaacgcccataatcatacaaagcccccgcaccaataggatcctcccgaatcaaccctgacccctctccttcataaattattcagcttcctacactattaaagtttaccacaaccaccaccccatcatactctttcacccacagcaccaatcctacctccatcgctaaccccactaaaacactcaccaagacctcaacccctgacccccatgcctcaggatactcctcaatagccatcgctgtagtatatccaaagacaaccatcattccccctaaataaattaaaaaaactattaaacccatataacctcccccaaaattcagaataataacacacccgaccacaccgctaacaatcaatactaaacccccataaataggagaaggcttagaagaaaaccccacaaaccccattactaaacccacactcaacagaaacaaagcatacatcattattctcgcacggactacaaccacgaccaatgatatgaaaaaccatcgttgtatttcaactacaagaacaccaatgaccccaatacgcaaaattaaccccctaataaaattaattaaccactcattcatcgacctccccaccccatccaacatctccgcatgatgaaacttcggctcactccttggcgcctgcctgatcctccaaatcaccacaggactattcctagccatgcactactcaccagacgcctcaaccgccttttcatcaatcgcccacatcactcgagacgtaaattatggctgaatcatccgctaccttcacgccaatggcgcctcaatattctttatctgcctcttcctacacatcgggcgaggcctatattacggatcatttctctactcagaaacctgaaacatcggcattatcctcctgcttgcaactatagcaacagccttcataggctatgtcctcccgtgaggccaaatatcattctgaggggccacagtaattacaaacttactatccgccatcccatacattgggacagacctagttcaatgaatctgaggaggctactcagtagacagtcccaccctcacacgattctttacctttcacttcatcttgcccttcattattgcagccctagcagcactccacctcctattcttgcacgaaacgggatcaaacaaccccctaggaatcacctcccattccgataaaatcaccttccacccttactacacaatcaaagacgccctcggcttacttctcttccttctctccttaatgacattaacactattctcaccagacctcctaggcgacccagacaattataccctagccaaccccttaaacacccctccccacatcaagcccgaatgatatttcctattcgcctacacaattctccgatccgtccctaacaaactaggaggcgtccttgccctattactatccatcctcatcctagcaataatccccatcctccatatatccaaacaacaaagcataatatttcgcccactaagccaatcactttattgactcctagccgcagacctcctcattctaacctgaatcggaggacaaccagtaagctacccttttaccatcattggacaagtagcatccgtactatacttcacaacaatcctaatcctaataccaactatctccctaattgaaaacaaaatactcaaatgggcctgtccttgtagtataaactagtacaccagtcttgtaaaccggagatgaaaacctttttccaaggacaaatcagagaaaaagtctttaactccaccattagcacccaaagctaagattctaatttaaactattctctgttctttcatggggaagcagatttgggtaccacccaagtattgactcacccatcaacaaccgctatgtatttcgtacattactgccagccaccatgaatattgtacggtaccataaatacttgaccacctgtagtacataaaaacccaatccacatcaaaaccccctccccatgcttacaagcaagtacagcaatcaaccctcaactatcacacatcaactgcaactccaaagccacccctcacccactaggataccaacaaacctacccacccttaacagtacatagtacataaagccatttaccgtacatagcacattacagtcaaatcccttctcgtccccatggatgacccccctcagataggggtcccttgaccaccatcctccgtgaaatcaatatcccgcacaagagtgctactctcctcgctccgggcccataacacttgggggtagctaaagtgaactgtatccgacatctggttcctacttcagggtcataaagcctaaatagcccacacgttccccttaaataagacatcacgatg

SEQ ID NO: 514 - DNA, 16569 bp, Homo sapiens mitochondrial
  3107: "n" refers to a nucleotide at position 3107 of the Cambridge Reference Sequence (CRS, Anderson et al. 1981 Nature 290:457-465), later determined to be absent from the human mtDNA sequence according to the revised CRS (rCRS, Andrews et al. 1999 Nature Genetics 23:147); "n" therefore represents a single nucleotide deletion at a position corresponding to nucleotide 3107 of SEQ ID NO:1 as provided herein.
gatcacaggtctatcaccctattaaccactcacgggagctctccatgcatttggtattttcgtctggggggtatgcacgcgatagcattgcgagacgctggagccggagcaccctatgtcgcagtatctgtctttgattcctgcctcatcctattatttatcgcacctacgttcaatattacaggcgaacatacttactaaagtgtgttaattaattaatgcttgtaggacataataataacaattgaatgtctgcacagccactttccacacagacatcataacaaaaaatttccaccaaaccccccctcccccgcttctggccacagcacttaaacacatctctgccaaaccccaaaaacaaagaaccctaacaccagcctaaccagatttcaaattttatcttttggcggtatgcacttttaacagtcaccccccaactaacacattattttcccctcccactcccatactactaatctcatcaatacaacccccgcccatcctacccagcacacacacaccgctgctaaccccataccccgaaccaaccaaaccccaaagacaccccccacagtttatgtagcttacctcctcaaagcaatacactgaaaatgtttagacgggctcacatcaccccataaacaaataggtttggtcctagcctttctattagctcttagtaagattacacatgcaagcatccccgttccagtgagttcaccctctaaatcaccacgatcaaaagggacaagcatcaagcacgcagcaatgcagctcaaaacgcttagcctagccacacccccacgggaaacagcagtgattaacctttagcaataaacgaaagtttaactaagctatactaaccccagggttggtcaatttcgtgccagccaccgcggtcacacgattaacccaagtcaatagaagccggcgtaaagagtgttttagatcaccccctccccaataaagctaaaactcacctgagttgtaaaaaactccagttgacacaaaatagactacgaaagtggctttaacatatctgaacacacaatagctaagacccaaactgggattagataccccactatgcttagccctaaacctcaacagttaaatcaacaaaactgctcgccagaacactacgagccacagcttaaaactcaaaggacctggcggtgcttcatatccctctagaggagcctgttctgtaatcgataaaccccgatcaacctcaccacctcttgctcagcctatataccgccatcttcagcaaaccctgatgaaggctacaaagtaagcgcaagtacccacgtaaagacgttaggtcaaggtgtagcccatgaggtggcaagaaatgggctacattttctaccccagaaaactacgatagcccttatgaaacttaagggtcgaaggtggatttagcagtaaactgagagtagagtgcttagttgaacagggccctgaagcgcgtacacaccgcccgtcaccctcctcaagtatacttcaaaggacatttaactaaaacccctacgcatttatatagaggagacaagtcgtaacatggtaagtgtactggaaagtgcacttggacgaaccagagtgtagcttaacacaaagcacccaacttacacttaggagatttcaacttaacttgaccgctctgagctaaacctagccccaaacccactccaccttactaccagacaaccttagccaaaccatttacccaaataaagtataggcgatagaaattgaaacctggcgcaatagatatagtaccgcaagggaaagatgaaaaattataaccaagcataatatagcaaggactaacccctataccttctgcataatgaattaactagaaataactttgcaaggagagccaaagctaagacccccgaaaccagacgagctacctaagaacagctaaaagagcacacccgtctatgtagcaaaatagtgggaagatttataggtagaggcgacaaacctaccgagcctggtgatagctggttgtccaagatagaatcttagttcaactttaaatttgcccacagaaccctctaaatccccttgtaaatttaactgttagtccaaagaggaacagctctttggacactaggaaaaaaccttgtagagagagtaaaaaatttaacacccatagtaggcctaaaagcagccaccaattaagaaagcgttcaagctcaacacccactacctaaaaaatcccaaacatataactgaactcctcacacccaattggaccaatctatcaccctatagaagaactaatgttagtataagtaacatgaaaacattctcctccgcataagcctgcgtcagattaaaacactgaactgacaattaacagcccaatatctacaatcaaccaacaagtcattattaccctcactgtcaacccaacacaggcatgctcataaggaaaggttaaaaaaagtaaaaggaactcggcaaatcttaccccgcctgtttaccaaaaacatcacctctagcatcaccagtattagaggcaccgcctgcccagtgacacatgtttaacggccgcggtaccctaaccgtgcaaaggtagcataatcacttgttccttaaatagggacctgtatgaatggctccacgagggttcagctgtctcttacttttaaccagtgaaattgacctgcccgtgaagaggcgggcatgacacagcaagacgagaagaccctatggagctttaatttattaatgcaaacagtacctaacaaacccacaggtcctaaactaccaaacctgcattaaaaatttcggttggggcgacctcggagcagaacccaacctccgagcagtacatgctaagacttcaccagtcaaagcgaactactatactcaattgatccaataacttgaccaacggaacaagttaccctagggataacagcgcaatcctattctagagtccatatcaacaatagggtttacgacctcgatgttggatcaggacatcccgatggtgcagccgctattaaaggttcgtttgttcaacgattaaagtcctacgtgatctgagttcagaccggagtaatccaggtcggtttctatctacnttcaaattcctccctgtacgaaaggacaagagaaataaggcctacttcacaaagcgccttcccccgtaaatgatatcatctcaacttagtattatacccacacccacccaagaacagggtttgttaagatggcagagcccggtaatcgcataaaacttaaaactttacagtcagaggttcaattcctcttcttaacaacatacccatggccaacctcctactcctcattgtacccattctaatcgcaatggcattcctaatgcttaccgaacgaaaaattctaggctatatacaactacgcaaaggccccaacgttgtaggcccctacgggctactacaacccttcgctgacgccataaaactcttcaccaaagagcccctaaaacccgccacatctaccatcaccctctacatcaccgccccgaccttagctctcaccatcgctcttctactatgaacccccctccccatacccaaccccctggtcaacctcaacctaggcctcctatttattctagccacctctagcctagccgtttactcaatcctctgatcagggtgagcatcaaactcaaactacgccctgatcggcgcactgcgagcagtagcccaaacaatctcatatgaagtcaccctagccatcattctactatcaacattactaataagtggctcctttaacctctccacccttatcacaacacaagaacacctctgattactcctgccatcatgacccttggccataatatgatttatctccacactagcagagaccaaccgaacccccttcgaccttgccgaaggggagtccgaactagtctcaggcttcaacatcgaatacgccgcaggccccttcgccctattcttcatagccgaatacacaaacattattataataaacaccctcaccactacaatcttcctaggaacaacatatgacgcactctcccctgaactctacacaacatattttgtcaccaagaccctacttctaacctccctgttcttatgaattcgaacagcatacccccgattccgctacgaccaactcatacacctcctatgaaaaaacttcctaccactcaccctagcattacttatatgacatgtctccatacccattacaatctccagcattccccctcaaacctaagaaatatgtctgataaaagagttactttgatagagtaaataataggagcttaaacccccttatttctaggactatgagaatcgaacccatccctgagaatccaaaattctccgtgccacctatcacaccccatcctaaagtaaggtcagctaaataagctatcgggcccataccccgaaaatgttggttatacccttcccgtactaattaatcccctggcccaacccgtcatctactctaccatctttgcaggcacactcatcacagcgctaagctcgcactgattttttacctgagtaggcctagaaataaacatgctagcttttattccagttctaaccaaaaaaataaaccctcgttccacagaagctgccatcaagtatttcctcacgcaagcaaccgcatccataatccttctaatagctatcctcttcaacaatatactctccggacaatgaaccataaccaatactaccaatcaatactcatcattaataatcataatggctatagcaataaaactaggaatagccccctttcacttctgagtcccagaggttacccaaggcacccctctgacatccggcctgcttcttctcacatgacaaaaactagcccccatctcaatcatataccaaatctctccctcactaaacgtaagccttctcctcactctctcaatcttatccatcatagcaggcagttgaggtggattaaaccaaacccagctacgcaaaatcttagcatactcctcaattacccacataggatgaataatagcagttctaccgtacaaccctaacataaccattcttaatttaactatttatattatcctaactactaccgcattcctactactcaacttaaactccagcaccacgaccctactactatctcgcacctgaaacaagctaacatgactaacacccttaattccatccaccctcctctccctaggaggcctgcccccgctaaccggctttttgcccaaatgggccattatcgaagaattcacaaaaaacaatagcctcatcatccccaccatcatagccaccatcaccctccttaacctctacttctacctacgcctaatctactccacctcaatcacactactccccatatctaacaacgtaaaaataaaatgacagtttgaacatacaaaacccaccccattcctccccacactcatcgcccttaccacactactcctacctatctccccttttatactaataatcttatagaaatttaggttaaatacagaccaagagccttcaaagccctcagtaagttgcaatacttaatttctgtaacagctaaggactgcaaaaccccactctgcatcaactgaacgcaaatcagctactttaattaagctaagcccttactagaccaatgggacttaaacccacaaacacttagttaacagctaagcaccctaatcaactggcttcaatctacttctcccgccgccgggaaaaaaggcgggagaagccccggcaggtttgaagctgcttcttcgaatttgcaattcaatatgaaaatcacctcggagctggtaaaaagaggcctaacccctgtctttagatttacagtccaatgcttcactcagccattttacctcacccccactgatgttcgccgaccgttgactattctctacaaaccacaaagacattggaacactatacctattattcggcgcatgagctggagtcctaggcacagctctaagcctccttattcgagccgagctgggccagccaggcaaccttctaggtaacgaccacatctacaacgttatcgtcacagcccatgcatttgtaataatcttcttcatagtaatacccatcataatcggaggctttggcaactgactagttcccctaataatcggtgcccccgatatggcgtttccccgcataaacaacataagcttctgactcttacctccctctctcctactcctgctcgcatctgctatagtggaggccggagcaggaacaggttgaacagtctaccctcccttagcagggaactactcccaccctggagcctccgtagacctaaccatcttctccttacacctagcaggtgtctcctctatcttaggggccatcaatttcatcacaacaattatcaatataaaaccccctgccataacccaataccaaacgcccctcttcgtctgatccgtcctaatcacagcagtcctacttctcctatctctcccagtcctagctgctggcatcactatactactaacagaccgcaacctcaacaccaccttcttcgaccccgccggaggaggagaccccattctataccaacacctattctgatttttcggtcaccctgaagtttatattcttatcctaccaggcttcggaataatctcccatattgtaacttactactccggaaaaaaagaaccatttggatacataggtatggtctgagctatgatatcaattggcttcctagggtttatcgtgtgagcacaccatatatttacagtaggaatagacgtagacacacgagcatatttcacctccgctaccataatcatcgctatccccaccggcgtcaaagtatttagctgactcgccacactccacggaagcaatatgaaatgatctgctgcagtgctctgagccctaggattcatctttcttttcaccgtaggtggcctgactggcattgtattagcaaactcatcactagacatcgtactacacgacacgtactacgttgtagctcacttccactatgtcctatcaataggagctgtatttgccatcataggaggcttcattcactgatttcccctattctcaggctacaccctagaccaaacctacgccaaaatccatttcactatcatattcatcggcgtaaatctaactttcttcccacaacactttctcggcctatccggaatgccccgacgttactcggactaccccgatgcatacaccacatgaaacatcctatcatctgtaggctcattcatttctctaacagcagtaatattaataattttcatgatttgagaagccttcgcttcgaagcgaaaagtcctaatagtagaagaaccctccataaacctggagtgactatatggatgccccccaccctaccacacattcgaagaacccgtatacataaaatctagacaaaaaaggaaggaatcgaaccccccaaagttggtttcaagccaaccccatggcctccatgactttttcaaaaaggtattagaaaaaccatttcataactttgtcaaagttaaattataggctaaatcctatatatcttaatggcacatgcagcgcaagtaggtctacaagacgctacttcccctatcatagaagagcttatcacctttcatgatcacgccctcataatcattttccttatctgcttcctagtcctgtatgcccttttcctaacactcacaacaaaactaactaatactaacatctcagacgctcaggaaatagaaaccgtctgaactatcctgcccgccatcatcctagtcctcatcgccctcccatccctacgcatcctttacataacagacgaggtcaacgatccctcccttaccatcaaatcaattggccaccaatggtactgaacctacgagtacaccgactacggcggactaatcttcaactcctacatacttcccccattattcctagaaccaggcgacctgcgactccttgacgttgacaatcgagtagtactcccgattgaagcccccattcgtataataattacatcacaagacgtcttgcactcatgagctgtccccacattaggcttaaaaacagatgcaattcccggacgtctaaaccaaaccactttcaccgctacacgaccgggggtatactacggtcaatgctctgaaatctgtggagcaaaccacagtttcatgcccatcgtcctagaattaattcccctaaaaatctttgaaatagggcccgtatttaccctatagcaccccctctaccccctctagagcccactgtaaagctaacttagcattaaccttttaagttaaagattaagagaaccaacacctctttacagtgaaatgccccaactaaatactaccgtatggcccaccataattacccccatactccttacactattcctcatcacccaactaaaaatattaaacacaaactaccacctacctccctcaccaaagcccataaaaataaaaaattataacaaaccctgagaaccaaaatgaacgaaaatctgttcgcttcattcattgcccccacaatcctaggcctacccgccgcagtactgatcattctatttccccctctattgatccccacctccaaatatctcatcaacaaccgactaatcaccacccaacaatgactaatcaaactaacctcaaaacaaatgataaccatacacaacactaaaggacgaacctgatctcttatactagtatccttaatcatttttattgccacaactaacctcctcggactcctgcctcactcatttacaccaaccacccaactatctataaacctagccatggccatccccttatgagcgggcgcagtgattataggctttcgctctaagattaaaaatgccctagcccacttcttaccacaaggcacacctacaccccttatccccatactagttattatcgaaaccatcagcctactcattcaaccaatagccctggccgtacgcctaaccgctaacattactgcaggccacctactcatgcacctaattggaagcgccaccctagcaatatcaaccattaaccttccctctacacttatcatcttcacaattctaattctactgactatcctagaaatcgctgtcgccttaatccaagcctacgttttcacacttctagtaagcctctacctgcacgacaacacataatgacccaccaatcacatgcctatcatatagtaaaacccagcccatgacccctaacaggggccctctcagccctcctaatgacctccggcctagccatgtgatttcacttccactccataacgctcctcatactaggcctactaaccaacacactaaccatataccaatgatggcgcgatgtaacacgagaaagcacataccaaggccaccacacaccacctgtccaaaaaggccttcgatacgggataatcctatttattacctcagaagtttttttcttcgcaggatttttctgagccttttaccactccagcctagcccctaccccccaattaggagggcactggcccccaacaggcatcaccccgctaaatcccctagaagtcccactcctaaacacatccgtattactcgcatcaggagtatcaatcacctgagctcaccatagtctaatagaaaacaaccgaaaccaaataattcaagcactgcttattacaattttactgggtctctattttaccctcctacaagcctcagagtacttcgagtctcccttcaccatttccgacggcatctacggctcaacattttttgtagccacaggcttccacggacttcacgtcattattggctcaactttcctcactatctgcttcatccgccaactaatatttcactttacatccaaacatcactttggcttcgaagccgccgcctgatactggcattttgtagatgtggtttgactatttctgtatgtctccatctattgatgagggtcttactcttttagtataaatagtaccgttaacttccaattaactagttttgacaacattcaaaaaagagtaataaacttcgccttaattttaataatcaacaccctcctagccttactactaataattattacattttgactaccacaactcaacggctacatagaaaaatccaccccttacgaatgcggcttcgaccctatatcccccgcccgcgtccctttctccataaaattcttcttagtagctattaccttcttattatttgatctagaaattgccctccttttacccctaccatgagccctacaaacaactaacctgccactaatagttatgtcatccctcttattaatcatcatcctagccctaagtctggcctatgagtgactacaaaaaggattagactgagccgaattggtatatagtttaaacaaaacgaatgatttcgactcattaaattatgataatcatatttaccaaatgcccctcatttacataaatattatactagcatttaccatctcacttctaggaatactagtatatcgctcacacctcatatcctccctactatgcctagaaggaataatactatcgctgttcattatagctactctcataaccctcaacacccactccctcttagccaatattgtgcctattgccatactagtctttgccgcctgcgaagcagcggtgggcctagccctactagtctcaatctccaacacatatggcctagactacgtacataacctaaacctactccaatgctaaaactaatcgtcccaacaattatattactaccactgacatgactttccaaaaaacacataatttgaatcaacacaaccacccacagcctaattattagcatcatccctctactattttttaaccaaatcaacaacaacctatttagctgttccccaaccttttcctccgaccccctaacaacccccctcctaatactaactacctgactcctacccctcacaatcatggcaagccaacgccacttatccagtgaaccactatcacgaaaaaaactctacctctctatactaatctccctacaaatctccttaattataacattcacagccacagaactaatcatattttatatcttcttcgaaaccacacttatccccaccttggctatcatcacccgatgaggcaaccagccagaacgcctgaacgcaggcacatacttcctattctacaccctagtaggctcccttcccctactcatcgcactgatttacactcacaacaccctaggctcactaaacattctactactcactctcactgcccaagaactatcaaactcctgagccaacaacttaatatgactagcttacacaatagcttttatagtaaagatacctctttacggactccacttatgactccctaaagcccatgtcgaagcccccatcgctgggtcaatagtacttgccgcagtactcttaaaactaggcggctatggtataatacgcctcacactcattctcaaccccctgacaaaacacatagcctaccccttccttgtactatccctatgaggcataattataacaagctccatctgcctacgacaaacagacctaaaatcgctcattgcatactcttcaatcagccacatagccctcgtagtaacagccattctcatccaaaccccctgaagcttcaccggcgcagtcattctcataatcgcccacggacttacatcctcattactattctgcctagcaaactcaaactacgaacgcactcacagtcgcatcataatcctctctcaaggacttcaaactctactcccactaatagctttttgatgacttctagcaagcctcgctaacctcgccttaccccccactattaacctactgggagaactctctgtgctagtaaccacgttctcctgatcaaatatcactctcctacttacaggactcaacatactagtcacagccctatactccctctacatatttaccacaacacaatggggctcactcacccaccacattaacaacataaaaccctcattcacacgagaaaacaccctcatgttcatacacctatcccccattctcctcctatccctcaaccccgacatcattaccgggttttcctcttgtaaatatagtttaaccaaaacatcagattgtgaatctgacaacagaggcttacgaccccttatttaccgagaaagctcacaagaactgctaactcatgcccccatgtctaacaacatggctttctcaacttttaaaggataacagctatccattggtcttaggccccaaaaattttggtgcaactccaaataaaagtaataaccatgcacactactataaccaccctaaccctgacttccctaattccccccatccttaccaccctcgttaaccctaacaaaaaaaactcatacccccattatgtaaaatccattgtcgcatccacctttattatcagtctcttccccacaacaatattcatgtgcctagaccaagaagttattatctcgaactgacactgagccacaacccaaacaacccagctctccctaagcttcaaactagactacttctccataatattcatccctgtggcattgttcgttacatggtccatcatagaattctcactgtgatatataaactcagacccaaacattaatcagttcttcaaatatctactcatcttcctaattaccatactaatcttagttaccgctaacaacctattccaactgttcatcggctgagagggcgtaggaattatatccttcttgctcatcagttgatgatacgcccgagcagatgccaacacagcagccattcaagcaatcctatacaaccgtatcggcgatatcggtttcatcctcgccttagcatgatttatcctacactccaactcatgagacccacaacaaatagcccttctaaacgctaatccaagcctcaccccactactaggcctcctcctagcagcagcaggcaaatcagcccaattaggtctccacccctgactcccctcagccatagaaggccccaccccagtctcagccctactccactcaagcactatagttgtagcaggaatcttcttactcatccgcttccaccccctagcagaaaatagcccactaatccaaactctaacactatgcttaggcgctatcaccactctgttcgcagcagtctgcgcccttacacaaaatgacatcaaaaaaatcgtagccttctccacttcaagtcaactaggactcataatagttacaatcggcatcaaccaaccacacctagcattcctgcacatctgtacccacgccttcttcaaagccatactatttatgtgctccgggtccatcatccacaaccttaacaatgaacaagatattcgaaaaataggaggactactcaaaaccatacctctcacttcaacctccctcaccattggcagcctagcattagcaggaatacctttcctcacaggtttctactccaaagaccacatcatcgaaaccgcaaacatatcatacacaaacgcctgagccctatctattactctcatcgctacctccctgacaagcgcctatagcactcgaataattcttctcaccctaacaggtcaacctcgcttccccacccttactaacattaacgaaaataaccccaccctactaaaccccattaaacgcctgacagccggaagcctattcgcaggatttctcattactaacaacatttcccccgcatcccccttccaaacaacaatccccctctacctaaaactcacagccctcgctgtcactttcctaggacttctaacagccctagacctcaactacctaaccaacaaacttaaaataaaatccccactatgcacattttatttctccaacatactcggattctaccctagcatcacacaccgcacaatcccctatctaggccttcttacgagccaaaacctgcccctactcctcctagacctaacctgactagaaaagctattacctaaaacaatttcacagcaccaaatctccacctccatcatcacctcaacccaaaaaggcataattaaactttacttcctctctttcttcttcccactcatcctaaccctactcctaatcacataacctattcccccgagcaatctcaattacaatatatacaccaacaaacaatgttcaaccagtaactactactaatcaacgcccataatcatacaaagcccccgcaccaataggatcctcccgaatcaaccctgacccctctccttcataaattattcagcttcctacactattaaagtttaccacaaccaccaccccatcatactctttcacccacagcaccaatcctacctccatcgctaaccccactaaaacactcaccaagacctcaacccctgacccccatgcctcaggatactcctcaatagccatcgctgtagtatatccaaagacaaccatcattccccctaaataaattaaaaaaactattaaacccatataacctcccccaaaattcagaataataacacacccgaccacaccactaacaatcaatactaaacccccataaataggagaaggcttagaagaaaaccccacaaaccccattactaaacccacactcaacagaaacaaagcatacatcattattctcgcacggactacaaccacgaccaatgatatgaaaaaccatcgttgtatttcaactacaagaacaccaatgaccccaatacgcaaaattaaccccctaataaaattaattaaccactcattcatcgacctccccaccccatccaacatctccgcatgatgaaacttcggctcactccttggcgcctgcctgatcctccaaatcaccacaggactattcctagccatgcactactcaccagacgcctcaaccgccttttcatcaatcgcccacatcactcgagacgtaaattatggctgaatcatccgctaccttcacgccaatggcgcctcaatattctttatctgcctcttcctacacatcgggcgaggcctatattacggatcatttctctactcagaaacctgaaacatcggcattatcctcctgcttgcaactatagcaacagccttcataggctatgtcctcccgtgaggccaaatatcattctgaggggccacagtaattacaaacttactatccgccatcccatacattgggacagacctagttcaatgaatctgaggaggctactcagtaaacagtcccaccctcacacgattctttacctttcacttcatcttgcccttcattattgcagccctagcagcactccacctcctattcttgcacgaaacgggatcaaacaaccccctaggaatcacctcccattccgataaaatcaccttccacccttactacacaatcaaagacgccctcggcttacttctcttcattctctccttaatgacattaacactattctcaccagacctcctaggcgacccagacaattataccctagccaaccccttaaacacccctccccacatcaagcccgaatgatatttcctattcgcctacacaattctccgatccgtccctaacaaactaggaggcgtccttgccctattactatccatcctcatcctagcaataatccccatcctccatatatccaaacaacaaagcataatatttcgcccactaagccaatcactttattgactcctagccgcagacctcctcattctaacctgaatcggaggacaaccagtaagctacccttttaccatcattggacaagtagcatccatactatacttcacaacaatcctaatcctaataccaactatctccctaattgaaaacaaaatactcaaatgggcctgtccttgtagtataaactaatacaccagtcttgtaaaccggagatgaaaacctttttccaaggacaaatcagagaaaaagtctttaactccaccattagcacccaaagctaagattctaatttaaactattctctgttctttcatggggaagcagatttgggtaccacccaagtattgactcacccatcaacaaccgctatgtatttcgtacattactgccagccaccatgaatattgtacggtaccataaatacttgaccacctgtagtacataaaaacccaatccacatcaaaaccccctccccatgcttacaagcaagtacagcaatcaaccctcaactatcacacatcaactgcaactccaaagccacccctcacccactaggataccaacaaacctacccacccttaacagtacatagtacataaagccatttaccgtacatagcacattacagtcaaatcccttctcgtccccatggatgacccccctcagataggggtcccttgaccaccatcctccgtgaaatcaatatcccgcacaagagtgctactctcctcgctccgggcccataacacttgggggtagctaaagtgaactgtatccgacatctggttcctacttcagggtcataaagcctaaatagcccacacgttccccttaaataagacatcacgatg

SEQ ID NO: 515 - DNA, 16569 bp, Homo sapiens mitochondrial
  3107: "n" refers to a nucleotide at position 3107 of the Cambridge Reference Sequence (CRS, Anderson et al. 1981 Nature 290:457-465), later determined to be absent from the human mtDNA sequence according to the revised CRS (rCRS, Andrews et al. 1999 Nature Genetics 23:147); "n" therefore represents a single nucleotide deletion at a position corresponding to nucleotide 3107 of SEQ ID NO:1 as provided herein.
gatcacaggtctatcaccctattaaccactcacgggagctctccatgcatttggtattttcgtctggggggtgtgcacgcgatagcattgcgagacgctggagccggagcaccctatgtcgcagtatctgtctttgattcctgcctcatcccattatttatcgcacctacgttcaatattatagtcgaacatacctactaaagtgtgttaattaattaatgcttgtaggacataataataacaattaaatgtctgcacagccgttttccacacagacatcataacaaaaaatttccaccaaaccccccctcccccgcttctggccacagcacttaaacacatctctgccaaaccccgaaaacaaagaaccctaacaccagcctaaccagatttcaaattttatcttttggcggtatgcacttttaacagtcaccccccaactaacacattattttcccctcccactcccatactactaatctcatcaatacaacccccgcccatcctacccagcacacacacaccgctgctaaccccataccccgaaccaaccaaaccccaaagacaccccccacagtttatgtagcttacctcctcaaagcaatacactgaaaatgtttagacgggctcacatcaccccataaacaaataggtttggtcctagcctttctattagctcttagtaagattacacatgcaagcatccccactccagtgagttcaccctctaaatcaccacgatcaaaagggacaagcatcaagcacgcaacaatgcagctcaaaacgcttagcctagccacacccccacgggaaacagcagtgataaacctttagcaataaacgaaagtttaactaagctatactaaccccagggttggtcaatttcgtgccagccaccgcggtcacacgattaacccaagtcaatagaagccggcgtaaagagtgttttagatcaccccctccccaataaagctaaaactcacctgagttgtaaaaaactccagttgacacaaaataaactacgaaagtggctttaacatatctgaacacacaatagctaagacccaaactgggattagataccccactatgcttagccctaaacctcaacagttaaatcaacaaaactgctcgccagaacactacgagccacagcttaaaactcaaaggacctggcggtgcttcatatccctctagaggagcctgttctgtaatcgataaaccccgatcaacctcaccacctcttgctcagcctatataccgccatcttcagcaaaccctgatgaaggctacaaagtaagcgcaagtacccacgtaaagacgttaggtcaaggtgtagcccatgaggtggcaagaaatgggctacattttctaccccagaaaactacgatagcccttatgaaacttaagggtcgaaggtggatttagcagtaaactaagagtagagtgcttagttgaacagggccctgaagcgcgtacacaccgcccgtcaccctcctcaagtatacttcaaaggacatttaactaaaacccctacgcatttatatagaggagacaagtcgtaacatggtaagtgtactggaaagtgcacttggacgaaccagagtgtagcttaacacaaagcacccaacttacacttaggagatttcaacttaacttgaccgctctgagctaaacctagccccaaacccactccaccttactaccagacaaccttagccaaaccatttacccaaacaaagtataggcgatagaaattgaaacctggcgcaatagatatagtaccgcaagggaaagatgaaaaattataaccaagcataatatagcaaggactaacccctataccttctgcataatgaattaactagaaataactttgcaaggagagccaaagctaagacccccgaaaccagacgagctacctaagaacagctaaaagagcacacccgtctatgtagcaaaatagtgggaagatttataggtagaggcgacaaacctaccgagcctggtgatagctggttgtccaagatagaatcttagttcaactttaaatttgcccacagaaccctctaaatccccttgtaaatttaactgttagtccaaagaggaacagctctttggacactaggaaaaaaccttgtagagagagtaaaaaatttaacacccatagtaggcctaaaagcagccaccaattaagaaagcgttcaagctcaacacccactacctaaaaaatcccaaacatataactgaactcctcacacccaattggaccaatctatcaccctatagaagaactaatgttagtataagtaacatgaaaacattctcctccgcataagcctgcgtcagatcaaaacactgaactgacaattaacagcccaatatctacaatcaaccaacaagtcattattaccctcactgtcaacccaacacaggcatgctcataaggaaaggttaaaaaaagtaaaaggaactcggcaaatcttaccccgcctgtttaccaaaaacatcacctctagcatcaccagtattagaggcaccgcctgcccagtgacacatgtttaacggccgcggtaccctaaccgtgcaaaggtagcataatcacttgttccttaaatagggacctgtatgaatggctccacgagggttcagctgtctcttacttttaaccagtgaaattgacctgcccgtgaagaggcgggcatgacacagcaagacgagaagaccctatggagctttaatttattaatgcaaacaatacctaacagacccacaggtcctaaactaccaaacctgcattaaaaatttcggttggggcgacctcggagcagaacccaacctccgagcagtacatgctaagacttcaccagtcaaagcgaactaccatactcaattgatccaataacttgaccaacggaacaagttaccctagggataacagcgcaatcctattctagagtccatatcaacaatagggtttacgacctcgatgttggatcaggacatcccgatggtgcagccgctattaaaggttcgtttgttcaacgattaaagtcctacgtgatctgagttcagaccggagtaatccaggtcggtttctatctacnttcaaattcctccctgtacgaaaggacaagagaaataaggcctacttcacaaagcgccttcccccgtaaatgatatcatctcaacttagtattatacccacacccacccaagaacagggtttgttaagatggcagagcccggtaatcgcataaaacttaaaactttacagtcagaggttcaattcctcttcttaacaacacacccatggccaacctcctactcctcattgtacccattctaatcgcaatggcattcctaatgcttaccgaacgaaaaattctaggctacatacaactacgcaaaggccccaacgttgtaggcccctacgggctactacaacccttcgctgacgccataaaactcttcaccaaagagcccctaaaacccgccacatctaccatcaccctctacatcaccgccccgaccttagctctcaccatcgctcttctactatgaacccccctccccatacccaaccccctggttaacctcaacctaggcctcctatttattctagccacctctagcctagccgtttactcaatcctctgatcaggatgagcatcaaactcaaactacgccctaatcggcgcactgcgagcagtagcccaaacaatctcatatgaagtcaccctagccatcattctactatcaacattactaataagtggctcctttaacctctccacccttatcacaacacaagaacacctctgattactcctgccatcatgacccttggccataatatgatttatctccacactagcagagaccaaccgaacccccttcgaccttgccgaaggggagtccgaactagtctcaggcttcaacatcgaatacgccgcaggccccttcgccctattcttcatagccgaatacacaaacattattataataaacaccctcaccactacaatcttcctaggaacaacatatgacgcactctcccctgaactctacacaacatattttgtcaccaagaccctacttctgacctccctgttcttatgaattcgaacagcatacccccgattccgctacgaccaactcatacacctcctatgaaaaaacttcctaccactcaccctagcattacttatatgatatgtctccatacccattacaatctccagcattccccctcaaacctaagaaatatgtctgataaaagagttactttgatagagtaaataataggagcttaaacccccttatttctaggactatgagaatcgaacccatccctgagaatccaaaattctccgtgccacctatcacaccccatcctaaagtaaggtcagctaaataagctatcgggcccataccccgaaaatgttggttatacccttcccgtactaattaatcccctggcccaacccgtcatctactctaccatctttgcaggcacactcatcacagcgctaagctcgcactgattttttacctgagtaggcctagaaataaacatgctagcttttattccagttctaaccaaaaaaataaaccctcgttccacagaagctgccatcaagtatttcctcacgcaagcaaccgcatccataatccttctaatagctatcctcttcaacaatatactctccggacaatgaaccataaccaatactaccaatcaatactcatcattaataatcataatggctatagcaataaaactaggaatagccccctttcacttctgagtcccagaggttacccaaggcacccctctgacatccggcctgcttcttctcacatgacaaaaactagcccccatctcaatcatataccaaatctctccctcactaaacgtaagccttctcctcactctctcaatcttatccatcatagcaggcagttgaggtggattaaaccaaacccagctacgcaaaatcttagcatactcctcaattacccacataggatggataatagcaattctaccgtacaaccctaacataaccattcttaatttaactatttatattatcctaactactaccgcattcctactactcaacttaaactccagcaccacgaccctactactatctcgcacctgaaacaagctaacatgactaacacccttaattccatccaccctcctctccctaggaggcctgcccccgctaaccggctttttgcccaaatgggccattatcgaagaattcacaaaaaacaatagcctcatcatccccaccatcatagccaccatcaccctccttaacctctacttctacctacgcctaatctactccacctcaatcacactactccccatatccaacaacgtaaaaataaaatgacagtttgaacatacaaaacccaccccattcctccccacactcatcgcccttaccacgctactcctacctatctccccttttatactaataatcttatagaaatttaggttaaatacagaccaagagccttcaaagccctcagtaagttgcaatacttaatttctgtaacagctaaggactgcaaaaccccactctgcatcaactgaacgcaaatcagccactttaattaagctaagccctcactagaccaatgggacttaaacccacaaacacttagttaacagctaagcaccctaatcaactggcttcaatctacttctcccgccgccgggaaaaaaggcgggagaagccccggcaggtttgaagctgcttcttcgaatttgcaattcaatatgaaaatcacctcggagctggtaaaaagaggcctaacccctgtctttagatttacagtccaatgcttcactcagccattttacctcacccccactgatgttcgccgaccgttgactattctctacaaaccacaaagacattggaacactatacctattattcggcgcatgagctggagtcctaggcacagctctaagcctccttattcgagccgagctgggccagccaggcaaccttctaggtaacgaccacatctacaacgttatcgtcacagcccatgcatttgtaataatcttcttcatagtaatacccatcataatcggaggctttggcaactgactagttcccctaataatcggtgcccccgatatggcgtttccccgcataaacaacataagcttctgactcttacctccctctctcctactcctgctcgcatctgctatagtggaggccggagcaggaacaggttgaacagtctaccctcccttagcagggaactactcccaccctggagcctccgtagacctaaccatcttctccttacacctagcaggtgtctcctctatcttaggggccatcaatttcatcacaacaattatcaatataaaaccccctgccataacccaataccaaacgcccctcttcgtctgatccgtcctaatcacagcagtcctacttctcctatctctcccagtcctagctgctggcatcactatactactaacagaccgcaaccttaacaccaccttcttcgaccccgccggaggaggagaccccattctataccaacacctattctgatttttcggtcaccctgaagtttatattcttatcctaccaggcttcggaataatctcccatattgtaacttactactccggaaaaaaagaaccatttggatacataggtatggtctgagctatgatatcaattggcttcctagggtttatcgtgtgagcacaccatatatttacagtaggaatagacgtagacacacgagcatatttcacctccgccaccataatcatcgctatccccaccggcgtcaaagtatttagctgactcgccacactccacggaagcaatatgaaatgatctgctgcagtgctctgagccctaggattcatctttcttttcaccgtaggtggcctgactggcattgtattagcaaactcatcgctagacatcgtactacacgacacgtactacgttgtagctcacttccactatgtcctatcaataggggctgtatttgccatcataggaggcttcattcactgatttcccctattctcaggctacaccctagaccaaacctacgccaaaatccatttcgctatcatattcatcggcgtaaatctaactttcttcccacaacactttctcggcctatccggaatgccccgacgttactcggactaccccgatgcatacaccacatgaaatatcctatcatctgtaggctcattcatttctctaacagcagtaatattaataattttcatgatttgagaagccttcgcttcgaagcgaaaagtcctaatagtagaagaaccctccataaacctggagtgactacatggatgccccccaccctaccacacattcgaagaacccgtatacataaaatctagacaaaaaaggaaggaatcgaaccccccaaagctggtttcaagccaaccccatggcctccatgactttttcaaaaagatattagaaaaaccatttcataactttgtcaaagttaaattataggctaaatcctatatatcttaatggcacatgcagcgcaagtaggtctacaagacgctacttcccctatcatagaagagcttatcacctttcatgatcacgccctcataatcattttccttatctgcttcctagtcctgtatgcccttttcctaacactcacaacaaaactaactaatactaacatctcagacgctcaggaaatagaaaccgtctgaactatcctgcccgccatcatcctagtcctcatcgccctcccatccctacgcatcctttacataacagacgaggtcaacgatccctctcttaccatcaaatcaattggccaccaatggtactgaacctacgagtacaccgactacggcggactaatcttcaactcctacatacttcccccattattcctagaaccaggcgacctgcgactccttgacgttgacaatcgagtagtactcccgattgaagcccccattcgtataataattacatcacaagacgtcttgcactcatgagctgtccccacattaggcttaaaaacagatgcaattcccggacgtctaaaccaaaccactttcaccgctacacgaccgggggtatactacggtcaatgctctgaaatctgtggagcaaaccacagtttcatgcccatcgtcctagaattaattcccctaaaaatctttgaaatggggcccgtatttaccctatagcaccccctctaccccctctagagcccactgtaaagctaacttagcattaaccttttaagttaaagattaagagaaccaacacctctttacagtgaaatgccccaactaaatactaccgtatggcccaccataattacccccatactccttacactattcctcatcacccaactaaaaatattaaacacaaactaccacttacctccctcaccaaagcccataaaaataaaaaattataacaaaccctgagaaccaaaatgaacgaaaatctgttcgcttcattcattgcccccacaatcctaggcctacccgccgcagtactgatcattctatttccccctctattgatccccacctccaaatatctcatcaacaaccgactaattaccacccaacaatgactaatcaaactaacctcaaaacaaatgatagccatacacaacactaaaggacgaacctgatctcttatactagtatccttaatcatttttattgccacaactaacctcctcggactcctgcctcactcatttacaccaaccacccaactatctataaacctagccatggccatccccttatgagcgggcgcagtgattataggctttcgctctaagattaaaaatgccctagcccacttcttaccacaaggcacacctacaccccttatccccatactagttattatcgaaaccatcagcctactcattcaaccaatagccctggccgtacgcctaaccgctaacattactgcaggccacctactcatgcacctaattggaagcgccaccctagcaatatcaaccattaaccttccctctacacttatcatcttcacaattctaattctactgactatcctagaaatcgctgtcgccttaatccaagcctacgttttcacacttctagtaagcctctacctgcacgacaacacataatgacccaccaatcacatgcctatcatatagtaaaacccagcccatgacccctaacaggggccctctcagccctcctaatgacctccggcctagccatgtgatttcacttccactccataacgctcctcatactaggcctactaaccaacacactaaccatataccaatgatggcgcgatgtaacacgagaaagcacataccaaggccaccacacaccacctgtccaaaaaggccttcgatacgggataatcctatttattacctcagaagtttttttcttcgcaggatttttctgagccttttaccactccagcctagcccctaccccccaactaggagggcactggcccccaacaggcatcaccccgctaaatcccctagaagtcccactcctaaacacatccgtattactcgcatcaggagtatcaatcacctgagctcaccatagtctaatagaaaacaaccgaaaccaaataattcaagcactgcttattacaattttactgggtctctattttaccctcctacaagcctcagagtacttcgagtctcccttcaccatttccgacggcatctacggctcaacattttttgtagccacaggcttccacggacttcacgtcattattggctcaactttcctcactatctgcttcatccgccaactaatatttcactttacatccaaacatcactttggcttcgaagccgccgcctgatactggcattttgtagatgtggtttgactatttctgtatgtctccatctattgatgagggtcttactcttttagtataaatagtaccgttaacttccaattaactagttttgacaacattcaaaaaagagtaataaacttcgccttaattttaataatcaacaccctcctagccttactactaataattattacattttgactaccacaactcaacggctacatagaaaaatccaccccttacgagtgcggcttcgaccctatatcccccgcccgcgtccctttctccataaaattcttcttagtagctattaccttcttattatttgatctagaaattgccctccttttacccctaccatgagccctacaaacaactaacctgccactaatagttatgtcatccctcttattaatcatcatcctagccctaagtctggcctatgagtgactacaaaaaggattagactgagccgaattggtatatagtttaaacaaaacgaatgatttcgactcattaaattatgataatcatatttaccaaatgcccctcatttacataaatattatactagcatttaccatctcacttctaggaatactagtatatcgctcacacctcatatcctccctactatgcctagaaggaataatactatcgctgttcattatagctactctcataaccctcaacacccactccctcttagccaatattgtgcctattgccatactagtctttgccgcctgcgaagcagcggtaggcctagccctactagtctcaatctccaacacatatggcctagactacgtacataacctaaacctactccaatgctaaaactaatcgtcccaacaattatattactaccactgacatgactctccaaaaaacacataatttgaatcaacacaaccacccacagcctaattattagcatcatccccctactattttttaaccaaatcaacaacaacctatttagctgttccccaaccttttcctccgaccccctaacaacccccctcctaatactaactacctgactcctacccctcacaatcatggcaagccaacgccacttatccagtgaaccactatcacgaaaaaaactctacctctctatactaatctccctacaaatctccttaattataacattcacagccacagaactaatcatattttatatcttcttcgaaaccacacttatccccaccttggctatcatcacccgatgaggcaaccagccagaacgcctgaacgcaggcacatacttcctattctacaccctagtaggctcccttcccctactcatcgcactaatttacactcacaacaccctaggctcactaaacattctactactcactctcactgcccaagaactatcaaactcctgagccaacaacttaatatgactagcttacacaatagcttttatagtaaagatacctctttacggactccacttatgactccctaaagcccatgtcgaagcccccatcgctgggtcaatagtacttgccgcagtactcttaaaactaggcggctatggtataatacgcctcacactcattctcaaccccctgacaaaacacatagcctaccccttccttgtactatccctatgaggcataattataacaagctccatctgcctacgacaaacagacctaaaatcgctcattgcatactcttcaatcagccacatagccctcgtagtaacagccattctcatccaaaccccctgaagcttcaccggcgcagtcattctcataatcgcccacggacttacatcctcattactattctgcctagcaaactcaaactacgaacgcactcacagtcgcatcataatcctctctcaaggacttcaaactctactcccactaatagctttttgatgacttctagcaagcctcgctaacctcgccttaccccccactattaacctactgggagaactctctgtgctagtaaccacgttctcctgatcaaatatcactctcctacttacaggactcaacatactagtcacagccctatactccctctacatatttaccacaacacaatggggctcactcacccaccacattaacaacataaaaccctcattcacacgagaaaacaccctcatgttcatacacctatcccccattctcctcctatccctcaaccccgacatcattaccgggttttcctcttgtaaatatagtttaaccaaaacatcagattgtgaatctgacaacagaggcttacgaccccttatttaccgagaaagctcacaagaactgctaactcatgcccccatgtctaacaacatggctttctcaacttttaaaggataacagctatccattggtcttaggccccaaaaattttggtgcaactccaaataaaagtaataaccatgcacactactataaccaccctaaccctgacttccctaattccccccatccttaccaccctcgttaaccctaacaaaaaaaactcatacccccattatgtaaaatccattgtcgcatccacctttattatcagtctcttccccacaacaatattcatgtgcctagaccaagaagtcattatctcgaactgacactgagccacaacccaaacaacccagctctccctaagcttcaaactagactacttctccataatattcatccctgtagcattgttcgttacatggtccatcatagaattctcactgtgatatataaactcagacccaaacattaatcagttcttcaaatatctactcattttcctaattaccatactaatcttagttaccgctaacaacctattccaactgttcatcggctgagagggcgtaggaattatatccttcttgctcatcagttgatgatacgcccgagcagatgccaacacagcagccattcaagcaatcctatacaaccgtatcggcgatatcggtttcatcctcgccttagcatgatttatcctacactccaactcatgagacccacaacaaatagcccttctaaacgctaatccaagcctcaccccactactaggcctcctcctagcagcagcaggcaaatcagcccaattaggtctccacccctgactcccctcagccatagaaggccccaccccagtctcagccctactccactcaagcactatagttgtagcaggagtcttcttactcatccgcttccaccccctagcagaaaatagcccactaatccaaactctaacactatgcttaggcgctatcaccactctgttcgcagcagtctgcgcccttacacaaaatgacatcaaaaaaatcgtagccttctccacttcaagtcaactaggactcataatagttacaatcggcatcaaccaaccacacctagcattcctgcacatctgtacccacgccttcttcaaagccatactatttatgtgctccgggtccatcatccacaaccttaacaatgaacaagatattcgaaaaataggaggactactcaaaaccatacctctcacttcaacctccctcaccattggcagcctagcattagcaggaatacctttcctcacaggtttctattccaaagaccacatcatcgaaaccgcaaacatatcatacacaaacgcctgagccctatctattactctcatcgctacctccctgacaagcgcctatagcactcgaataattcttctcaccctaacaggtcaacctcgcttccctacccttactaacattaacgaaaataaccccaccctactaaaccccattaaacgcctggcagccggaagcctattcgcaggatttctcattactaacaacatttcccccgcatcccccttccaaacaacaatccccctccacctaaaactcacagccctcgctgtcactttcctaggacttctaacagccctagacctcaactacctaaccaacaaacttaaaataaaatacccactatgcacattttatttctccaacatactcggattctaccctagcatcacacaccgcacaatcccctatctaggccttcttacgagccaaaacctgcccctactcctcctagacctaacctgactagaaaagctattacctaaaacaatttcacagcaccaaatctccacctccatcatcacctcaacccaaaaaggcataattaaactttacttcctctctttcttcttcccactcatcctaaccctactcctaatcacataacctattcccccgagcaatctcaattacaacatatacaccaacaaacaatgttcagccagtaactactactaatcaacgcccataatcatacaaagcccccgcaccaataggatcctcccgaatcaaccctgacccctctccttcataaattattcagcttcctacactattaaagtttaccacaaccaccaccccatcatactctttcacccacagcaccaatcctacctccatcgctaaccccactaaaacactcaccaagacctcaacccctgacccccatgcctcaggatactcctcaatagccatcgctgtagtatatccaaagacaaccatcattccccctaaataaattaaaaaaactattaaacccatataacctcccccaaaattcagaataataacacacccaaccacaccgctaacaatcaatactaaacccccataaataggagaaggcttagaagaaaaccccacaaaccccattactaaacccacactcaacagaaacaaagcatacatcattattctcgcacggactacaaccacgaccaatgatatgaaaaaccatcgttgtatttcaactacaagaacaccaatgaccccaatacgcaaaattagccccctaataaaattaattaaccactcattcatcgacctccccaccccatccaacatctccgcatgatgaaacttcggctcactccttggcgcctgcctgatcctccaaatcaccacaggactattcctagccatgcactactcaccagacgcctcaaccgccttttcatcaatcgcccacatcactcgagacgtaaattatggctgaatcatccgctaccttcacgccaatggcgcctcaatattctttatctgcctcttcctacacatcgggcgaggcctatattacggatcatttctctactcagaaacctgaaacatcggcattatcctcctgcttgcaaccatagcaacagccttcataggctatgtcctcccgtgaggccaaatatcattctgaggggccacagtaattacaaacttactatccgccatcccatacattgggacagacctagttcaatgaatctgaggaggctactcagtagacagtcccaccctcacacgattctttacctttcacttcatcttgcccttcattattgcagccctagcagcactccacctcctattcttgcacgaaacgggatcaaacaaccccctaggaatcacctcccattccgataaaatcaccttccacccttactacacaatcaaagacgccctcggcttacttctcttccttctctccttaatgacattaacactattctcaccagacctcctaggcgacccagacaattataccctagccaaccccttaaacacccctccccacatcaagcccgaatgatatttcctattcgcctacacaattctccgatccgtccctaacaaactaggaggcgtccttgccctattactatccatcctcatcctagcaataatccccatcctccatatatccaaacaacaaagcataatatttcgcccactaagccaatcactttattgactcctagccgcagacctcctcattctaacctgaatcggaggacaaccagtaagctacccttttaccatcattggacaagtagcatccgtactatacttcacaacaatcctaatcctaataccaactatctccctaattgaaaacaaaatactcaaatgggcctgtccttgtagtataaactaatacaccagtcttgtaaaccggagatgaaaacctttttccaaggacaaatcagagaaaaagtctttaactccaccattagcacccaaagctaagattctaatttaaactattctctgttctttcatggggaagcagatttgggtaccacccaagtattgactcacccatcaacaaccgctatgtatttcgtacattactgccagccaacatgaatattgcacggtaccataaatacttgaccacctgtagtacataaaaacccaatccacatcaaaaccctccccccatgcttacaagcaagtacagcgatcaaccttcaactatcacacatcaactgcaactccaaagccaccccttacccattaggatatcaacaaacctacccgcccttaacagtacatagcacataaagccatttaccgtacatagcacattacagtcaaatcccttctcgtccccatggatgacccccctcagataggggtcccttgaccaccatcctccgtgaaatcaatatcccgcacaagagtgctactctcctcgctccgggcccataacacttgggggtagctaaagtgaactgtatccgacatctggttcctacttcagggccataaagcctaaatagcccacacgttccccttaaataagacatcacgatg

SEQ ID NO: 516 - DNA, 16569 bp, Homo sapiens mitochondrial
  3107: "n" refers to a nucleotide at position 3107 of the Cambridge Reference Sequence (CRS, Anderson et al. 1981 Nature 290:457-465), later determined to be absent from the human mtDNA sequence according to the revised CRS (rCRS, Andrews et al. 1999 Nature Genetics 23:147); "n" therefore represents a single nucleotide deletion at a position corresponding to nucleotide 3107 of SEQ ID NO:1 as provided herein.
gatcacaggtctatcaccctattaaccactcacgggagctctccatgcatttggtattttcgtctggggggtatgcacgcgatagcattgcgagacgctggagccggagcaccctatgtcgcagtatctgtctttgattcctgcctcatcctattatttatcgcacctacgttcaatattacaggcgaacatacttactaaagtgtgttaattaattaatgcttgtaggacataataataacaattgaatgtctgcacagccactttccacacagacatcataacaaaaaatttccaccaaaccccccctcccccgcttctggccacagcacttaaacacatctctgccaaaccccaaaaacaaagaaccctaacaccagcctaaccagatttcaaattttatcttttggcggtatgcacttttaacagtcaccccccaactaacacattattttcccctcccactcccatactactaatctcatcaatacaacccccgcccatcctacccagcacacacacaccgctgctaaccccataccccgaaccaaccaaaccccaaagacaccccccacagtttatgtagcttacctcctcaaagcaatacactgaaaatgtttagacgggctcacatcaccccataaacaaataggtttggtcctagcctttctattagctcttagtaagattacacatgcaagcatccccgttccagtgagttcaccctctaaatcaccacgatcaaaagggacaagcatcaagcacgcagcaatgcagctcaaaacgcttagcctagccacacccccacgggaaacagcagtgattaacctttagcaataaacgaaagtttaactaagctatactaaccccagggttggtcaatttcgtgccagccaccgcggtcacacgattaacccaagtcaatagaagccggcgtaaagagtgttttagatcaccccctccccaataaagctaaaactcacctgagttgtaaaaaactccagttgacacaaaatagactacgaaagtggctttaacatatctgaacacacaatagctaagacccaaactgggattagataccccactatgcttagccctaaacctcaacagttaaatcaacaaaactgctcgccagaacactacgagccacagcttaaaactcaaaggacctggcggtgcttcatatccctctagaggagcctgttctgtaatcgataaaccccgatcaacctcaccacctcttgctcagcctatataccgccatcttcagcaaaccctgatgaaggctacaaagtaagcgcaagtacccacgtaaagacgttaggtcaaggtgtagcccatgaggtggcaagaaatgggctacattttctaccccagaaaactacgatagcccttatgaaacttaagggtcgaaggtggatttagcagtaaactgagagtagagtgcttagttgaacagggccctgaagcgcgtacacaccgcccgtcaccctcctcaagtatacttcaaaggacatttaactaaaacccctacgcatttatatagaggagacaagtcgtaacatggtaagtgtactggaaagtgcacttggacgaaccagagtgtagcttaacacaaagcacccaacttacacttaggagatttcaacttaacttgaccgctctgagctaaacctagccccaaacccactccaccttactaccagacaaccttagccaaaccatttacccaaataaagtataggcgatagaaattgaaacctggcgcaatagatatagtaccgcaagggaaagatgaaaaattataaccaagcataatatagcaaggactaacccctataccttctgcataatgaattaactagaaataactttgcaaggagagccaaagctaagacccccgaaaccagacgagctacctaagaacagctaaaagagcacacccgtctatgtagcaaaatagtgggaagatttataggtagaggcgacaaacctaccgagcctggtgatagctggttgtccaagatagaatcttagttcaactttaaatttgcccacagaaccctctaaatccccttgtaaatttaactgttagtccaaagaggaacagctctttggacactaggaaaaaaccttgtagagagagtaaaaaatttaacacccatagtaggcctaaaagcagccaccaattaagaaagcgttcaagctcaacacccactacctaaaaaatcccaaacatataactgaactcctcacacccaattggaccaatctatcaccctatagaagaactaatgttagtataagtaacatgaaaacattctcctccgcataagcctgcgtcagattaaaacactgaactgacaattaacagcccaatatctacaatcaaccaacaagtcattattaccctcactgtcaacccaacacaggcatgctcataaggaaaggttaaaaaaagtaaaaggaactcggcaaatcttaccccgcctgtttaccaaaaacatcacctctagcatcaccagtattagaggcaccgcctgcccagtgacacatgtttaacggccgcggtaccctaaccgtgcaaaggtagcataatcacttgttccttaaatagggacctgtatgaatggctccacgagggttcagctgtctcttacttttaaccagtgaaattgacctgcccgtgaagaggcgggcatgacacagcaagacgagaagaccctatggagctttaatttattaatgcaaacagtacctaacaaacccacaggtcctaaactaccaaacctgcattaaaaatttcggttggggcgacctcggagcagaacccaacctccgagcagtacatgctaagacttcaccagtcaaagcgaactactatactcaattgatccaataacttgaccaacggaacaagttaccctagggataacagcgcaatcctattctagagtccatatcaacaatagggtttacgacctcgatgttggatcaggacatcccaatggtgcagccgctattaaaggttcgtttgttcaacgattaaagtcctacgtgatctgagttcagaccggagtaatccaggtcggtttctatctacnttcaaattcctccctgtacgaaaggacaagagaaataaggcctacttcacaaagcgccttcccccgtaaatgatatcatctcaacttagtattatacccacacccacccaagaacagggtttgttaagatggcagagcccggtaatcgcataaaacttaaaactttacagtcagaggttcaattcctcttcttaacaacatacccatggccaacctcctactcctcattgtacccattctaatcgcaatggcattcctaatgcttaccgaacgaaaaattctaggctatatacaactacgcaaaggccccaacgttgtaggcccctacgggctactacaacccttcgctgacgccataaaactcttcaccaaagagcccctaaaacccgccacatctaccatcaccctctacatcaccgccccgaccttagctctcaccatcgctcttctactatgaacccccctccccatacccaaccccctggtcaacctcaacctaggcctcctatttattctagccacctctagcctagccgtttactcaatcctctgatcagggtgagcatcaaactcaaactacgccctgatcggcgcactgcgagcagtagcccaaacaatctcatatgaagtcaccctagccatcattctactatcaacattactaataagtggctcctttaacctctccacccttatcacaacacaagaacacctctgattactcctgccatcatgacccttggccataatatgatttatctccacactagcagagaccaaccgaacccccttcgaccttgccgaaggggagtccgaactagtctcaggcttcaacatcgaatacgccgcaggccccttcgccctattcttcatagccgaatacacaaacattattataataaacaccctcaccactacaatcttcctaggaacaacatatgacgcactctcccctgaactctacacaacatattttgtcaccaagaccctacttctaacctccctgttcttatgaattcgaacagcatacccccgattccgctacgaccaactcatacacctcctatgaaaaaacttcctaccactcaccctagcattacttatatgacatgtctccatacccattacaatctccagcattccccctcaaacctaagaaatatgtctgataaaagagttactttgatagagtaaataataggagcttaaacccccttatttctaggactatgagaatcgaacccatccctgagaatccaaaattctccgtgccacctatcacaccccatcctaaagtaaggtcagctaaataagctatcgggcccataccccgaaaatgttggttatacccttcccgtactaattaatcccctggcccaacccgtcatctactctaccatctttgcaggcacactcatcacagcgctaagctcgcactgattttttacctgagtaggcctagaaataaacatgctagcttttattccagttctaaccaaaaaaataaaccctcgttccacagaagctgccatcaagtatttcctcacgcaagcaaccgcatccataatccttctaatagctatcctcttcaacaatatactctccggacaatgaaccataaccaatactaccaatcaatactcatcattaataatcataatggctatagcaataaaactaggaatagccccctttcacttctgagtcccagaggttacccaaggcacccctctgacatccggcctgcttcttctcacatgacaaaaactagcccccatctcaatcatataccaaatctctccctcactaaacgtaagccttctcctcactctctcaatcttatccatcatagcaggcagttgaggtggattaaaccaaacccagctacgcaaaatcttagcatactcctcaattacccacataggatgaataatagcagttctaccgtacaaccctaacataaccattcttaatttaactatttatattatcctaactactaccgcattcctactactcaacttaaactccagcaccacgaccctactactatctcgcacctgaaacaagctaacatgactaacacccttaattccatccaccctcctctccctaggaggcctgcccccgctaaccggctttttgcccaaatgggccattatcgaagaattcacaaaaaacaatagcctcatcatccccaccatcatagccaccatcaccctccttaacctctacttctacctacgcctaatctactccacctcaatcacactactccccatatctaacaacgtaaaaataaaatgacagtttgaacatacaaaacccaccccattcctccccacactcatcgcccttaccacgctactcctacctatctccccttttatactaataatcttatagaaatttaggttaaatacagaccaagagccttcaaagccctcagtaagttgcaatacttaatttctgtaacagctaaggactgcaaaaccccactctgcatcaactgaacgcaaatcagccactttaattaagctaagcccttactagaccaatgggacttaaacccacaaacacttagttaacagctaagcaccctaatcaactggcttcaatctacttctcccgccgccgggaaaaaaggcgggagaagccccggcaggtttgaagctgcttcttcgaatttgcaattcaatatgaaaatcacctcggagctggtaaaaagaggcctaacccctgtctttagatttacagtccaatgcttcactcagccattttacctcacccccactgatgttcgccgaccgttgactattctctacaaaccacaaagacattggaacactatacctattattcggcgcatgagctggagtcctaggcacagctctaagcctccttattcgagccgagctgggccagccaggcaaccttctaggtaacgaccacatctacaacgttatcgtcacagcccatgcatttgtaataatcttcttcatagtaatacccatcataatcggaggctttggcaactgactagttcccctaataatcggtgcccccgatatggcgtttccccgcataaacaacataagcttctgactcttacctccctctctcctactcctgctcgcatctgctatagtggaggccggagcaggaacaggttgaacagtctaccctcccttagcagggaactactcccaccctggagcctccgtagacctaaccatcttctccttacacctagcaggtgtctcctctatcttaggggccatcaatttcatcacaacaattatcaatataaaaccccctgccataacccaataccaaacgcccctcttcgtctgatccgtcctaatcacagcagtcctacttctcctatctctcccagtcctagctgctggcatcactatactactaacagaccgcaacctcaacaccaccttcttcgaccccgccggaggaggagaccccattctataccaacacctattctgatttttcggtcaccctgaagtttatattcttatcctaccaggcttcggaataatctcccatattgtaacttactactccggaaaaaaagaaccatttggatacataggtatggtctgagctatgatatcaattggcttcctagggtttatcgtgtgagcacaccatatatttacagtaggaatagacgtagacacacgagcatatttcacctccgctaccataatcatcgctatccccaccggcgtcaaagtatttagctgactcgccacactccacggaagcaatatgaaatgatctgctgcagtgctctgagccctaggattcatctttcttttcaccgtaggtggcctgactggcattgtattagcaaactcatcactagacatcgtactacacgacacgtactacgttgtagctcacttccactatgtcctatcaataggagctgtatttgccatcataggaggcttcattcactgatttcccctattctcaggctacaccctagaccaaacctacgccaaaatccatttcactatcatattcatcggcgtaaatctaactttcttcccacaacactttctcggcctatccggaatgccccgacgttactcggactaccccgatgcatacaccacatgaaacatcctatcatctgtaggctcattcatttctctaacagcagtaatattaataattttcatgatttgagaagccttcgcttcgaagcgaaaagtcctaatagtagaagaaccctccataaacctggagtgactatatggatgccccccaccctaccacacattcgaagaacccgtatacataaaatctagacaaaaaaggaaggaatcgaaccccccaaagctggtttcaagccaaccccatggcctccatgactttttcaaaaaggtattagaaaaaccatttcataactttgtcaaagttaaattataggctaaatcctatatatcttaatggcacatgcagcgcaagtaggtctacaagacgctacttcccctatcatagaagagcttatcacctttcatgatcacgccctcataatcattttccttatctgcttcctagtcctgtatgcccttttcctaacactcacaacaaaactaactaatactaacatctcagacgctcaggaaatagaaaccgtctgaactatcctgcccgccatcatcctagtcctcatcgccctcccatccctacgcatcctttacataacagacgaggtcaacgatccctcccttaccatcaaatcaattggccaccaatggtactgaacctacgagtacaccgactacggcggactaatcttcaactcctacatacttcccccattattcctagaaccaggcgacctgcgactccttgacgttgacaatcgagtagtactcccgattgaagcccccattcgtataataattacatcacaagacgtcttgcactcatgagctgtccccacattaggcttaaaaacagatgcaattcccggacgtctaaaccaaaccactttcaccgctacacgaccgggggtatactacggtcaatgctctgaaatctgtggagcaaaccacagtttcatgcccatcgtcctagaattaattcccctaaaaatctttgaaatagggcccgtatttaccctatagcaccccctctaccccctctagagcccactgtaaagctaacttagcattaaccttttaagttaaagattaagagaaccaacacctctttacagtgaaatgccccaactaaatactaccgtatggcccaccataattacccccatactccttacactattcctcatcacccaactaaaaatattaaacacaaactaccacctacctccctcaccaaagcccataaaaataaaaaattataacaaaccctgagaaccaaaatgaacgaaaatctgttcgcttcattcattgcccccacaatcctaggcctacccgccgcagtactgatcattctatttccccccctattgatccccacctccaaatatctcatcaacaaccgactaatcaccacccaacaatgactaatcaaactaacctcaaaacaaatgataaccatacacaacactaaaggacgaacctgatctcttatactagtatccttaatcatttttattgccacaactaacctcctcggactcctgcctcactcatttacaccaaccacccaactatctataaacctagccatggccatccccttatgagcgggcgcagtgattataggctttcgctctaagattaaaaatgccctagcccacttcttaccacaaggcacacctacaccccttatccccatactagttattatcgaaaccatcagcctactcattcaaccaatagccctggccgtacgcctaaccgctaacattactgcaggccacctactcatgcacctaattggaagcgccaccctagcaatatcaaccattaaccttccctctacacttatcatcttcacaattctaattctactgactatcctagaaatcgctgtcgccttaatccaagcctacgttttcacacttctagtaagcctctacctgcacgacaacacataatgacccaccaatcacatgcctatcatatagtaaaacccagcccatgacccctaacaggggccctctcagccctcctaatgacctccggcctagccatgtgatttcacttccactccataacgctcctcatactaggcctactaaccaacacactaaccatataccaatgatggcgcgatgtaacacgagaaagcacataccaaggccaccacacaccacctgtccaaaaaggccttcgatacgggataatcctatttattacctcagaagtttttttcttcgcaggatttttctgagccttttaccactccagcctagcccctaccccccaattaggagggcactggcccccaacaggcatcaccccgctaaatcccctagaagtcccactcctaaacacatccgtattactcgcatcaggagtatcaatcacctgagctcaccatagtctaatagaaaacaaccgaaaccaaataattcaagcactgcttattacaattttactgggtctctattttaccctcctacaagcctcagagtacttcgagtctcccttcaccatttccgacggcatctacggctcaacattttttgtagccacaggcttccacggacttcacgtcattattggctcaactttcctcactatctgcttcatccgccaactaatatttcactttacatccaaacatcactttggcttcgaagccgccgcctgatactggcattttgtagatgtggtttgactatttctgtatgtctccatctattgatgagggtcttactcttttagtataaatagtaccgttaacttccaattaactagttttgacaacattcaaaaaagagtaataaacttcgccttaattttaataatcaacaccctcctagccttactactaataattattacattttgactaccacaactcaacggctacatagaaaaatccaccccttacgagtgcggcttcgaccctatatcccccgcccgcgtccctttctccataaaattcttcttagtagctattaccttcttattatttgatctagaaattgccctccttttacccctaccatgagccctacaaacaactaacctgccactaatagttatgtcatccctcttattaatcatcatcctagccctaagtctggcctatgagtgactacaaaaaggattagactgagccgaattggtatatagtttaaacaaaacgaatgatttcgactcattaaattatgataatcatatttaccaaatgcccctcatttacataaatattatactagcatttaccatctcacttctaggaatactagtatatcgctcacacctcatatcctccctactatgcctagaaggaataatactatcgctgttcattatagctactctcataaccctcaacacccactccctcttagccaatattgtgcctattgccatactagtctttgccgcctgcgaagcagcagtgggcctagccctactagtctcaatctccaacacatatggcctagactacgtacataacctaaacctactccaatgctaaaactaatcgtcccaacaattatattactaccactgacatgactttccaaaaaacacataatttgaatcaacacaaccacccacagcctaattattagcatcatccctctactattttttaaccaaatcaacaacaacctatttagctgttccccaaccttttcctccgaccccctaacaacccccctcctaatactaactacctgactcctacccctcacaatcatggcaagccaacgccacttatccagtgaaccactatcacgaaaaaaactctacctctctatactaatctccctacaaatctccttaattataacattcacagccacagaactaatcatattttatatcttcttcgaaaccacacttatccccaccttggctatcatcacccgatgaggcaaccagccagaacgcctgaacgcaggcacatacttcctattctacaccctagtaggctcccttcccctactcatcgcactgatttacactcacaacaccctaggctcactaaacattctactactcactctcactgcccaagaactatcaaactcctgagccaacaacttaatatgactagcttacacaatagcttttatagtaaagatacctctttacggactccacttatgactccctaaagcccatgtcgaagcccccatcgctgggtcaatagtacttgccgcagtactcttaaaactaggcggctatggtataatacgcctcacactcattctcaaccccctgacaaaacacatagcctaccccttccttgtactatccctatgaggcataattataacaagctccatctgcctacgacaaacagacctaaaatcgctcattgcatactcttcaatcagccacatagccctcgtagtaacagccattctcatccaaaccccctgaagcttcaccggcgcagtcattctcataatcgcccacggacttacatcctcattactattctgcctagcaaactcaaactacgaacgcactcacagtcgcatcataatcctctctcaaggacttcaaactctactcccactaatagctttttgatgacttctagcaagcctcgctaacctcgccttaccccccactattaacctactgggagaactctctgtgctagtaaccacgttctcctgatcaaatatcactctcctacttacaggactcaacatactagtcacagccctatactccctctacatatttaccacaacacaatggggctcactcacccaccacattaacaacataaaaccctcattcacacgagaaaacaccctcatgttcatacacctatcccccattctcctcctatccctcaaccccgacatcattaccgggttttcctcttgtaaatatagtttaaccaaaacatcagattgtgaatctgacaacagaggcttacgaccccttatttaccgagaaagctcacaagaactgctaactcatgcccccatgtctaacaacatggctttctcaacttttaaaggataacagctatccattggtcttaggccccaaaaattttggtgcaactccaaataaaagtaataaccatgcacactactataaccaccctaaccctgacttccctaattccccccatccttaccaccctcgttaaccctaacaaaaaaaactcatacccccattatgtaaaatccattgtcgcatccacctttattatcagtctcttccccacaacaatattcatgtgcctagaccaagaagttattatctcgaactgacactgagccacaacccaaacaacccagctctccctaagcttcaaactagactacttctccataatattcatccctgtggcattgttcgttacatggtccatcatagaattctcactgtgatatataaactcagacccaaacattaatcagttcttcaaatatctactcatcttcctaattaccatactaatcttagttaccgctaacaacctattccaactgttcatcggctgagagggcgtaggaattatatccttcttgctcatcagttgatgatacgcccgagcagatgccaacacagcagccattcaagcaatcctatacaaccgtatcggcgatatcggtttcatcctcgccttagcatgatttatcctacactccaactcatgagacccacaacaaatagcccttctaaacgctaatccaagcctcaccccactactaggcctcctcctagcagcagcaggcaaatcagcccaattaggtctccacccctgactcccctcagccatagaaggccccaccccagtctcagccctactccactcaagcactatagttgtagcaggaatcttcttactcatccgcttccaccccctagcagaaaatagcccactaatccaaactctaacactatgcttaggcgctatcaccactctgttcgcagcagtctgcgcccttacacaaaatgacatcaaaaaaatcgtagccttctccacttcaagtcaactaggactcataatagtcacaatcggcatcaaccaaccacacctagcattcctgcacatctgtacccacgccttcttcaaagccatactatttatgtgctccgggtccatcatccacaaccttaacaatgaacaagatattcgaaaaataggaggactactcaaaaccatacctctcacttcaacctccctcaccattggcagcctagcattagcaggaatacctttcctcacaggtttctactccaaagaccacatcatcgaaaccgcaaacatatcatacacaaacgcctgagccctatctattactctcatcgctacctccctgacaagcgcctatagcactcgaataattcttctcaccctaacaggtcaacctcgcttccccacccttactaacattaacgaaaataaccccaccctactaaaccccattaaacgcctgacagccggaagcctattcgcaggatttctcattactaacaacatttcccccgcatcccccttccaaacaacaatccccctctacctaaaactcacagccctcgctgtcactttcctaggacttctaacagccctagacctcaactacctaaccaacaaacttaaaataaaatccccactatgcacattttatttctccaacatactcggattctaccctagcatcgcacaccgcacaatcccctatctaggccttcttacgagccaaaacctgcccctactcctcctagacctaacctgactagaaaagctattacctaaaacaatttcacagcaccaaatctccacctccatcatcacctcaacccaaaaaggcataattaaactttacttcctctctttcttcttcccactcatcctaaccctactcctaatcacataacctattcccccgagcaatctcaattacaatatatacaccaacaaacaatgttcaaccagtaactactactaatcaacgcccataatcatacaaagcccccgcaccaataggatcctcccgaatcaaccctgacccctctccttcataaattattcagcttcctacactattaaagtttaccacaaccaccaccccatcatactctttcacccacagcaccaatcctacctccatcgctaaccccactaaaacactcaccaagacctcaacccctgacccccatgcctcaggatactcctcaatagccatcgctgtagtatatccaaagacaaccatcattccccctaaataaattaaaaaaactattaaacccatataacctcccccaaaattcagaataataacacacccgaccacaccgctaacaatcaatactaaacccccataaataggagaaggcttagaagaaaaccccacaaaccccattactaaacccacactcaacagaaacaaagcatacatcattattctcgcacggactacaaccacgaccaatgatatgaaaaaccatcgttgtatttcaactacaagaacaccaatgaccccaatacgcaaaattaaccccctaataaaattaattaaccactcactcatcgacctccccaccccatccaacatctccgcatgatgaaacttcggctcactccttggcgcctgcctgatcctccaaatcaccacaggactattcctagccatgcactactcaccagacgcctcaaccgccttttcatcaatcgcccacatcactcgagacgtaaattatggctgaatcatccgctaccttcacgccaatggcgcctcaatattctttatctgcctcttcctacacatcgggcgaggcctatattacggatcatttctctactcagaaacctgaaacatcggcattatcctcctgcttgcaactatagcaacagccttcataggctatgtcctcccgtgaggccaaatatcattctgaggggccacagtaattacaaacttactatccgccatcccatacattgggacagacctagttcaatgaatctgaggaggctactcagtagacagtcccaccctcacacgattctttacctttcacttcatcttgcccttcattattgcagccctagcagcactccacctcctattcttgcacgaaacgggatcaaacaaccccctaggaatcacctcccattccgataaaatcaccttccacccttactacacaatcaaagacgccctcggcttacttctcttcattctctccttaatgacattaacactattctcaccagacctcctaggcgacccagacaattataccctagccaaccccttaaacacccctccccacatcaagcccgaatgatatttcctattcgcctacacaattctccgatccgtccctaacaaactaggaggcgtccttgccctattactatccatcctcatcctagcaataatccccatcctccatatatccaaacaacaaagcataatatttcgcccactaagccaatcactttattgactcctagccgcagacctcctcattctaacctgaatcggaggacaaccagtaagctacccttttaccatcattggacaagtagcatccgtactatacttcacaacaatcctaatcctaataccaactatctccctaattgaaaacaaaatactcaaatgggcctgtccttgtagtataaactaatacaccagtcttgtaaaccggagatgaaaacctttttccaaggacaaatcagagaaaaagtctttaactccaccattagcacccaaagctaagattctaatttaaactattctctgttctttcatggggaagcagatttgggtaccacccaagtattgactcacccatcaacaaccgctatgtatttcgtacattactgccagccaccatgaatattgtacggtaccataaatacttgaccacctgtagtacataaaaacccaatccacatcaaaaccccctccccatgcttacaagcaagtacagcaatcaaccctcaactatcacacatcaactgcaactccaaagccacccctcacccactaggataccaacaaacctacccacccttaacagtacatagtacataaagccatttaccgtacatagcacattacagtcaaatcccttctcgtccccatggatgacccccctcagataggggtcccttgaccaccatcctccgtgaaatcaatatcccgcacaagagtgctactctcctcgctccgggcccataacacttgggggtagctaaagtgaactgtatccgacatctggttcctacttcagggtcataaagcctaaatagcccacacgttccccttaaataagacatcacgatg

SEQ ID NO: 517 - DNA, 16569 bp, Homo sapiens mitochondrial
  3107: "n" refers to a nucleotide at position 3107 of the Cambridge Reference Sequence (CRS, Anderson et al. 1981 Nature 290:457-465), later determined to be absent from the human mtDNA sequence according to the revised CRS (rCRS, Andrews et al. 1999 Nature Genetics 23:147); "n" therefore represents a single nucleotide deletion at a position corresponding to nucleotide 3107 of SEQ ID NO:1 as provided herein.
gatcacaggtctatcaccctattaaccactcacgggagctctccatgcatttggtattttcgtctggggggtatgcacgcgatagcattgcgagacgctggagccggagcaccctatgtcgcagtatctgtctttgattcctgcctcatcctattatttatcgcacctacgttcaatattacaggcgaacatacttactaaagtgtgttaattaattaatgcttgtaggacataataataacaattgaatgtctgcacagccactttccacacagacatcataacaaaaaatttccaccaaaccccccctcccccgcttctggccacagcacttaaacacatctctgccaaaccccaaaaacaaagaaccctaacaccagcctaaccagatttcaaattttatcttttggcggtatgcacttttaacagtcaccccccaactaacacattattttcccctcccactcccatactactaatctcatcaatacaacccccgcccatcctacccagcacacacacaccgctgctaaccccataccccgaaccaaccaaaccccaaagacaccccccacagtttatgtagcttacctcctcaaagcaatacactgaaaatgtttagacgggctcacatcaccccataaacaaataggtttggtcctagcctttctattagctcttagtaagattacacatgcaagcatccccgttccagtgagttcaccctctaaatcaccacgatcaaaagggacaagcatcaagcacgcagcaatgcagctcaaaacgcttagcctagccacacccccacgggaaacagcagtgattaacctttagcaataaacgaaagtttaactaagctatactaaccccagggttggtcaatttcgtgccagccaccgcggtcacacgattaacccaagtcaatagaagccggcgtaaagagtgttttagatcaccccctccccaataaagctaaaactcacctgagttgtaaaaaactccagttgacacaaaatagactacgaaagtggctttaacatatctgaacacacaatagctaagacccaaactgggattagataccccactatgcttagccctaaacctcaacagttaaatcaacaaaactgctcgccagaacactacgagccacagcttaaaactcaaaggacctggcggtgcttcatatccctctagaggagcctgttctgtaatcgataaaccccgatcaacctcaccacctcttgctcagcctatataccgccatcttcagcaaaccctgatgaaggctacaaagtaagcgcaagtacccacgtaaagacgttaggtcaaggtgtagcccatgaggtggcaagaaatgggctacattttctaccccagaaaactacgatagcccttatgaaacttaagggtcgaaggtggatttagcagtaaactgagagtagagtgcttagttgaacagggccctgaagcgcgtacacaccgcccgtcaccctcctcaagtatacttcaaaggacatttaactaaaacccctacgcatttatatagaggagacaagtcgtaacatggtaagtgtactggaaagtgcacttggacgaaccagagtgtagcttaacacaaagcacccaacttacacttaggagatttcaacttaacttgaccgctctgagctaaacctagccccaaacccactccaccttactaccagacaaccttagccaaaccatttacccaaataaagtataggcgatagaaattgaaacctggcgcaatagatatagtaccgcaagggaaagatgaaaaattataaccaagcataatatagcaaggactaacccctataccttctgcataatgaattaactagaaataactttgcaaggagagccaaagctaagacccccgaaaccagacgagctacctaagaacagctaaaagagcacacccgtctatgtagcaaaatagtgggaagatttataggtagaggcgacaaacctaccgagcctggtgatagctggttgtccaagatagaatcttagttcaactttaaatttgcccacagaaccctctaaatccccttgtaaatttaactgttagtccaaagaggaacagctctttggacactaggaaaaaaccttgtagagagagtaaaaaatttaacacccatagtaggcctaaaagcagccaccaattaagaaagcgttcaagctcaacacccactacctaaaaaatcccaaacatataactgaactcctcacacccaattggaccaatctatcaccctatagaagaactaatgttagtataagtaacatgaaaacattctcctccgcataagcctgcgtcagattaaaacactgaactgacaattaacagcccaatatctacaatcaaccaacaagtcattattaccctcactgtcaacccaacacaggcatgctcataaggaaaggttaaaaaaagtaaaaggaactcggcaaatcttaccccgcctgtttaccaaaaacatcacctctagcatcaccagtattagaggcaccgcctgcccagtgacacatgtttaacggccgcggtaccctaaccgtgcaaaggtagcataatcacttgttccttaaatagggacctgtatgaatggctccacgagggttcagctgtctcttacttttaaccagtgaaattgacctgcccgtgaagaggcgggcatgacacagcaagacgagaagaccctatggagctttaatttattaatgcaaacagtacctaacaaacccacaggtcctaaactaccaaacctgcattaaaaatttcggttggggcgacctcggagcagaacccaacctccgagcagtacatgctaagacttcaccagtcaaagcgaactactatactcaattgatccaataacttgaccaacggaacaagttaccctagggataacagcgcaatcctattctagagtccatatcaacaatagggtttacgacctcgatgttggatcaggacatcccgatggtgcagccgctattaaaggttcgtttgttcaacgattaaagtcctacgtgatctgagttcagaccggagtaatccaggtcggtttctatctacnttcaaattcctccctgtacgaaaggacaagagaaataaggcctacttcacaaagcgccttcccccgtaaatgatatcatctcaacttagtattatacccacacccacccaagaacagggtttgttaagatggcagagcccggtaatcgcataaaacttaaaactttacagtcagaggttcaattcctcttcttaacaacatacccatggccaacctcctactcctcattgtacccattctaatcgcaatggcattcctaatgcttaccgaacgaaaaattctaggctatatacaactacgcaaaggccccaacgttgtaggcccctacgggctactacaacccttcgctgacgccataaaactcttcaccaaagagcccctaaaacccgccacatctaccatcaccctctacatcaccgccccgaccttagctctcaccatcgctcttctactatgaacccccctccccatacccaaccccctggtcaacctcaacctaggcctcctatttattctagccacctctagcctagccgtttactcaatcctctgatcagggtgagcatcaaactcaaactacgccctgatcggcgcactgcgagcagtagcccaaacaatctcatatgaagtcaccctagccatcattctactatcaacattactaataagtggctcctttaacctctccacccttatcacaacacaagaacacctctgattactcctgccatcatgacccttggccataatatgatttatctccacactagcagagaccaaccgaacccccttcgaccttgccgaaggggagtccgaactagtctcaggcttcaacatcgaatacgccgcaggccccttcgccctattcttcatagccgaatacacaaacattattataataaacaccctcaccactacaatcttcctaggaacaacatatgacgcactctcccctgaactctacacaacatattttgtcaccaagaccctacttctaacctccctgttcttatgaattcgaacagcatacccccgattccgctacgaccaactcatacacctcctatgaaaaaacttcctaccactcaccctagcattacttatatgatatgtctccatacccattacaatctccagcattccccctcaaacctaagaaatatgtctgataaaagagttactttgatagagtaaataataggagcttaaacccccttatttctaggactatgagaatcgaacccatccctgagaatccaaaattctccgtgccacctatcacaccccatcctaaagtaaggtcagctaaataagctatcgggcccataccccgaaaatgttggttatacccttcccgtactaattaatcccctggcccaacccgtcatctactctaccatctttgcaggcacactcatcacagcgctaagctcgcactgattttttacctgagtaggcctagaaataaacatactagcttttattccagttctaaccaaaaaaataaaccctcgttccacagaagctgccatcaagtatttcctcacgcaagcaaccgcatccataatccttctaatagctatcctcttcaacaatatactctccggacaatgaaccataaccaatactaccaatcaatactcatcattaataatcataatggctatagcaataaaactaggaatagccccctttcacttctgagtcccagaggttacccaaggcacccctctgacatccggcctgcttcttctcacatgacaaaaactagcccccatctcaatcatataccaaatctctccctcactaaacgtaagccttctcctcactctctcaatcttatccatcatagcaggcagttgaggtggattaaaccaaacccagctacgcaaaatcttagcatactcctcaattacccacataggatgaataatagcagttctaccgtacaaccctaacataaccattcttaatttaactatttatattatcctaactactaccgcattcctactactcaacttaaactccagcaccacgaccctactactatctcgcacctgaaacaagctaacatgactaacacccttaattccatccaccctcctctccctaggaggcctgcccccgctaaccggctttttgcccaaatgggccattatcgaagaattcacaaaaaacaatagcctcatcatccccaccatcatagccaccatcaccctccttaacctctacttctacctacgcctaatctactccacctcaatcacactactccccatatctaacaacgtaaaaataaaatgacagtttgaacatacaaaacccaccccattcctccccacactcatcgcccttaccacgctactcctacctatctccccttttatactaataatcttatagaaatttaggttaaatacagaccaagagccttcaaagccctcagtaagttgcaatacttaatttctgtaacagctaaggactgcaaaaccccactctgcatcaactgaacgcaaatcagccactttaattaagctaagcccttactagaccaatgggacttaaacccacaaacacttagttaacagctaagcaccctaatcaactggcttcaatctacttctcccgccgccgggaaaaaaggcgggagaagccccggcaggtttgaagctgcttcttcgaatttgcaattcaatatgaaaatcacctcggagctggtaaaaagaggcctaacccctgtctttagatttacagtccaatgcttcactcagccattttacctcacccccactgatgttcgccgaccgttgactattctctacaaaccacaaagacattggaacactatacctattattcggcgcatgagctggagtcctaggcacagctctaagcctccttattcgagccgagctgggccagccaggcaaccttctaggtaacgaccacatctacaacgttatcgtcacagcccatgcatttgtaataatcttcttcatagtaatacccatcataatcggaggctttggcaactgactagttcccctaataatcggtgcccccgatatggcgtttccccgcataaacaacataagcttctgactcttacctccctctctcctactcctgctcgcatctgctatagtggaggccggagcaggaacaggttgaacagtctaccctcccttagcagggaactactcccaccctggagcctccgtagacctaaccatcttctccttacacctagcaggtgtctcctctatcttaggggccatcaatttcatcacaacaattatcaatataaaaccccctgccataacccaataccaaacgcccctcttcgtctgatccgtcctaatcacagcagtcctacttctcctatctctcccagtcctagctgctggcatcactatactactaacagaccgcaacctcaacaccaccttcttcgaccccgccggaggaggagaccccattctataccaacacctattctgatttttcggtcaccctgaagtttatattcttatcctaccaggcttcggaataatctcccatattgtaacttactactccggaaaaaaagaaccatttggatacataggtatggtctgagctatgatatcaattggcttcctagggtttatcgtgtgagcacaccatatatttacagtaggaatagacgtagacacacgagcatatttcacctccgctaccataatcatcgctatccccaccggcgtcaaagtatttagctgactcgccacactccacggaagcaatatgaaatgatctgctgcagtgctctgagccctaggattcatctttcttttcaccgtaggtggcctgactggcattgtattagcaaactcatcactagacatcgtactacacgacacgtactacgttgtagctcacttccactatgtcctatcaataggagctgtatttgccatcataggaggcttcattcactgatttcccctattctcaggctacaccctagaccaaacctacgccaaaatccatttcactatcatattcatcggcgtaaatctaactttcttcccacaacactttctcggcctatccggaatgccccgacgttactcggactaccccgatgcatacaccacatgaaacatcctatcatctgtaggctcattcatttctctaacagcagtaatattaataattttcatgatttgagaagccttcgcttcgaagcgaaaagtcctaatagtagaagaaccctccataaacctggagtgactatatggatgccccccaccctaccacacattcgaagaacccgtatacataaaatctagacaaaaaaggaaggaatcgaaccccccaaagctggtttcaagccaaccccatggcctccatgactttttcaaaaaggtattagaaaaaccatttcataactttgtcaaagttaaattataggctaaatcctatatatcttaatggcacatgcagcgcaagtaggtctacaagacgctacttcccctatcatagaagagcttatcacctttcatgatcacgccctcataatcattttccttatctgcttcctagtcctgtatgcccttttcctaacactcacaacaaaactaactaatactaacatctcagacgctcaggaaatagaaaccgtctgaactatcctgcccgccatcatcctagtcctcatcgccctcccatccctacgcatcctttacataacagacgaggtcaacgatccctcccttaccatcaaatcaattggccaccaatggtactgaacctacgagtacaccgactacggcggactaatcttcaactcctacatacttcccccattattcctagaaccaggcgacctgcgactccttgacgttgacaatcgagtagtactcccgattgaagcccccattcgtataataattacatcacaagacgtcttgcactcatgagctgtccccacattaggcttaaaaacagatgcaattcccggacgtctaaaccaaaccactttcaccgctacacgaccgggggtatactacggtcaatgctctgaaatctgtggagcaaaccacagtttcatgcccatcgtcctagaattaattcccctaaaaatctttgaaatagggcccgtatttaccctatagcaccccctctaccccctctagagcccactgtaaagctaacttagcattaaccttttaagttaaagattaagagaaccaacacctctttacagtgaaatgccccaactaaatactaccgtatggcccaccataattacccccatactccttacactattcctcatcacccaactaaaaatattaaacacaaactaccacctacctccctcaccaaagcccataaaaataaaaaattataacaaaccctgagaaccaaaatgaacgaaaatctgttcgcttcattcattgcccccacaatcctaggcctacccgccgcagtactgatcattctatttccccctctattgatccccacctccaaatatctcattaacaaccgactaatcaccacccaacaatgactaatcaaactaacctcaaaacaaatgataaccatacacaacactaaaggacgaacctgatctcttatactagtatccttaatcatttttattgccacaactaacctcctcggactcctgcctcactcatttacaccaaccacccaactatctataaacctagccatggccatccccttatgagcgggcgcagtgattataggctttcgctctaagattaaaaatgccctagcccacttcttaccacaaggcacacctacaccccttatccccatactagttattatcgaaaccatcagcctactcattcaaccaatagccctggccgtacgcctaaccgctaacattactgcaggccacctactcatgcacctaattggaagcgccaccctagcaatatcaaccattaaccttccctctacacttatcatcttcacaattctaattctactgactatcctagaaatcgctgtcgccttaatccaagcctacgttttcacacttctagtaagcctctacctgcacgacaacacataatgacccaccaatcacatgcctatcatatagtaaaacccagcccatgacccctaacaggggccctctcagccctcctaatgacctccggcctagccatgtgatttcacttccactccataacgctcctcatactaggcctactaaccaacacactaaccatataccaatgatggcgcgatgtaacacgagaaagcacataccaaggccaccacacaccacctgtccaaaaaggccttcgatacgggataatcctatttattacctcagaagtttttttcttcgcaggatttttctgagccttttaccactccagcctagcccctaccccccaattaggagggcactggcccccaacaggcatcaccccgctaaatcccctagaagtcccactcctaaacacatccgtattactcgcatcaggagtatcaatcacctgagctcaccatagtctaatagaaaacaaccgaaaccaaataattcaagcactgcttattacaattttactgggtctctattttaccctcctacaagcctcagagtacttcgagtctcccttcaccatttccgacggcatctacggctcaacattttttgtagccacaggcttccacggacttcacgtcattattggctcaactttcctcactatctgcttcatccgccaactaatatttcactttacatccaaacatcactttggcttcgaagccgccgcctgatactggcattttgtagatgtggtttgactatttctgtatgtctccatctattgatgagggtcttactcttttagtataaatagtaccgttaacttccaattaactagttttgacaacattcaaaaaagagtaataaacttcgccttaattttaataatcaacaccctcctagccttactactaataattattacattttgactaccacaactcaacggctacatagaaaaatccaccccttacgagtgcggcttcgaccctatatcccccgcccgcgtccctttctccataaaattcttcttagtagctattaccttcttattatttgatctagaaattgccctccttttacccctaccatgagccctacaaacaactaacctgccactaatagttatgtcatccctcttattaatcatcatcctagccctaagtctggcctatgagtgactacaaaaaggattagactgaaccgaattggtatatagtttaaacaaaacgaatgatttcgactcattaaattatgataatcatatttaccaaatgcccctcatttacataaatattatactagcatttaccatctcacttctaggaatactagtatatcgctcacacctcatatcctccctactatgcctagaaggaataatactatcgctgttcattatagctactctcataaccctcaacacccactccctcttagccaatattgtgcctattgccatactagtctttgccgcctgcgaagcagcggtgggcctagccctactagtctcaatctccaacacatatggcctagactacgtacataacctaaacctactccaatgctaaaactaatcgtcccaacaattatattactaccactgacatgactttccaaaaaacacataatttgaatcaacacaaccacccacagcctaattattagcatcatccctctactattttttaaccaaatcaacaacaacctatttagctgttccccaaccttttcctccgaccccctaacaacccccctcctaatactaactacctgactcctacccctcacaatcatggcaagccaacgccacttatccagtgaaccactatcacgaaaaaaactctacctctctatactaatctccctacaaatctccttaattataacattcacagccacagaactaatcatattttatatcttcttcgaaaccacacttatccccaccttggctatcatcacccgatgaggcaaccagccagaacgcctgaacgcaggcacatacttcctattctacaccctagtaggctcccttcccctactcatcgcactaatttacactcacaacaccctaggctcactaaacattctactactcactctcactgcccaagaactatcaaactcctgagccaacaacttaatatgactagcttacacaatagcttttatagtaaagatacctctttacggactccacttatgactccctaaagcccatgtcgaagcccccatcgctgggtcaatagtacttgccgcagtactcttaaaactaggcggctatggtataatacgcctcacactcattctcaaccccctgacaaaacacatagcctaccccttccttgtactatccctatgaggcataattataacaagctccatctgcctacgacaaacagacctaaaatcgctcattgcatactcttcaatcagccacatagccctcgtagtaacagccattctcatccaaaccccctgaagcttcaccggcgcagtcattctcataatcgcccacgggcttacatcctcattactattctgcctagcaaactcaaactacgaacgcactcacagtcgcatcataatcctctctcaaggacttcaaactctactcccactaatagctttttgatgacttctagcaagcctcgctaacctcgccttaccccccactattaacctactgggagaactctctgtgctagtaaccacgttctcctgatcaaatatcactctcctacttacaggactcaacatactagtcacagccctatactccctctacatatttaccacaacacaatggggctcactcacccaccacattaacaacataaaaccctcattcacacgagaaaacaccctcatgttcatacacctatcccccattctcctcctatccctcaaccccgacatcattaccgggttttcctcttgtaaatatagtttaaccaaaacatcagattgtgaatctgacaacagaggcttacgaccccttatttaccgagaaagctcacaagaactgctaactcatgcccccatgtctaacaacatggctttctcaacttttaaaggataacagctatccattggtcttaggccccaaaaattttggtgcaactccaaataaaagtaataaccatgcacactactataaccaccctaaccctgacttccctaattccccccatccttaccaccctcgttaaccctaacaaaaaaaactcatacccccattatgtaaaatccattgtcgcatccacctttattatcagtctcttccccacaacaatattcatgtgcctagaccaagaagttattatctcgaactgacactgagccacaacccaaacaacccagctctccctaagcttcaaactagactacttctccataatattcatccctgtagcattgttcgttacatggtccatcatagaattctcactgtgatatataaactcagacccaaacattaatcagttcttcaaatatctactcatcttcctaattaccatactaatcttagttaccgctaacaacctattccaactgttcatcggctgagagggcgtaggaattatatccttcttgctcatcagttgatgatacgcccgagcagatgccaacacagcagccattcaagcaatcctatacaaccgtatcggcgatatcggtttcatcctcgccttagcatgatttatcctacactccaactcatgagacccacaacaaatagcccttctaaacgctaatccaagcctcaccccactactaggcctcctcctagcagcagcaggcaaatcagcccaattaggtctccacccctgactcccctcagccatagaaggccccaccccagtctcagccctactccactcaagcactatagttgtagcaggaatcttcttactcatccgcttccaccccctagcagaaaatagcccactaatccaaactctaacactatgcttaggcgctatcaccactctgttcgcagcagtctgcgcccttacacaaaatgacatcaaaaaaatcgtagccttctccacttcaagtcaactaggactcataatagttacaatcggcatcaaccaaccacacctagcattcctgcacatctgtacccacgccttcttcaaagccatactatttatgtgctccgggtccatcatccacaaccttaacaatgaacaagatattcgaaaaataggaggactactcaaaaccatacctctcacttcaacctccctcaccattggcagcctagcattagcaggaatacctttcctcacaggtttctactccaaagaccacatcatcgaaaccgcaaacatatcatacacaaacgcctgagccctatctattactctcatcgctacctccctgacaagcgcctatagcactcgaataattcttctcaccctaacaggtcaacctcgcttccccacccttactaacattaacgaaaataaccccaccctactaaaccccattaaacgcctggcagccggaagcctattcgcaggatttctcattactaacaacatttcccccgcatcccccttccaaacaacaatccccctctacctaaaactcacagccctcgctgtcactttcctaggacttctaacagccctagacctcaactacctaaccaacaaacttaaaataaaatccccactatgcacattttatttctccaacatactcggattctaccctagcatcacacaccgcacaatcccctatctaggccttcttacgagccaaaacctgcccctactcctcctagacctaacctgactagaaaagctattacctaaaacaatttcacagcaccaaatctccacctccatcatcacctcaacccaaaaaggcataattaaactttacttcctctctttcttcttcccactcatcctaaccctactcctaatcacataacctattcccccgagcaatctcaattacaatatatacaccaacaaacaatgttcaaccagtaactactactaatcaacgcccataatcatacaaagcccccgcaccaataggatcctcccgaatcaaccctgacccctctccttcataaattattcagcttcctacactattaaagtttaccacaaccaccaccccatcatactctttcacccacagcaccaatcctacctccatcgctaaccccactaaaacactcaccaagacctcaacccctgacccccatgcctcaggatactcctcaatagccatcgctgtagtatatccaaagacaaccatcattccccctaaataaattaaaaaaactattaaacccatataacctcccccaaaattcagaataataacacacccgaccacaccgctaacaatcaatactaaacccccataaataggagaaggcttagaagaaaaccccacaaaccccattactaaacccacactcaacagaaacaaagcatacatcattattctcgcacggactacaaccacgaccaatgatatgaaaaaccatcgttgtatttcaactacaagaacaccaatgaccccaatacgcaaaactaaccccctaataaaattaattaaccactcattcatcgacctccccaccccatccaacatctccgcatgatgaaacttcggctcactccttggcgcctgcctgatcctccaaatcaccacaggactattcctagccatgcactactcaccagacgcctcaaccgccttttcatcaatcgcccacatcactcgagacgtaaattatggctgaatcatccgctaccttcacgccaatggcgcctcaatattctttatctgcctcttcctacacatcgggcgaggcctatattacggatcatttctctactcagaaacctgaaacatcggcattatcctcctgcttgcaactatagcaacagccttcataggctatgtcctcccgtgaggccaaatatcattctgaggggccacagtaattacaaacttactatccgccatcccatacattgggacagacctagttcaatgaatctgaggaggctactcagtagacagtcccaccctcacacgattctttacctttcacttcatcttgcccttcattattgcagccctagcagcactccacctcctattcttgcacgaaacgggatcaaacaaccccctaggaatcacctcccattccgataaaatcaccttccacccttactacacaatcaaagacgccctcggcttacttctcttccttctctccttaatgacattaacactattctcaccagacctcctaggcgacccagacaattataccctagccaaccccttaaacacccctccccacatcaagcccgaatgatatttcctattcgcctacacaattctccgatccgtccctaacaaactaggaggcgtccttgccctattactatccatcctcatcctagcaataatccccatcctccatatatccaaacaacaaagcataatatttcgcccactaagccaatcactttattgactcctagccgcagacctcctcattctaacctgaatcggaggacaaccagtgagctacccttttaccatcattggacaagtagcatccgtactatacttcacaacaatcctaatcctaataccaactatctccctaattgaaaacaaaatactcaaatgggcctgtccttgtagtataaattaatacaccagtcttgtaaaccggagatgaaaacctttttccaaggacaaatcagagaaaaagtctttaactccaccattagcacccaaagctaagattctaatttaaactattctctgttctttcatggggaagcagatttgggtaccacccaagtattgactcacccatcaacaaccgctatgtatttcgtacattactgccagccaccatgaatattgtacggtaccataaatacttgaccacctgtagtacataaaaacccaatccacatcaaaaccccctccccatgcttacaagcaagtacagcaatcaaccctcaactatcacacatcaactgcaactccaaagccacccctcacccactaggataccaacaaacctacccacccttaacagtacatagtacataaagccatttaccgtacatagcacattacagtcaaatcccttctcgtccccatggatgacccccctcagataggggtcccttgaccaccatcctccgtgaaatcaatatcccgcacaagagtgctactctcctcgctccgggcccataacacttgggggtagctaaagtgaactgtatccgacatctggttcctacttcagggtcataaagcctaaatagcccacacgttccccttaaataagacatcacgatg

SEQ ID NO: 518 - DNA, 16569 bp, Homo sapiens mitochondrial
  3107: "n" refers to a nucleotide at position 3107 of the Cambridge Reference Sequence (CRS, Anderson et al. 1981 Nature 290:457-465), later determined to be absent from the human mtDNA sequence according to the revised CRS (rCRS, Andrews et al. 1999 Nature Genetics 23:147); "n" therefore represents a single nucleotide deletion at a position corresponding to nucleotide 3107 of SEQ ID NO:1 as provided herein.
gatcacaggtctatcaccctattaaccactcacgggagctctccatgcatttggtattttcgtctggggggtatgcacgcgatagcattgcgagacgctggagccggagcaccctatgtcgcagtatctgtctttgattcctgcctcatcctattatttatcgcacctacgttcaatattacaggcgaacatacttactaaagtgtgttaattaattaatgcttgtaggacataataataacaattgaatgtctgcacagccactttccacacagacatcataacaaaaaatttccaccaaaccccccctcccccgcttctggccacagcacttaaacacatctctgccaaaccccaaaaacaaagaaccctaacaccagcctaaccagatttcaaattttatcttttggcggtatgcacttttaacagtcaccccccaactaacacattattttcccctcccactcccatactactaatctcatcaatacaacccccgcccatcctacccagcacacacacaccgctgctaaccccataccccgaaccaaccaaaccccaaagacaccccccacagtttatgtagcttacctcctcaaagcaatacactgaaaatgtttagacgggctcacatcaccccataaacaaataggtttggtcctagcctttctattagctcttagtaagattacacatgcaagcatccccgttccagtgagttcaccctctaaatcaccacgatcaaaagggacaagcatcaagcacgcagcaatgcagctcaaaacgcttagcctagccacacccccacgggaaacagcagtgattaacctttagcaataaacgaaagtttaactaagctatactaaccccagggttggtcaatttcgtgccagccaccgcggtcacacgattaacccaagtcaatagaagccggcgtaaagagtgttttagatcaccccctccccaataaagctaaaactcacctgagttgtaaaaaactccagttgacacaaaatagactacgaaagtggctttaacatatctgaacacacaatagctaagacccaaactgggattagataccccactatgcttagccctaaacctcaacagttaaatcaacaaaactgctcgccagaacactacgagccacagcttaaaactcaaaggacctggcggtgcttcatatccctctagaggagcctgttctgtaatcgataaaccccgatcaacctcaccacctcttgctcagcctatataccgccatcttcagcaaaccctgatgaaggctacaaagtaagcgcaagtacccacgtaaagacgttaggtcaaggtgtagcccatgaggtggcaagaaatgggctacattttctaccccagaaaactacgatagcccttatgaaacttaagggtcgaaggtggatttagcagtaaactgagagtagagtgcttagttgaacagggccctgaagcgcgtacacaccgcccgtcaccctcctcaagtatacttcaaaggacatttaactaaaacccctacgcatttatatagaggagacaagtcgtaacatggtaagtgtactggaaagtgcacttggacgaaccagagtgtagcttaacacaaagcacccaacttacacttaggagatttcaacttaacttgaccgctctgagctaaacctagccccaaacccactccaccttactaccagacaaccttagccaaaccatttacccaaataaagtataggcgatagaaattgaaacctggcgcaatagatatagtaccgcaagggaaagatgaaaaattatagccaagcataatatagcaaggactaacccctataccttctgcataatgaattaactagaaataactttgcaaggagagccaaagctaagacccccgaaaccagacgagctacctaagaacagctaaaagagcacacccgtctatgtagcaaaatagtgggaagatttataggtagaggcgacaaacctaccgagcctggtgatagctggttgtccaagatagaatcttagttcaactttaaatttgcccacagaaccctctaaatccccttgtaaatttaactgttagtccaaagaggaacagctctttggacactaggaaaaaaccttgtagagagagtaaaaaatttaacacccatagtaggcctaaaagcagccaccaattaagaaagcgttcaagctcaacacccactacctaaaaaatcccaaacatataactgaactcctcacacccaattggaccaatctatcaccctatagaagaactaatgttagtataagtaacatgaaaacattctcctccgcataagcctgcgtcagattaaaacactgaactgacaattaacagcccaatatctacaatcaaccaacaagtcattattaccctcactgtcaacccaacacaggcatgctcataaggaaaggttaaaaaaagtaaaaggaactcggcaaatcttaccccgcctgtttaccaaaaacatcacctctagcatcaccagtattagaggcaccgcctgcccagtgacacatgtttaacggccgcggtaccctaaccgtgcaaaggtagcataatcacttgttccttaaatagggacctgtatgaatggctccacgagggttcagctgtctcttacttttaaccagtgaaattgacctgcccgtgaagaggcgggcatgacacagcaagacgagaagaccctatggagctttaatttattaatgcaaacagtacctaacaaacccacaggtcctaaactaccaaacctgcattaaaaatttcggttggggcgacctcggagcagaacccaacctccgagcagtacatgctaagacttcaccagtcaaagcgaactactatactcaattgatccaataacttgaccaacggaacaagttaccctagggataacagcgcaatcctattctagagtccatatcaacaatagggtttacgacctcgatgttggatcaggacatcccgatggtgcagccgctattaaaggttcgtttgttcaacgattaaagtcctacgtgatctgagttcagaccggagtaatccaggtcggtttctatctacnttcaaattcctccctgtacgaaaggacaagagaaataaggcctacttcacaaagcgccttcccccgtaaatgatatcatctcaacttagtattatacccacacccacccaagaacagggtttgttaagatggcagagcccggtaatcgcataaaacttaaaactttacagtcagaggttcaattcctcttcttaacaacatacccatggccaacctcctactcctcattgtacccattctaatcgcaatggcattcctaatgcttaccgaacgaaaaattctaggctatatacaactacgcaaaggccccaacgttgtaggcccctacgggctactacaacccttcgctgacgccataaaactcttcaccaaagagcccctaaaacccgccacatctaccatcaccctctacatcaccgccccgaccttagctctcaccatcgctcttctactatgaacccccctccccatacccaaccccctggtcaacctcaacctaggcctcctatttattctagccacctctagcctagccgtttactcaatcctctgatcagggtgagcatcaaactcaaactacgccctgatcggcgcactgcgagcagtagcccaaacaatctcatatgaagtcaccctagccatcattctactatcaacattactaataagtggctcctttaacctctccacccttatcacaacacaagaacacctctgattactcctgccatcatgacccttggccataatatgatttatctccacactagcagagaccaaccgaacccccttcgaccttgccgaaggggagtccgaactagtctcaggcttcaacatcgaatacgccgcaggccccttcgccctattcttcatagccgaatacacaaacattattataataaacaccctcaccactacaatcttcctaggaacaacatatgacgcactctcccctgaactctacacaacatattttgtcaccaagaccctacttctaacctccctgttcttatgaattcgaacagcatacccccgattccgctacgaccaactcatacacctcctatgaaaaaacttcctaccactcaccctagcattacttatatgatatgtctccatacccattacaatctccagcattccccctcaaacctaagaaatatgtctgataaaagagttactttgatagagtaaataataggagcttaaacccccttatttctaggactatgagaatcgaacccatccctgagaatccaaaattctccgtgccacctatcacaccccatcctaaagtaaggtcagctaaataagctatcgggcccataccccgaaaatgttggttatacccttcccgtactaattaatcccctggcccaacccgtcatctactctaccatctttgcaggcacactcatcacagcgctaagctcgcactgattttttacctgagtaggcctagaaataaacatgctagcttttattccagttctaaccaaaaaaataaaccctcgttccacagaagctgccatcaagtacttcctcacgcaagcaaccgcatccataatccttctaatagctatcctcttcaacaatatactctccggacaatgaaccataaccaatactaccaatcaatactcatcattaataatcataatggctatagcaataaaactaggaatagccccctttcacttctgagtcccagaggttacccaaggcacccctctgacatccggcctgcttcttctcacatgacaaaaactagcccccatctcaatcatataccaaatctctccctcactaaacgtaagccttctcctcactctctcaatcttatccatcatagcaggcagttgaggtggattaaaccaaacccagctacgcaaaatcttagcatactcctcaattacccacataggatgaataatagcagttctaccgtacaaccctaacataaccattcttaatttaactatttatattatcctaactactaccgcattcctactactcaacttaaactccagcaccacgaccctactactatctcgcacctgaaacaagctaacatgactaacacccttaattccatccaccctcctctccctaggaggcctgcccccgctaaccggctttttgcccaaatgggccattatcgaagaattcacaaaaaacaatagcctcatcatccccaccatcatagccaccatcaccctccttaacctctacttctacctacgcctaatctactccacctcaatcacactactccccatatctaacaacgtaaaaataaaatgacagtttgaacatacaaaacccaccccattcctccccacactcatcgcccttaccacgctactcctacctatctccccttttatactaataatcttatagaaatttaggttaaatacagaccaagagccttcaaagccctcagtaagttgcaatacttaatttctgtaacagctaaggactgcaaaaccccactctgcatcaactgaacgcaaatcagccactttaattaagctaagcccttactagaccaatgggacttaaacccacaaacacttagttaacagctaagcaccctaatcaactggcttcaatctacttctcccgccgccgggaaaaaaggcgggagaagccccggcaggtttgaagctgcttcttcgaatttgcaattcaatatgaaaatcacctcggagctggtaaaaagaggcctaacccctgtctttagatttacagtccaatgcttcactcagccattttacctcacccccactgatgttcgccgaccgttgactattctctacaaaccacaaagacattggaacactatacctattattcggcgcatgagctggagtcctaggcacagccctaagcctccttattcgagccgagctgggccagccaggcaaccttctgggtaacgaccacatctacaacgttatcgtcacagcccatgcatttgtaataatcttcttcatagtaatacccatcataatcggaggctttggcaactgactagttcccctaataatcggtgcccccgatatggcgtttccccgcataaacaacataagcttctgactcttacctccctctctcctactcctgctcgcatctgctatagtggaggccggagcaggaacaggttgaacagtctaccctcccttagcagggaactactcccaccctggagcctccgtagacctaaccatcttctccttacacctagcaggtgtctcctctatcttaggggccatcaatttcatcacaacaattatcaatataaaaccccctgccataacccaataccaaacgcccctcttcgtctgatccgtcctaatcacagcagtcctacttctcctatctctcccagtcctagctgctggcatcactatactactaacagaccgcaacctcaacaccaccttcttcgaccccgccggaggaggagaccccattctataccaacacctattctgatttttcggtcaccctgaagtttatattcttatcctaccaggcttcggaataatctcccatattgtaacttactactccggaaaaaaagaaccatttggatacataggtatggtctgagctatgatatcaattggcttcctagggtttatcgtgtgagcacaccatatatttacagtaggaatagacgtagacacacgagcatatttcacctccgctaccataatcatcgctatccccaccggcgtcaaagtatttagctgactcgccacactccacggaagcaatatgaaatgatctgctgcagtgctctgagccctaggattcatctttcttttcaccgtaggtggcctgactggcattgtattagcaaactcatcactagacatcgtactacacgacacgtactacgttgtagctcacttccactatgtcctatcaataggagctgtatttgccatcataggaggcttcattcactgatttcccctattctcaggctacaccctagaccaaacctacgccaaaatccatttcactatcatattcatcggcgtaaatctaactttcttcccacaacactttctcggcctatccggaatgccccgacgttactcggactaccccgatgcatacaccacatgaaacatcctatcatctgtaggctcattcatttctctaacagcagtaatattaataattttcatgatttgagaagccttcgcttcgaagcgaaaagtcctaatagtagaagaaccctccataaacctggagtgactatatggatgccccccaccctaccacacattcgaagaacccgtatacataaaatctagacaaaaaaggaaggaatcgaaccccccaaagctggtttcaagccaaccccatggcctccatgactttttcaaaaaggtattagaaaaaccatttcataactttgtcaaagttaaattataggctaaatcctatatatcttaatggcacatgcagcgcaagtaggtctacaagacgctacttcccctatcatagaagagcttatcacctttcatgatcacgccctcataatcattttccttatctgcttcctagtcctgtacgcccttttcctaacactcacaacaaaactaactaatactaacatctcagacgctcaggaaatagaaaccgtctgaactatcctgcccgccatcatcctagtcctcatcgccctcccatccctacgcatcctttacataacagacgaggtcaacgatccctcccttaccatcaaatcaattggccaccaatggtactgaacctacgagtacaccgactacggcggactaatcttcaactcctacatacttcccccattattcctagaaccaggcgacctgcgactccttgacgttgacaatcgagtagtactcccgattgaagcccccattcgtataataattacatcacaagacgtcttgcactcatgagctgtccccacattaggcttaaaaacagatgcaattcccggacgtctaaaccaaaccactttcaccgctacacgaccgggggtatactacggtcaatgctctgaaatctgtggagcaaaccacagtttcatgcccatcgtcctagaattaattcccctaaaaatctttgaaatagggcccgtatttaccctatagcaccccctctaccccctctagagcccactgtaaagctaacttagcattaaccttttaagttaaagattaagagaaccaacacctctttacagtgaaatgccccaactaaatactaccgtatggcccaccataattacccccatactccttacactattcctcatcacccaactaaaaatattaaacacaaactaccacctacctccctcaccaaagcccataaaaataaaaaattataacaaaccctgagaaccaaaatgaacgaaaatctgttcgcttcattcattgcccccacaatcctaggcctacccgccgcagtactgatcattctatttccccctctattgatccccacctccaaatatctcatcaacaaccgactaatcaccacccaacaatgactaatcaaactaacctcaaaacaaatgataaccatacacaacactaaaggacgaacctgatctcttatactagtatccttaatcatttttattgccacaactaacctcctcggactcctgcctcactcatttacaccaaccacccaactatctataaacctagccatggccatccccttatgagcgggcgcagtgattataggctttcgctctaagattaaaaatgccctagcccacttcttaccacaaggcacacctacaccccttatccccatactagttattatcgaaaccatcagcctactcattcaaccaatagccctggccgtacgcctaaccgctaacattactgcaggccacctactcatgcacctaattggaagcgccaccctagcaatatcaaccattaaccttccctctacacttatcatcttcacaattctaattctactgactatcctagaaatcgctgtcgccttaatccaagcctacgttttcacacttctagtaagcctctacctgcacgacaacacataatgacccaccaatcacatgcctatcatatagtaaaacccagcccatgacccctaacaggggccctctcagccctcctaatgacctccggcctagccatgtgatttcacttccactccataacgctcctcatactaggcctactaaccaacacactaaccatataccaatgatggcgcgatgtaacacgagaaagcacataccaaggccaccacacaccacctgtccaaaaaggccttcgatacgggataatcctatttattacctcagaagtttttttcttcgcaggatttttctgagccttttaccactccagcctagcccctaccccccaattaggagggcactggcccccaacaggcatcaccccgctaaatcccctagaagtcccactcctaaacacatccgtattactcgcatcaggagtatcaatcacctgagctcaccatagtctaatagaaaacaaccgaaaccaaataattcaagcactgcttattacaattttactgggtctctattttaccctcctacaagcctcagagtacttcgagtctcccttcaccatttccgacggcatctacggctcaacattttttgtagccacaggcttccacggacttcacgtcattattggctcaactttcctcactatctgcttcatccgccaactaatatttcactttacatccaaacatcactttggcttcgaagccgccgcctgatactggcattttgtagatgtggtttgactatttctgtatgtctccatctattgatgagggtcttactcttttagtataaatagtaccgttaacttccaattaactagttttgacaacattcaaaaaagagtaataaacttcgccttaattttaataatcaacaccctcctagccttactactaataattattacattttgactaccacaactcaacggctacatagaaaaatccaccccttacgagtgcggcttcgaccctatatcccccgcccgcgtccctttctccataaaattcttcttagtagctattaccttcttattatttgatctagaaattgccctccttttacccctaccatgagccctacaaacaactaacctgccactaatagttatgtcatccctcttattaatcatcatcctagccctaagtctggcctatgagtgactacaaaaaggattagactgaaccgaattggtatatagtttaaacaaaacgaatgatttcgactcattaaattatgataatcatatttaccaaatgcccctcatttacataaatattatactagcatttaccatctcacttctaggaatactagtatatcgctcacacctcatatcctccctactatgcctagaaggaataatactatcgctgttcattatagctactctcataaccctcaacacccactccctcttagccaatattgtgcctattgccatactagtctttgccgcctgcgaagcagcggtgggcctagccctactagtctcaatctccaacacatatggcctagactacgtacataacctaaacctactccaatgctaaaactaatcgtcccaacaattatattactaccactgacatgactttccaaaaaacacataatttgaatcaacacaaccacccacagcctaattattagcatcatccctctactattttttaaccaaatcaacaacaacctatttagctgttccccaaccttttcctccgaccccctaacaacccccctcctaatactaactacctgactcctacccctcacaatcatggcaagccaacgccacttatccagtgaaccactatcacgaaaaaaactctacctctctatactaatctccctacaaatctccttaattataacattcacagccacagaactaatcatattttatatcttcttcgaaaccacacttatccccaccttggctatcatcacccgatgaggcaaccagccagaacgcctgaacgcaggcacatacttcctattctacaccctagtaggctcccttcccctactcatcgcactaatttacactcacaacaccctaggctcactaaacattctactactcactctcactgcccaagaactatcaaactcctgagctaacaacctaatatgactagcttacacaatagcttttatagtaaagatacctctttacggactccacttatgactccctaaagcccatgtcgaagcccccatcgctgggtcaatagtacttgccgcagtactcttgaaactaggcggctatggtataatacgcctcacactcattctcaaccccctgacaaaacacatagcctaccccttccttgtactatccctatgaggcataattataacaagctccatctgcctacgacaaacagacctaaaatcgctcattgcatactcttcaatcagccacatagccctcgtagtaacagccattctcatccaaaccccctgaagcttcaccggcgcagtcattctcataatcgcccacggacttacatcctcattactattctgcctagcaaactcaaactacgaacgcactcacagtcgcatcataatcctctctcaaggacttcaaactctactcccactaatagctttttgatgacttctagcaagcctcgctaacctcgccttaccccccactattaacctactgggagaactctctgtgctagtaaccacgttctcctgatcaaatatcactctcctacttacaggactcaacatactagtcacagccctatactccctctacatatttaccacaacacaatggggctcactcacccaccacattaacaacataaaaccctcattcacacgagaaaacaccctcatgttcatacacctatcccccattctcctcctatccctcaaccccgacatcattaccgggttttcctcttgtaaatatagtttaaccaaaacatcagattgtgaatctgacaacagaggcttacgaccccttatttaccgagaaagctcacaagaactgctaactcatgcccccatgtctaacaacatggctttctcaacttttaaaggataacagctatccattggtcttaggccccaagaattttggtgcaactccaaataaaagtaataaccatgcacactactataaccaccctaaccctaacttccctaattccccccatccttaccaccctcgttaaccctaacaaaaaaaactcatacccccattatgtaaaatccattgtcgcatccacctttattatcagtctcttccccacaacaatattcatgtgcctagaccaagaagttattatctcgaactgacactgagccacaacccaaacaacccagctctccctaagcttcaaactagactacttctccataatattcatccctgtagcattgttcgttacatggtccatcatagaattctcactgtgatatataaactcagacccaaacattaatcagttcttcaaatatctactcatcttcctaattaccatactaatcttagttaccgctaacaacctattccaactgttcatcggctgagagggcgtaggaattatatccttcttgctcatcagttgatgatacgcccgagcagatgccaacacagcagccattcaagcaatcctatacaaccgtatcggcgatatcggtttcatcctcgccttagcatgatttatcctacactccaactcatgagacccacaacaaatagcccttctaaacgctaatccaagcctcaccccactactaggcctcctcctagcagcagcaggcaaatcagcccaattaggtctccacccctgactcccctcagccatagaaggccccaccccagtctcagccctactccactcaagcactatagttgtagcaggaatcttcttactcatccgcttccaccccctagcagaaaatagcccactaatccaaactctaacactatgcttaggcgctatcaccactctgttcgcagcagtctgcgcccttacacaaaatgacatcaaaaaaatcgtagccttctccacttcaagtcaactaggactcataatagttacaatcggcatcaaccaaccacacctagcattcctgcacatctgtacccacgccttcttcaaagccatactatttatgtgctccgggtccatcatccacaaccttaacaatgaacaagatattcgaaaaataggaggactactcaaaaccatacctctcacttcaacctccctcaccattggcagcctagcattagcaggaatacctttcctcacaggtttctactccaaagaccacatcatcgaagccgcaaacatatcatacacaaacgcctgagccctatttattactctcatcgctacctccctgacaagcgcctatagcactcgaataattcttctcaccctaacaggtcaacctcgcttccccacccttactaacattaacgaaaataaccccaccctactaaaccccattaaacgcctggcagccggaagcctattcgcaggatttctcattactaacaacatttcccccgcatcccccttccaaacaacaatccccctctacctaaaactcacagccctcgctgtcactttcctaggacttctaacagccctagacctcaactacctaaccaacaaacttaaaataaaatccccactatgcacattttatttctccaacatactcggattctaccctagcatcacacaccgcacaatcccctatctaggccttcttacgagccaaaacctgcccctactcctcctagacctaacctgactagaaaagctattacctaaaacaatttcacagcaccaaatctccacctccatcatcacctcaacccaaaaaggcataattaaactttacttcctctctttcttcttcccactcatcctaaccctactcctaatcacataacctattcccccgagcaatctcaattacaatatatacaccaacaaacaatgttcaaccagtaactactactaatcaacgcccataatcatacaaagcccccgcaccaataggatcctcccgaatcaaccctgacccctctccttcataaattattcagcttcctacactattaaagtttaccacaaccaccaccccatcatactctttcacccacagcaccaatcctacctccatcgctaaccccactaaaacactcaccaagacctcaacccctgacccccatgcctcaggatactcctcaatagccatcgctgtagtatatccaaagacaaccatcattccccctaaataaattaaaaaaactattaaacccatataacctcccccaaaattcagaataataacacacccgaccacaccgctaacaatcaatactaaacccccataaataggagaaggcttagaagaaaatcccacaaaccccattactaaacccacactcaacagaaacaaagcatacatcattattctcgcacggactacaaccacgaccaatgatatgaaaaaccatcgttgtatttcaactacaagaacaccaatgaccccaatacgcaaaattaaccccctaataaaattaattaaccactcattcatcgacctccccaccccatccaacatctccgcatgatgaaacttcggctcactccttggcgcctgcctgatcctccaaatcaccacaggactattcctagccatgcactactcaccagacgcctcaaccgccttttcatcaatcgcccacatcactcgagacgtaaattatggctgaatcatccgctaccttcacgccaatggcgcctcaatattctttatctgcctcttcctacacatcgggcgaggcctatattacggatcatttctctactcagaaacctgaaacatcggcattatcctcctgcttgcaactatagcaacagccttcataggctatgtcctcccgtgaggccaaatatcattctgaggggccacagtaattacaaacttactatccgccatcccatacattgggacagacctagttcaatgaatctgaggaggctactcagtagacagtcccaccctcacacgattctttacctttcacttcatcttgcccttcattattgcagccctagcagcactccacctcctattcttgcacgaaacgggatcaaacaaccccctaggaatcacctcccattccgataaaatcaccttccacccttactacacaatcaaagacgccctcggcttacttctcttccttctctccttaatgacattaacactattctcaccagacctcctaggcgacccagacaattataccctagccaaccccttaaacacccctccccacatcaagcccgaatgatatttcctattcgcctacacaattctccgatccgtccctaacaaactaggaggcgtccttgccctattactatccatcctcatcctagcaataatccccatcctccatatatccaaacaacaaagcataacatttcgcccactaagccaatcactttattgactcctagccgcagacctcctcattctaacctgaatcggaggacaaccagtaagctacccttttaccatcattggacaagtagcatccgtactatacttcacaacaatcctaatcctaataccaactatctccctaattgaaaacaaaatactcaaatgggcctgtccttgtagtataaactaatacaccagtcttgtaaaccggagatgaaaacctttttccaaggacaaatcagagaaaaagtctttaactccaccattagcacccaaagctaagattctaatttaaactattctctgttctttcatggggaagcagatttgggtaccacccaagtattgactcacccatcaacaaccgctatgtatttcgtacattactgccagccaccatgaatattgtacggtaccataaatacttgaccacctgtagtacataaaaacccaatccacatcaaaaccccctccccatgcttacaagcaagtacagcaatcaaccctcaactatcacacatcaactgcaactccaaagccacccctcacccactaggataccaacaaacctacccacccttaacagtacatagtacataaagccatttaccgtacatagcacattacagtcaaatcccttctcgtccccatggatgacccccctcagataggggtcccttgaccaccatcctccgtgaaatcaatatcccgcacaagagtgctactctcctcgctccgggcccataacacttgggggtagctaaagtgaactgtatccgacatctggttcctacttcagggtcataaagcctaaatagcccacacgttccccttaaataagacatcacgatg

SEQ ID NO: 519 - DNA, 16569 bp, Homo sapiens mitochondrial
  3107: "n" refers to a nucleotide at position 3107 of the Cambridge Reference Sequence (CRS, Anderson et al. 1981 Nature 290:457-465), later determined to be absent from the human mtDNA sequence according to the revised CRS (rCRS, Andrews et al. 1999 Nature Genetics 23:147); "n" therefore represents a single nucleotide deletion at a position corresponding to nucleotide 3107 of SEQ ID NO:1 as provided herein.
gatcacaggtctatcaccctattaaccactcacgggagctctccatgcatttggtattttcgtctggggggtatgcacgcgatagcattgcgagacgctggagccggagcaccctatgtcgcagtatctgtctttgattcctgcctcatcctattatttatcgcacctacgttcaatattacaggcgaacatacttactaaagtgtgttaattaattaatgcttgtaggacataataataacaattgaatgtctgcacagccactttccacacagacatcataacaaaaaatttccaccaaaccccccctcccccgcttctggccacagcacttaaacacatctctgccaaaccccaaaaacaaagaaccctaacaccagcctaaccagatttcaaattttatcttttggcggtatgcacttttaacagtcaccccccaactaacacattattttcccctcccactcccatactactaatctcatcaatacaacccccgcccatcctacccagcacacacacaccgctgctaaccccataccccgaaccaaccaaaccccaaagacaccccccacagtttatgtagcttacctcctcaaagcaatacactgaaaatgtttagacgggctcacatcaccccataaacaaataggtttggtcctagcctttctattagctcttagtaagattacacatgcaagcatccccgttccagtgagttcaccctctaaatcaccacgatcaaaagggacaagcatcaagcacgcagcaatgcagctcaaaacgcttagcctagccacacccccacgggaaacagcagtgattaacctttagcaataaacgaaagtttaactaagctatactaaccccagggttggtcaatttcgtgccagccaccgcggtcacacgattaacccaagtcaatagaagccggcgtaaagagtgttttagatcaccccctccccaataaagctaaaactcacctgagttgtaaaaaactccagttgacacaaaatagactacgaaagtggctttaacatatctgaacacacaatagctaagacccaaactgggattagataccccactatgcttagccctaaacctcaacagttaaatcaacaaaactgctcgccagaacactacgagccacagcttaaaactcaaaggacctggcggtgcttcatatccctctagaggagcctgttctgtaatcgataaaccccgatcaacctcaccacctcttgctcagcctatataccgccatcttcagcaaaccctgatgaaggctacaaagtaagcgcaagtacccacgtaaagacgttaggtcaaggtgtagcccatgaggtggcaagaaatgggctacattttctaccccagaaaactacgatagcccttatgaaacttaagggtcgaaggtggatttagcagtaaactgagagtagagtgcttagttgaacagggccctgaagcgcgtacacaccgcccgtcaccctcctcaagtatacttcaaaggacatttaactaaaacccctacgcatttatatagaggagacaagtcgtaacatggtaagtgtactggaaagtgcacttggacgaaccagagtgtagcttaacacaaagcacccaacttacacttaggagatttcaacttaacttgaccgctctgagctaaacctagccccaaacccactccaccttactaccagacaaccttagccaaaccatttacccaaataaagtataggcgatagaaattgaaacctggcgcaatagatatagtaccgcaagggaaagatgaaaaattataaccaagcataatatagcaaggactaacccctataccttctgcataatgaattaactagaaataactttgcaaggagagccaaagctaagacccccgaaaccagacgagctacctaagaacagctaaaagagcacacccgtctatgtagcaaaatagtgggaagatttataggtagaggcgacaaacctaccgagcctggtgatagctggttgtccaagatagaatcttagttcaactttaaatttgcccacagaaccctctaaatccccttgtaaatttaactgttagtccaaagaggaacagctctttggacactaggaaaaaaccttgtagagagagtaaaaaatttaacacccatagtaggcctaaaagcagccaccaattaagaaagcgttcaagctcaacacccactacctaaaaaatcccaaacatataactgaactcctcacacccaattggaccaatctatcaccctatagaagaactaatgttagtataagtaacatgaaaacattctcctccgcataagcctgcgtcagattaaaacactgaactgacaattaacagcccaatatctacaatcaaccaacaagtcattattaccctcactgtcaacccaacacaggcatgctcataaggaaaggttaaaaaaagtaaaaggaactcggcaaatcttaccccgcctgtttaccaaaaacatcacctctagcatcaccagtattagaggcaccgcctgcccagtgacacatgtttaacggccgcggtaccctaaccgtgcaaaggtagcataatcacttgttccttaaatagggacctgtatgaatggctccacgagggttcagctgtctcttacttttaaccagtgaaattgacctgcccgtgaagaggcgggcatgacacagcaagacgagaagaccctatggagctttaatttattaatgcaaacagtacctaacaaacccacaggtcctaaactaccaaacctgcattaaaaatttcggttggggcgacctcggagcagaacccaacctccgagcagtacatgctaagacttcaccagtcaaagcgaactactatactcaattgatccaataacttgaccaacggaacaagttaccctagggataacagcgcaatcctattctagagtccatatcaacaatagggtttacgacctcgatgttggatcaggacatcccgatggtgcagccgctattaaaggttcgtttgttcaacgattaaagtcctacgtgatctgagttcagaccggagtaatccaggtcggtttctatctacnttcaaattcctccctgtacgaaaggacaagagaaataaggcctacttcacaaagcgccttcccccgtaaatgatatcatctcaacttagcattatacccacacccacccaagaacagggtttgttaagatggcagagcccggtaatcgcataaaacttaaaactttacagtcagaggttcaattcctcttcttaacaacatacccatggccaacctcctactcctcattgtacccattctaatcgcaatggcattcctaatgcttaccgaacgaaaaattctaggctatatacaactacgcaaaggccccaacgttgtaggcccctacgggctactacaacccttcgctgacgccataaaactcttcaccaaagagcccctaaaacccgccacatctaccatcaccctctacatcaccgccccgaccttagctctcaccatcgctcttctactatgaacccccctccccatacccaaccccctggtcaacctcaacctaggcctcctatttattctagccacctctagcctagccgtttactcaatcctctgatcagggtgagcatcaaactcaaactacgccctgatcggcgcactgcgagcagtagcccaaacaatctcatatgaagtcaccctagccatcattctactatcaacattactaataagtggctcctttaacctctccacccttatcacaacacaagaacacctctgattactcctgccatcatgacccttggccataatatgatttatctccacactagcagagaccaaccgaacccccttcgaccttgccgaaggggagtccgaactagtctcaggcttcaacatcgaatacgccgcaggccccttcgccctattcttcatagccgaatacacaaacattattataataaacaccctcaccactacaatcttcctaggaacaacatatgacgcactctcccctgaactctacacaacatattttgtcaccaagaccctacttctaacctccctgttcttatgaattcgaacagcatacccccgattccgctacgaccaactcatacacctcctatgaaaaaacttcctaccactcaccctagcattacttatatgatatgtctccatacccattacaatctccagcattccccctcaaacctaagaaatatgtctgataaaagagttactttgatagagtaaataataggagcttaaacccccttatttctaggactatgagaatcgaacccatccctgagaatccaaaattctccgtgccacctatcacaccccatcctaaagtaaggtcagctaaataagctatcgggcccataccccgaaaatgttggttatacccttcccgtactaattaatcccctggcccaacccgtcatctactctaccatctttgcaggcacactcatcacagcgctaagctcgcactgattttttacctgagtaggcctagaaataaacatgctagcttttattccagttctaaccaaaaaaataaaccctcgttccacagaagctgccatcaagtatttcctcacgcaagcaaccgcatccataatccttctaatagctatcctcttcaacaatatactctccggacaatgaaccataaccaatactaccaatcaatactcatcattaataatcataatggctatagcaataaaactaggaatagccccctttcacttctgagtcccagaggttacccaaggcacccctctgacatccggcctgcttcttctcacatgacaaaaactagcccccatctcaatcatataccaaatctctccctcactaaacgtaagccttctcctcactctctcaatcttatccatcatagcaggcagttgaggtggattaaaccaaacccagctacgcaaaatcttagcatactcctcaattacccacataggatgaataatagcagttctaccgtacaaccctaacataaccattcttaatttaactatttatattatcctaactactaccgcattcctactactcaacttaaactccagcaccacgaccctactactatctcgcacctgaaacaagctaacatgactaacacccttaattccatccaccctcctctccctaggaggcctgcccccgctaaccggctttttgcccaaatgggccattatcgaagaattcacaaaaaacaatagcctcatcatccccaccatcatagccaccatcaccctccttaacctctacttctacctacgcctaatctactccacctcaatcacactactccccatatctaacaacgtaaaaataaaatgacagtttgaacatacaaaacccaccccattcctccccacactcatcgcccttaccacgctactcctacctatctccccttttatactaataatcttatagaaatttaggttaaatacagaccaagagccttcaaagccctcagtaagttgcaatacttaatttctgtaacagctaaggactgcaaaaccccactctgcatcaactgaacgcaaatcagccactttaattaagctaagcccttgctagaccaatgggacttaaacccacaaacacttagttaacagctaagcaccctaatcaactggcttcaatctacttctcccgccgccgggaaaaaaggcgggagaagccccggcaggtttgaagctgcttcttcgaatttgcaattcaatatgaaaatcacctcggagctggtaaaaagaggcctaacccctgtctttagatttacagtccaatgcttcactcagccattttacctcacccccactgatgttcgccgaccgttgactattctctacaaaccacaaagacattggaacactatacctattattcggcgcatgagctggagtcctaggcacagctctaagcctccttattcgagccgagctgggccagccaggcaaccttctaggtaacgaccacatctacaacgttatcgtcacagcccatgcatttgtaataatcttcttcatagtaatacccatcataatcggaggctttggcaactgactagttcccctaataatcggtgcccccgatatggcgtttccccgcataaacaacataagcttctgactcttacctccctctctcctactcctgctcgcatctgctatagtggaggccggagcaggaacaggttgaacagtctaccctcccttagcagggaactactcccaccctggagcctccgtagacctaaccatcttctccttacacctagcaggtgtctcctctatcttaggggccatcaatttcatcacaacaattatcaatataaaaccccctgccataacccaataccaaacgcccctcttcgtctgatccgtcctaatcacagcagtcctacttctcctatctctcccagtcctagctgctggcatcactatactactaacagaccgcaacctcaacaccaccttcttcgaccccgccggaggaggagaccccattctataccaacacctattctgatttttcggtcaccctgaagtttatattcttatcctaccaggcttcggaataatctcccatattgtaacttactactccggaaaaaaagaaccatttggatacataggtatggtctgagctatgatatcaattggcttcctagggtttatcgtgtgagcacaccatatatttacagtaggaatagacgtagacacacgagcatatttcacctccgctaccataatcatcgctatccccaccggcgtcaaagtatttagctgactcgccacactccacggaagcaatatgaaatgatctgctgcagtgctctgagccctaggattcatctttcttttcaccgtaggtggcctgactggcattgtattagcaaactcatcactagacatcgtactacacgacacgtactacgttgtagctcacttccactatgtcctatcaataggagctgtatttgccatcataggaggcttcattcactgatttcccctattctcaggctacaccctagaccaaacctacgccaaaatccatttcactatcatattcatcggcgtaaatctaactttcttcccacaacactttctcggcctatccggaatgccccgacgttactcggactaccccgatgcatacaccacatgaaacatcctatcatctgtaggctcattcatttctctaacagcagtaatattaataattttcatgatttgagaagccttcgcttcgaagcgaaaagtcctaatagtagaagaaccctccataaacctggagtgactatatggatgccccccaccctaccacacattcgaagaacccgtatacataaaatctagacaaaaaaggaaggaatcgaaccccccaaagctggtttcaagccaaccccatggcctccatgactttttcaaaaaggtattagaaaaaccatttcataactttgtcaaagttaaattataggctaaatcctatatatcttaatggcacatgcagcgcaagtaggtctacaagacgctacttcccctatcatagaagagcttatcacctttcatgatcacgccctcataatcattttccttatctgcttcctagtcctgtatgcccttttcctaacactcacaacaaaactaactaatactaacatctcagacgctcaggaaatggaaaccgtctgaactatcctgcccgccatcatcctagtcctcatcgccctcccatccctacgcatcctttacataacagacgaggtcaacgatccctcccttaccatcaaatcaattggccaccaatggtactgaacctacgagtacaccgactacggcggactaatcttcaactcctacatacttcccccattattcctagaaccaggcgacctgcgactccttgacgttgacaatcgagtagtactcccgattgaagcccccattcgtataataattacatcacaagacgtcttgcactcatgagctgtccccacattaggcttaaaaacagatgcaattcccggacgtctaaaccaaaccactttcaccgctacacgaccgggggtatactacggtcaatgctctgaaatctgtggagcaaaccacagtttcatgcccatcgtcctagaattaattcccctaaaaatctttgaaatagggcccgtatttaccctatagcaccccctctaccccctctagagcccactgtaaagctaacttagcattaaccttttaagttaaagattaagagaaccaacacctctttacagtgaaatgccccaactaaatactaccgtatggcccaccataattacccccatactccttacactattcctcatcacccaactaaaaatattaaacacaaactaccacctacctccctcaccaaagcccataaaaataaaaaattataacaaaccctgagaaccaaaatgaacgaaaatctgttcgcttcattcattgcccccacaatcctaggcctacccgccgcagtactgatcattctatttccccctctattgatccccacctccaaatatctcatcaacaaccgactaatcaccacccaacaatgactaatcaaactaacctcaaaacaaatgataaccatacacaacactaaaggacgaacctgatctcttatactagtatccttaatcatttttattgccacaactaacctcctcggactcctgcctcactcatttacaccaaccacccaactatctataaacctagccatggccatccccttatgagcgggcgcagtgattataggctttcgctctaagattaaaaatgccctagcccacttcttaccacaaggcacacctacaccccttatccccatactagttattatcgaaaccatcagcctactcattcaaccaatagccctggccgtacgcctaaccgctaacattactgcaggccacctactcatgcacctaattggaagcgccaccctagcaatatcaaccattaaccttccctctacacttatcatcttcacaattctaattctactgactatcctagaaatcgctgtcgccttaatccaagcctacgttttcacacttctagtaagcctctacctgcacgacaacacataatgacccaccaatcacatgcctatcatatagtaaaacccagcccatgacccctaacaggggccctctcagccctcctaatgacctccggcctagccatgtgatttcacttccactccataacgctcctcatactaggcctactaaccaacacactaaccatataccaatgatggcgcgatgtaacacgagaaagcacataccaaggccaccacacaccacctgtccaaaaaggccttcgatacgggataatcctatttattacctcagaaatttttttcttcgcaggatttttctgagccttttaccactccagcctagcccctaccccccaattaggagggcactggcccccaacaggcatcaccccgctaaatcccctagaagtcccactcctaaacacatccgtattactcgcatcaggagtatcaatcacctgagctcaccatagtctaatagaaaacaaccgaaaccaaataattcaagcactgcttattacaattttactgggtctctattttaccctcctacaagcctcagagtacttcgagtctcccttcaccatttccgacggcatctacggctcaacattttttgtagccacaggcttccacggacttcacgtcattattggctcaactttcctcactatctgcttcatccgccaactaatatttcactttacatccaaacatcactttggcttcgaagccgccgcctgatactggcattttgtagatgtggtttgactatttctgtatgtctccatctattgatgagggtcttactcttttagtataaatagtaccgttaacttccaattaactagttttgacaacattcaaaaaagagtaataaacttcgccttaattttaataatcaacaccctcctagccttactactaataattattacattttgactaccacaactcaacggctacatagaaaaatccaccccttacgagtgcggcttcgaccctatatcccccgcccgcgtccctttctccataaaattcttcttagtagctattaccttcttattatttgatctagaaattgccctccttttacccctaccatgagccctacaaacaactaacctgccactaatagttatgtcatccctcttattaatcatcatcctagccctaagtctggcctatgagtgactacaaaaaggattagactgaaccgaattggtatatagtttaaacaaaacgaatgatttcgactcattaaattatgataatcatatttaccaaatgcccctcatttacataaatattatactagcatttaccatctcacttctaggaatactagtatatcgctcacacctcatatcctccctactatgcctagaaggaataatactatcgctgttcattatagctactctcataaccctcaacacccactccctcttagccaatattgtgcctattgccatactagtctttgccgcctgcgaagcagcggtgggcctagccctactagtctcaatctccaacacatatggcctagactacgtacataacctaaacctactccaatgctaaaactaatcgtcccaacaattatattactaccactgacatgactttccaaaaaacacataatttgaatcaacacaaccacccacagcctaattattagcatcatccctctactattttttaaccaaatcaacaacaacctatttagctgttccccaaccttttcctccgaccccctaacaacccccctcctaatactaactacctgactcctacccctcacaatcatggcaagccaacgccacttatccagtgaaccactatcacgaaaaaaactctacctctctatactaatctccctacaaatctccttaattataacattcacagccacagaactaatcatattttatatcttcttcgaaaccacacttatccccaccttggctatcatcacccgatgaggcaaccagccagaacgcctgaacgcaggcacatacttcctattctacaccctagtaggctcccttcccctactcatcgcactaatttacactcacaacaccctaggctcactaaacattctactactcactctcactgcccaagaactatcaaactcctgagccaacaacttaatatgactagcttacacaatagcttttatagtaaagatacctctttacggactccacttatgactccctaaagcccatgtcgaagcccccatcgctgggtcaatagtacttgccgcagtactcttgaaactaggcggctatggtataatacgcctcacactcattctcaaccccctgacaaaacacatagcctaccccttccttgtactatccctatgaggcataattataacaagctccatctgcctacgacaaacagacctaaaatcgctcattgcatactcttcaatcagccacatagccctcgtagtaacagccattctcatccaaaccccctgaagcttcaccggcgcagtcattctcataatcgcccacggacttacatcctcattactattctgcctagcaaactcaaactacgaacgcactcacagtcgcatcataatcctctctcaaggacttcaaactctactcccactaatagctttttgatgacttctagcaagcctcgctaacctcgccttaccccccactattaacctactgggagaactctctgtgctagtaaccacgttctcctgatcaaatatcactctcctacttacaggactcaacatactagtcacagccctatactccctctacatatttaccacaacacaatggggctcactcacccaccacattaacaacataaaaccctcattcacacgagaaaacaccctcatgttcatacacctatcccccattctcctcctatccctcaaccccgacatcattaccgggttttcctcttgtaaatatagtttaaccaaaacatcagattgtgaatctgacaacagaggcttacgaccccttatttaccgagaaagctcacaagaactgctaactcatgcccccatgtctaacaacatggctttctcaacttttaaaggataacagctatccattggtcttaggccccaagaattttggtgcaactccaaataaaagtaataaccatgcacactactataaccaccctaaccctaacttccctaattccccccatccttaccaccctcgttaaccctaacaaaaaaaactcatacccccattatgtaaaatccattgtcgcatccacctttattatcagtctcttccccacaacaatattcatgtgcctagaccaagaagttattatctcgaactgacactgagccacaacccaaacaacccagctctccctaagcttcaaactagactacttctccataatattcatccctgtagcattgttcgttacatggtccatcatagaattctcactgtgatatataaactcagacccaaacattaatcagttcttcaaatatctactcatcttcctaattaccatactaatcttagttaccgctaacaacctattccaactgttcatcggctgagagggcgtaggaattatatccttcttgctcatcagttgatgatacgcccgagcagatgccaacacagcagccattcaagcaatcctatacaaccgtatcggcgatatcggtttcatcctcgccttagcatgatttatcctacactccaactcatgagacccacaacaaatagcccttctaaacgctaatccaagcctcaccccactactaggcctcctcctagcagcagcaggcaaatcagcccaattaggtctccacccctgactcccctcagccatagaaggccccaccccagtctcagccctactccactcaagcactatagttgtagcaggaatcttcttactcatccgcttccaccccctagcagaaaatagcccactaatccaaactctaacactatgcttaggcgctatcaccactctgttcgcagcagtctgcgcccttacacaaaatgacatcaaaaaaatcgtagccttctccacttcaagtcaactaggactcataatagttacaatcggcatcaaccaaccacacctagcattcctgcacatctgtacccacgccttcttcaaagccatactatttatgtgctccgggtccatcatccacaaccttaacaatgaacaagatattcgaaaaataggaggactactcaaaaccatacctctcacttcaacctccctcaccattggcagcctagcattagcaggaatacctttcctcacaggtttctactccaaagaccacatcatcgaaaccgcaaacatatcatacacaaacgcctgagccctatctattactctcatcgctacctccctgacaagcgcctatagcactcgaataatccttctcaccctaacaggtcaacctcgcttccccacccttactaacattaacgaaaataaccccaccctactaaaccccattaaacgcctggcagccggaagcctattcgcaggatttctcattactaacaacatttcccccgcatcccccttccaaacaacaatccccctctacctaaaactcacagccctcgctgtcactttcctaggacttctaacagccctagacctcaactacctaaccaacaaacttaaaataaaatccccactatgcacattttatttctccaacatactcggattctaccctagcatcacacaccgcacaatcccctatctaggccttcttacgagccaaaacctgcccctactcctcctagacctaacctgactagaaaagctattacctaaaacaatttcacagcaccaaatctccacctccatcatcacctcaacccaaaaaggcataattaaactttacttcctctctttcttcttcccactcatcctaaccctactcctaatcacataacctattcccccgagcaatctcaattacaatatacacaccaacaaacaatgttcaaccagtaactactactaatcaacgcccataatcatacaaagcccccgcaccaataggatcctcccgaatcaaccctgacccctctccttcataaattattcagcttcctacactattaaagtttaccacaaccaccaccccatcatactctttcacccacagcaccaatcctacctccatcgctaaccccactaaaacactcaccaagacctcaacctctgacccccatgcctcaggatactcctcaatagccatcgctgtagtatacccaaagacaaccatcattccccctaaataaattaaaaaaactattaaacccatataacctcccccaaaattcagaataataacacacccgaccacaccgctaacaatcaatactaaacccccataaataggagaaggcttagaagaaaaccccacaaaccccattactaaacccacactcaacagaaacaaagcatacatcattattctcgcacggactacaaccacgaccaatgatatgaaaaaccatcgttgtatttcaactacaagaacaccaatgaccccaatacgcaaaattaaccccctaataaaattaattaaccactcattcatcgacctccccaccccatccaacatctccgcatgatgaaacttcggctcactccttggcgcctgcctgatcctccaaatcaccacaggactattcctagccatgcactactcaccagacgcctcaaccgccttttcatcaatcgcccacatcactcgagacgtaaattatggctgaatcatccgctaccttcacgccaatggcgcctcaatattctttatctgcctcttcctacacatcgggcgaggcctatattacggatcatttctctactcagaaacctgaaacatcggcattatcctcctgcttgcaactatagcaacagccttcataggctatgtcctcccgtgaggccaaatatcattctgaggggccacagtaattacaaacatactatccgccatcccatacattgggacagacctagttcaatgaatctgaggaggctactcagtagacagtcccaccctcacacgattctttacctttcacttcatcttgcccttcattattgcagccctagcagcactccacctcctattcttgcacgaaacgggatcaaacaaccccctaggaatcacctcccattccgataaaatcaccttccacccttactacacaatcaaagacgccctcggcttacttctcttccttctctccttaatgacattaacactattctcaccagacctcctaggcgacccagacaattataccctagccaaccccttaaacacccctccccacatcaagcccgaatgatatttcctattcgcctacacaattctccgatccgtccctaacaaactaggaggcgtccttgccctattactatccatcctcatcctagcaataatccccatcctccatatatccaaacaacaaagcataatatttcgcccactaagccaatcactttattgactcctagccgcagacctcctcattctaacctgaatcggaggacaaccagtaagctacccttttaccatcattggacaagtagcatccgtactatacttcacaacaatcctaatcctaataccaactatctccctaattgaaaacaaaatactcaaatgggcctgtccttgtagtataaactaatacaccagtcttgtaaaccggagatgaaaacctttttccaaggacaaatcagagaaaaagtctttaactccaccattagcacccaaagctaagattctaatttaaactattctctgttctttcatggggaagcagatttgggtaccacccaagtattgactcacccatcaacaaccgctatgtatttcgtacattactgccagccaccatgaatattgtacggtaccataaatacttgaccacctgtagtacataaaaacccaatccacatcaaaaccccctccccatgcttacaagcaagtacagcaatcaaccctcaactatcacacatcaactgcaactccaaagccacccctcacccactaggataccaacaaacctacccacccttaacagtacatagtacataaagccatttaccgtacatagcacattacagtcaaatcccttctcgtccccatggatgacccccctcagataggggtcccttgaccaccatcctccgtgaaatcaatatcccgcacaagagtgctactctcctcgctccgggcccataacacttgggggtagctaaagtgaactgtatccgacatctggttcctacttcagggtcataaagcctaaatagcccacacgttccccttaaataagacatcacgatg

SEQ ID NO: 520 - DNA, 16569 bp, Homo sapiens mitochondrial
  3107: "n" refers to a nucleotide at position 3107 of the Cambridge Reference Sequence (CRS, Anderson et al. 1981 Nature 290:457-465), later determined to be absent from the human mtDNA sequence according to the revised CRS (rCRS, Andrews et al. 1999 Nature Genetics 23:147); "n" therefore represents a single nucleotide deletion at a position corresponding to nucleotide 3107 of SEQ ID NO:1 as provided herein.
gatcacaggtctatcaccctattaaccactcacgggagctctccatgcatttggtattttcgtctggggggtatgcacgcgatagcattgcgagacgctggagccggagcaccctatgtcgcagtatctgtctttgattcctgcctcatcctattatttatcgcacctacgttcaatattacaggcgaacatacttactaaagtgtgttaattaattaatgcttgtaggacataataataacaattgaatgtctgcacagccactttccacacagacatcataacaaaaaatttccaccaaaccccccctcccccgcttctggccacagcacttaaacacatctctgccaaaccccaaaaacaaagaaccctaacaccagcctaaccagatttcaaattttatcttttggcggtatgcacttttaacagtcaccccccaactaacacattattttcccctcccactcccatactactaatctcatcaatacaacccccgcccatcctacccagcacacacacaccgctgctaaccccataccccgaaccaaccaaaccccaaagacaccccccacagtttatgtagcttacctcctcaaagcaatacactgaaaatgtttagacgggctcacatcaccccataaacaaataggtttggtcctagcctttctattagctcttagtaagattacacatgcaagcatccccgttccagtgagttcaccctctaaatcaccacgatcaaaagggacaagcatcaagcacgcagcaatgcagctcaaaacgcttagcctagccacacccccacgggaaacagcagtgattaacctttagcaataaacgaaagtttaactaagctatactaaccccagggttggtcaatttcgtgccagccaccgcggtcacacgattaacccaagtcaatagaagccggcgtaaagagtgttttagatcaccccctccccaataaagctaaaactcacctgagttgtaaaaaactccagttgacacaaaatagactacgaaagtggctttaacatatctgaacacacaatagctaagacccaaactgggattagataccccactatgcttagccctaaacctcaacagttaaatcaacaaaactgctcgccagaacactacgagccacagcttaaaactcaaaggacctggcggtgcttcatatccctctagaggagcctgttctgtaatcgataaaccccgatcaacctcaccacctcttgctcagcctatataccgccatcttcagcaaaccctgatgaaggctacaaagtaagcgcaagtacccacgtaaagacgttaggtcaaggtgtagcccatgaggtggcaagaaatgggctacattttctaccccagaaaactacgatagcccttatgaaacttaagggtcgaaggtggatttagcagtaaactgagagtagagtgcttagttgaacagggccctgaagcgcgtacacaccgcccgtcaccctcctcaagtatacttcaaaggacatttaactaaaacccctacgcatttatatagaggagacaagtcgtaacatggtaagtgtactggaaagtgcacttggacgaaccagagtgtagcttaacacaaagcacccaacttacacttaggagatttcaacttaacttgaccgctctgagctaaacctagccccaaacccactccaccttactaccagacaaccttagccaaaccatttacccaaataaagtataggcgatagaaattgaaacctggcgcaatagatatagtaccgcaagggaaagatgaaaaattataaccaagcataatatagcaaggactaacccctataccttctgcataatgaattaactagaaataactttgcaaggagagccaaagctaagacccccgaaaccagacgagctacctaagaacagctaaaagagcacacccgtctatgtagcaaaatagtgggaagatttataggtagaggcgacaaacctaccgagcctggtgatagctggttgtccaagatagaatcttagttcaactttaaatttgcccacagaaccctctaaatccccttgtaaatttaactgttagtccaaagaggaacagctctttggacactaggaaaaaaccttgtagagagagtaaaaaatttaacacccatagtaggcctaaaagcagccaccaattaagaaagcgttcaagctcaacacccactacctaaaaaatcccaaacatataactgaactcctcacacccaattggaccaatctatcaccctatagaagaactaatgttagtataagtaacatgaaaacattctcctccgcataagcctgcgtcagattaaaacactgaactgacaattaacagcccaatatctacaatcaaccaacaagtcattattaccctcactgtcaacccaacacaggcatgctcataaggaaaggttaaaaaaagtaaaaggaactcggcaaatcttaccccgcctgtttaccaaaaacatcacctctagcatcaccagtattagaggcaccgcctgcccagtgacacatgtttaacggccgcggtaccctaaccgtgcaaaggtagcataatcacttgttccttaaatagggacctgtatgaatggctccacgagggttcagctgtctcttacttttaaccagtgaaattgacctgcccgtgaagaggcgggcatgacacagcaagacgagaagaccctatggagctttaatttattaatgcaaacagtacctaacaaacccacaggtcctaaactaccaaacctgcattaaaaatttcggttggggcgacctcggagcagaacccaacctccgagcagtacatgctaagacttcaccagtcaaagcgaactactatactcaattgatccaataacttgaccaacggaacaagttaccctagggataacagcgcaatcctattctagagtccatatcaacaatagggtttacgacctcgatgttggatcaggacatcccgatggtgcagccgctattaaaggttcgtttgttcaacgattaaagtcctacgtgatctgagttcagaccggagtaatccaggtcggtttctatctacnttcaaattcctccctgtacgaaaggacaagagaaataaggcctacttcacaaagcgccttcccccgtaaatgatatcatctcaacttagtattatacccacacccacccaagaacagggtttgttaagatggcagagcccggtaatcgcataaaacttaaaactttacagtcagaggttcaattcctcttcttaacaacatacccatggccaacctcctactcctcattgtacccattctaatcgcaatggcattcctaatgcttaccgaacgaaaaattctaggctatatacaactacgcaaaggccccaacgttgtaggcccctacgggctactacaacccttcgctgacgccataaaactcttcaccaaagagcccctaaaacccgccacatctaccatcaccctctacatcaccgccccgaccttagctctcaccatcgctcttctactatgaacccccctccccatacccaaccccctggtcaacctcaacctaggcctcctatttattctagccacctctagcctagccgtttactcaatcctctgatcagggtgagcatcaaactcaaactacgccctgatcggcgcactgcgagcagtagcccaaacaatctcatatgaagtcaccctagccatcattctactatcaacattactaataagtggctcctttaacctctccacccttatcacaacacaagaacacctctgattactcctgccatcatgacccttggccataatatgatttatctccacactagcagagaccaaccgaacccccttcgaccttgccgaaggggagtccgaactagtctcaggcttcaacatcgaatacgccgcaggccccttcgccctattcttcatagccgaatacacaaacattattataataaacaccctcaccactacaatcttcctaggaacaacatatgacgcactctcccctgaactctacacaacatattttgtcaccaagaccctacttctaacctccctgttcttatgaattcgaacagcatacccccgattccgctacgaccaactcatacacctcctatgaaaaaacttcctaccactcaccctagcattacttatatgatatgtctccatacccattacaatctccagcattccccctcaaacctaagaaatatgtctgataaaagagttactttgatagagtaaataataggagcttaaacccccttatttctaggactatgagaatcgaacccatccctgagaatccaaaattctccgtgccacctatcacaccccatcctaaagtaaggtcagctaaataagctatcgggcccataccccgaaaatgttggttatacccttcccgtactaattaatcccctggcccaacccgtcatctactctaccatctttgcaggcacactcatcacagcgctaagctcgcactgattttttacctgagtaggcctagaaataaacatactagcttttattccagttctaaccaaaaaaataaaccctcgttccacagaagctgccatcaagtatttcctcacgcaagcaaccgcatccataatccttctaatagctatcctcttcaacaatatactctccggacaatgaaccataaccaatactaccaatcaatactcatcattaataatcataatggctatagcaataaaactaggaatagccccctttcacttctgagtcccagaggttacccaaggcacccctctgacatccggcctgcttcttctcacatgacaaaaactagcccccatctcaatcatataccaaatctctccctcactaaacgtaagccttctcctcactctctcaatcttatccatcatagcaggcagttgaggtggattaaaccaaacccagctacgcaaaatcttagcatactcctcaattacccacataggatgaataatagcagttctaccgtacaaccctaacataaccattcttaatttaactatttatattatcctaactactaccgcattcctactactcaacttaaactccagcaccacgaccctactactatctcgcacctgaaacaagctaacatgactaacacccttaattccatccaccctcctctccctaggaggcctgcccccgctaaccggctttttgcccaaatgggccattatcgaagaattcacaaaaaacaatagcctcatcatccccaccatcatagccaccatcaccctccttaacctctacttctacctacgcctaatctactccacctcaatcacactactccccatatctaacaacgtaaaaataaaatgacagtttgaacatacaaaacccaccccattcctccccacactcatcgcccttaccacgctactcctacctatctccccttttatactaataatcttatagaaatttaggttaaatacagaccaagagccttcaaagccctcagtaagttgcaatacttaatttctgtaacagctaaggactgcaaaaccccactctgcatcaactgaacgcaaatcagccactttaattaagctaagcccttactagaccaatgggacttaaacccacaaacacttagttaacagctaagcaccctaatcaactggcttcaatctacttctcccgccgccgggaaaaaaggcgggagaagccccggcaggtttgaagctgcttcttcgaatttgcaattcaatatgaaaatcacctcggagctggtaaaaagaggcctaacccctgtctttagatttacagtccaatgcttcactcagccattttacctcacccccactgatgttcgccgaccgttgactattctctacaaaccacaaagacattggaacactatacctattattcggcgcatgagctggagtcctaggcacagctctaagcctccttattcgagccgagctgggccagccaggcaaccttctaggtaacgaccacatctacaacgttatcgtcacagcccatgcatttgtaataatcttcttcatagtaatacccatcataatcggaggctttggcaactgactagttcccctaataatcggtgcccccgatatggcgtttccccgcataaacaacataagcttctgactcttacctccctctctcctactcctgctcgcatctgctatagtggaggccggagcaggaacaggttgaacagtctaccctcccttagcagggaactactcccaccctggagcctccgtagacctaaccatcttctccttacacctagcaggtgtctcctctatcttaggggccatcaatttcatcacaacaattatcaatataaaaccccctgccataacccaataccaaacgcccctcttcgtctgatccgtcctaatcacagcagtcctacttctcctatctctcccagtcctagctgctggcatcactatactactaacagaccgcaacctcaacaccaccttcttcgaccccgccggaggaggagaccccattctataccaacacctattctgatttttcggtcaccctgaagtttatattcttatcctaccaggcttcggaataatctcccatattgtaacttactactccggaaaaaaagaaccatttggatacataggtatggtctgagctatgatatcaattggcttcctagggtttatcgtgtgagcacaccatatatttacagtaggaatagacgtagacacacgagcatatttcacctccgctaccataatcatcgctatccccaccggcgtcaaagtatttagctgactcgccacactccacggaagcaatatgaaatgatctgctgcagtgctctgagccctaggattcatctttcttttcaccgtaggtggcctgactggcattgtattagcaaactcatcactagacatcgtactacacgacacgtactacgttgtagctcacttccactatgtcctatcaataggagctgtatttgccatcataggaggcttcattcactgatttcccctattctcaggctacaccctagaccaaacctacgccaaaatccatttcactatcatattcatcggcgtaaatctaactttcttcccacaacactttctcggcctatccggaatgccccgacgttactcggactaccccgatgcatacaccacatgaaacatcctatcatctgtaggctcattcatttctctaacagcagtaatattaataattttcatgatttgagaagccttcgcttcgaagcgaaaagtcctaatagtagaagaaccctccataaacctggagtgactatatggatgccccccaccctaccacacattcgaagaacccgtatacataaaatctagacaaaaaaggaaggaatcgaaccccccaaagctggtttcaagccaaccccatggcctccatgactttttcaaaaaggtattagaaaaaccatttcataactttgtcaaagttaaattataggctaaatcctatatatcttaatggcacatgcagcgcaagtaggtctacaagacgctacttcccctatcatagaagagcttatcacctttcatgatcacgccctcataatcattttccttatctgcttcctagtcctgtatgcccttttcctaacactcacaacaaaactaactaatactaacatctcagacgctcaggaaatagaaaccgtctgaactatcctgcccgccatcatcctagtcctcatcgccctcccatccctacgcatcctttacataacagacgaggtcaacgatccctcccttaccatcaaatcaattggccaccaatggtactgaacctacgagtacaccgactacggcggactaatcttcaactcctacatacttcccccattattcctagaaccaggcgacctgcgactccttgacgttgacaatcgagtagtactcccgattgaagcccccattcgtataataattacatcacaagacgtcttgcactcatgagctgtccccacattaggcttaaaaacagatgcaattcccggacgtctaaaccaaaccactttcaccgctacacgaccgggggtatactacggtcaatgctctgaaatctgtggagcaaaccacagtttcatgcccatcgtcctagaattaattcccctaaaaatctttgaaatagggcccgtatttaccctatagcaccccctctaccccctctagagcccactgtaaagctaacttagcattaaccttttaagttaaagattaagagaaccaacacctctttacagtgaaatgccccaactaaatactaccgtatggcccaccataattacccccatactccttacactattcctcatcacccaactaaaaatattaaacacaaactaccacctacctccctcaccaaagcccataaaaataaaaaattataacaaaccctgagaaccaaaatgaacgaaaatctgttcgcttcattcattgcccccacaatcctaggcctacccgccgcagtactgatcattctatttccccctctattgatccccacctccaaatatctcatcaacaaccgactaatcaccacccaacaatgactaatcaaactaacctcaaaacaaatgataaccatacacaacactaaaggacgaacctgatctcttatactagtatccttaatcatttttattgccacaactaacctcctcggactcctgcctcactcatttacaccaaccacccaactatctataaacctagccatggccatccccttatgagcgggcgcagtgattataggctttcgctctaagattaaaaatgccctagcccacttcttaccacaaggcacacctacaccccttatccccatactagttattatcgaaaccatcagcctactcattcaaccaatagccctggccgtacgcctaaccgctaacattactgcaggccacctactcatgcacctaattggaagcgccaccctagcaatatcaaccattaaccttccctctacacttatcatcttcacaattctaattctactgactatcctagaaatcgctgtcgccttaatccaagcctacgttttcacacttctagtaagcctctacctgcacgacaacacataatgacccaccaatcacatgcctatcatatagtaaaacccagcccatgacccctaacaggggccctctcagccctcctaatgacctccggcctagccatgtgatttcacttccactccataacgctcctcatactaggcctactaaccaacacactaaccatataccaatgatggcgcgatgtaacacgagaaagcacataccaaggccaccacacaccacctgtccaaaaaggccttcgatacgggataatcctatttattacctcagaagtttttttcttcgcaggatttttctgagccttttaccactccagcctagcccctaccccccaattaggagggcactggcccccaacaggcatcaccccgctaaatcccctagaagtcccactcctaaacacatccgtattactcgcatcaggagtatcaatcacctgagctcaccatagtctaatagaaaacaaccgaaaccaaataattcaagcactgcttattacaattttactgggtctctattttaccctcctacaagcctcagagtacttcgagtctcccttcaccatttccgacggcatctacggctcaacattttttgtagccacaggcttccacggacttcacgtcattattggctcaactttcctcactatctgcttcatccgccaactaatatttcactttacatccaaacatcactttggcttcgaagccgccgcctgatactggcattttgtagatgtggtttgactatttctgtatgtctccatctattgatgagggtcttactcttttagtataaatagtaccgttaacttccaattaactagttttgacaacattcaaaaaagagtaataaacttcgccttaattttaataatcaacaccctcctagccttactactaataattattacattttgactaccacaactcaacggctacatagaaaaatccaccccttacgagtgcggcttcgaccctatatcccccgcccgcgtccctttctccataaaattcttcttagtagctattaccttcttattatttgatctagaaattgccctccttttacccctaccatgagccctacaaacaactaacctgccactaatagttatgtcatccctcttattaatcatcatcctagccctaagtctggcctatgagtgactacaaaaaggattagactgaaccgaattggtatatagtttaaacaaaacgaatgatttcgactcattaaattatgataatcatatttaccaaatgcccctcatttacataaatattatactagcatttaccatctcacttctaggaatactagtatatcgctcacacctcatatcctccctactatgcctagaaggaataatactatcgctgttcattatagctactctcataaccctcaacacccactccctcttagccaatattgtgcctattgccatactagtctttgccgcctgcgaagcagcggtgggcctagccctactagtctcaatctccaacacatatggcctagactacgtacataacctaaacctactccaatgctaaaactaatcgtcccaacaattatattactaccactgacatgactttccaaaaaacacataatttgaatcaacacaaccacccacagcctaattattagcatcatccctctactattttttaaccaaatcaacaacaacctatttagctgttccccaaccttttcctccgaccccctaacaacccccctcctaatactaactacctgactcctacccctcacaatcatggcaagccaacgccacttatccagtgaaccactatcacgaaaaaaactctacctctctatactaatctccctacaaatctccttaattataacattcacagccacagaactaatcatattttatatcttcttcgaaaccacacttatccccaccttggctatcatcacccgatgaggcaaccagccagaacgcctgaacgcaggcacatacttcctattctacaccctagtaggctcccttcccctactcatcgcactaatttacactcacaacaccctaggctcactaaacattctactactcactctcactgcccaagaactatcaaactcctgagccaacaacttaatatgactagcttacacaatagcttttatagtaaagatacctctttacggactccacttatgactccctaaagcccatgtcgaagcccccatcgctgggtcaatagtacttgccgcagtactcttaaaactaggcggctatggtataatacgcctcacactcattctcaaccccctgacaaaacacatagcctaccccttccttgtactatccctatgaggcataattataacaagctccatctgcctacgacaaacagacctaaaatcgctcattgcatactcttcaatcagccacatagccctcgtagtaacagccattctcatccaaaccccctgaagcttcaccggcgcagtcattctcataatcgcccacgggcttacatcctcattactattctgcctagcaaactcaaactacgaacgcactcacagtcgcatcataatcctctctcaaggacttcaaactctactcccactaatagctttttgatgacttctagcaagcctcgctaacctcgccttaccccccactattaacctactgggagaactctctgtgctagtaaccacgttctcctgatcaaatatcactctcctacttacaggactcaacatactagtcacagccctatactccctctacatatttaccacaacacaatggggctcactcacccaccacattaacaacataaaaccctcattcacacgagaaaacaccctcatgttcatacacctatcccccattctcctcctatccctcaaccccgacatcattaccgggttttcctcttgtaaatatagtttaaccaaaacatcagattgtgaatctgacaacagaggcttacgaccccttatttaccgagaaagctcacaagaactgctaactcatgcccccatgtctaacaacatggctttctcaacttttaaaggataacagctatccattggtcttaggccccaaaaattttggtgcaactccaaataaaagtaataaccatgcacactactataaccaccctaaccctgacttccctaattccccccatccttaccaccctcgttaaccctaacaaaaaaaactcatacccccattatgtaaaatccattgtcgcatccacctttattatcagtctcttccccacaacaatattcatgtgcctagaccaagaagttattatctcgaactgacactgagccacaacccaaacaacccagctctccctaagcttcaaactagactacttctccataatattcatccctgtagcattgttcgttacatggtccatcatagaattctcactgtgatatataaactcagacccaaacattaatcagttcttcaaatatctactcatcttcctaattaccatactaatcttagttaccgctaacaacctattccaactgttcatcggctgagagggcgtaggaattatatccttcttgctcatcagttgatgatacgcccgagcagatgccaacacagcagccattcaagcaatcctatacaaccgtatcggcgatatcggtttcatcctcgccttagcatgatttatcctacactccaactcatgagacccacaacaaatagcccttctaaacgctaatccaagcctcaccccactactaggcctcctcctagcagcagcaggcaaatcagcccaattaggtctccacccctgactcccctcagccatagaaggccccaccccagtctcagccctactccactcaagcactatagttgtagcaggaatcttcttactcatccgcttccaccccctagcagaaaatagcccactaatccaaactctaacactatgcttaggcgctatcaccactctgttcgcagcagtctgcgcccttacacaaaatgacatcaaaaaaatcgtagccttctccacttcaagtcaactaggactcataatagttacaatcggcatcaaccaaccacacctagcattcctgcacatctgtacccacgccttcttcaaagccatactatttatgtgctccgggtccatcatccacaaccttaacaatgaacaagatattcgaaaaataggaggactactcaaaaccatacctctcacttcaacctccctcaccattggcagcctagcattagcaggaatacctttcctcacaggtttctactccaaagaccacatcatcgaaaccgcaaacatatcatacacaaacgcctgagccctatctattactctcatcgctacctccctgacaagcgcctatagcactcgaataattcttctcaccctaacaggtcaacctcgcttccccacccttactaacattaacgaaaataaccccaccctactaaaccccattaaacgcctggcagccggaagcctattcgcaggatttctcattactaacaacatttcccccgcatcccccttccaaacaacaatccccctctacctaaaactcacagccctcgctgtcactttcctaggacttctaacagccctagacctcaactacctaaccaacaaacttaaaataaaatccccactatgcacattttatttctccaacatactcggattctaccctagcatcacacaccgcacaatcccctatctaggccttcttacgagccaaaacctgcccctactcctcctagacctaacctgactagaaaagctattacctaaaacaatttcacagcaccaaatctccacctccatcatcacctcaacccaaaaaggcataattaaactttacttcctctctttcttcttcccactcatcctaaccctactcctaatcacataacctattcccccgagcaatctcaattacaatatatacaccaacaaacaatgttcaaccagtaactactactaatcaacgcccataatcatacaaagcccccgcaccaataggatcctcccgaatcaaccctgacccctctccttcataaattattcagcttcctacactattaaagtttaccacaaccaccaccccatcatactctttcacccacagcaccaatcctacctccatcgctaaccccactaaaacactcaccaagacctcaacccctgacccccatgcctcaggatactcctcaatagccatcgctgtagtatatccaaagacaaccatcattccccctaaataaattaaaaaaactattaaacccatataacctcccccaaaattcagaataataacacacccgaccacaccgctaacaatcaatactaaacccccataaataggagaaggcttagaagaaaaccccacaaaccccattactaaacccacactcaacagaaacaaagcatacatcattattctcgcacggactacaaccacgaccaatgatatgaaaaaccatcgttgtatttcaactacaagaacaccaatgaccccaatacgcaaaactaaccccctaataaaattaattaaccactcattcatcgacctccccaccccatccaacatctccgcatgatgaaacttcggctcactccttggcgcctgcctgatcctccaaatcaccacaggactattcctagccatgcactactcaccagacgcctcaaccgccttttcatcaatcgcccacatcactcgagacgtaaattatggctgaatcatccgctaccttcacgccaatggcgcctcaatattctttatctgcctcttcctacacatcgggcgaggcctatattacggatcatttctctactcagaaacctgaaacatcggcattatcctcctgcttgcaactatagcaacagccttcataggctatgtcctcccgtgaggccaaatatcattctgaggggccacagtaattacaaacttactatccgccatcccatacattgggacagacctagttcaatgaatctgaggaggctactcagtagacagtcccaccctcacacgattctttacctttcacttcatcttgcccttcattattgcagccctagcagcactccacctcctattcttgcacgaaacgggatcaaacaaccccctaggaatcacctcccattccgataaaatcaccttccacccttactacacaatcaaagacgccctcggcttacttctcttccttctctccttaatgacattaacactattctcaccagacctcctaggcgacccagacaattataccctagccaaccccttaaacacccctccccacatcaagcccgaatgatatttcctattcgcctacacaattctccgatccgtccctaacaaactaggaggcgtccttgccctattactatccatcctcatcctagcaataatccccatcctccatatatccaaacaacaaagcataatatttcgcccactaagccaatcactttattgactcctagccgcagacctcctcattctaacctgaatcggaggacaaccagtaagctacccttttaccatcattggacaagtagcatccgtactatacttcacaacaatcctaatcctaataccaactatctccctaattgaaaacaaaatactcaaatgggcctgtccttgtagtataaattaatacaccagtcttgtaaaccggagatgaaaacctttttccaaggacaaatcagagaaaaagtctttaactccaccattagcacccaaagctaagattctaatttaaactattctctgttctttcatggggaagcagatttgggtaccacccaagtattgactcacccatcaacaaccgctatgtatttcgtacattactgccagccaccatgaatattgtacggtaccataaatacttgaccacctgtagtacataaaaacccaatccacatcaaaaccccctccccatgcttacaagcaagtacagcaatcaaccctcaactatcacacatcaactgcaactccaaagccacccctcacccactaggataccaacaaacctacccacccttaacagtacatagtacataaagccatttaccgtacatagcacattacagtcaaatcccttctcgtccccatggatgacccccctcagataggggtcccttgaccaccatcctccgtgaaatcaatatcccgcacaagagtgctactctcctcgctccgggcccataacacttgggggtagctaaagtgaactgtatccgacatctggttcctacttcagggtcataaagcctaaatagcccacacgttccccttaaataagacatcacgatg

SEQ ID NO: 521 - DNA, 16569 bp, Homo sapiens mitochondrial
  3107: "n" refers to a nucleotide at position 3107 of the Cambridge Reference Sequence (CRS, Anderson et al. 1981 Nature 290:457-465), later determined to be absent from the human mtDNA sequence according to the revised CRS (rCRS, Andrews et al. 1999 Nature Genetics 23:147); "n" therefore represents a single nucleotide deletion at a position corresponding to nucleotide 3107 of SEQ ID NO:1 as provided herein.
gatcacaggtctatcaccctattaaccactcacgggagctctccatgcatttggtattttcgtctggggggtatgcacgcgatagcattgcgagacgctggagccggagcaccctatgtcgcagtatctgtctttgattcctgcctcatcctattatttatcgcacctacgttcaatattacaggcgaacatacttactaaagtgtgttaattaattaatgcttgtaggacataataataacaattgaatgtctgcacagccactttccacacagacatcataacaaaaaatttccaccaaaccccccctcccccgcttctggccacagcacttaaacacatctctgccaaaccccaaaaacaaagaaccctaacaccagcctaaccagatttcaaattttatcttttggcggtatgcacttttaacagtcaccccccaactaacacattattttcccctcccactcccatactactaatctcatcaatacaacccccgcccatcctacccagcacacacacaccgctgctaaccccataccccgaaccaaccaaaccccaaagacaccccccacagtttatgtagcttacctcctcaaagcaatacactgaaaatgtttagacgggctcacatcaccccataaacaaataggtttggtcctagcctttctattagctcttagtaagattacacatgcaagcatccccgttccagtgagttcaccctctaaatcaccacgatcaaaagggacaagcatcaagcacgcagcaatgcagctcaaaacgcttagcctagccacacccccacgggaaacagcagtgattaacctttagcaataaacgaaagtttaactaagctatactaaccccagggttggtcaatttcgtgccagccaccgcggtcacacgattaacccaagtcaatagaagccggcgtaaagagtgttttagatcaccccctccccaataaagctaaaactcacctgagttgtaaaaaactccagttgacacaaaatagactacgaaagtggctttaacatatctgaacacacaatagctaagacccaaactgggattagataccccactatgcttagccctaaacctcaacagttaaatcaacaaaactgctcgccagaacactacgagccacagcttaaaactcaaaggacctggcggtgcttcatatccctctagaggagcctgttctgtaatcgataaaccccgatcaacctcaccacctcttgctcagcctatataccgccatcttcagcaaaccctgatgaaggctacaaagtaagcgcaagtacccacgtaaagacgttaggtcaaggtgtagcccatgaggtggcaagaaatgggctacattttctaccccagaaaactacgatagcccttatgaaacttaagggtcgaaggtggatttagcagtaaactgagagtagagtgcttagttgaacagggccctgaagcgcgtacacaccgcccgtcaccctcctcaagtatacttcaaaggacatttaactaaaacccctacgcatttatatagaggagacaagtcgtaacatggtaagtgtactggaaagtgcacttggacgaaccagagtgtagcttaacacaaagcacccaacttacacttaggagatttcaacttaacttgaccgctctgagctaaacctagccccaaacccactccaccttactaccagacaaccttagccaaaccatttacccaaataaagtataggcgatagaaattgaaacctggcgcaatagatatagtaccgcaagggaaagatgaaaaattataaccaagcataatatagcaaggactaacccctataccttctgcataatgaattaactagaaataactttgcaaggagagccaaagctaagacccccgaaaccagacgagctacctaagaacagctaaaagagcacacccgtctatgtagcaaaatagtgggaagatttataggtagaggcgacaaacctaccgagcctggtgatagctggttgtccaagatagaatcttagttcaactttaaatttgcccacagaaccctctaaatccccttgtaaatttaactgttagtccaaagaggaacagctctttggacactaggaaaaaaccttgtagagagagtaaaaaatttaacacccatagtaggcctaaaagcagccaccaattaagaaagcgttcaagctcaacacccactacctaaaaaatcccaaacatataactgaactcctcacacccaattggaccaatctatcaccctatagaagaactaatgttagtataagtaacatgaaaacattctcctccgcataagcctgcgtcagattaaaacactgaactgacaattaacagcccaatatctacaatcaaccaacaagtcattattaccctcactgtcaacccaacacaggcatgctcataaggaaaggttaaaaaaagtaaaaggaactcggcaaatcttaccccgcctgtttaccaaaaacatcacctctagcatcaccagtattagaggcaccgcctgcccagtgacacatgtttaacggccgcggtaccctaaccgtgcaaaggtagcataatcacttgttccttaaatagggacctgtatgaatggctccacgagggttcagctgtctcttacttttaaccagtgaaattgacctgcccgtgaagaggcgggcatgacacagcaagacgagaagaccctatggagctttaatttattaatgcaaacagtacctaacaaacccacaggtcctaaactaccaaacctgcattaaaaatttcggttggggcgacctcggagcagaacccaacctccgagcagtacatgctaagacttcaccagtcaaagcgaactactatactcaattgatccaataacttgaccaacggaacaagttaccctagggataacagcgcaatcctattctagagtccatatcaacaatagggtttacgacctcgatgttggatcaggacatcccgatggtgcagccgctattaaaggttcgtttgttcaacgattaaagtcctacgtgatctgagttcagaccggagtaatccaggtcggtttctatctacnttcaaattcctccctgtacgaaaggacaagagaaataaggcctacttcacaaagcgccttcccccgtaaatgatatcatctcaacttagtattatacccacacccacccaagaacagggtttgttaagatggcagagcccggtaatcgcataaaacttaaaactttacagtcagaggttcaattcctcttcttaacaacatacccatggccaacctcctactcctcattgtacccattctaatcgcaatggcattcctaatgcttaccgaacgaaaaattctaggctatatacaactacgcaaaggccccaacgttgtaggcccctacgggctactacaacccttcgctgacgccataaaactcttcaccaaagagcccctaaaacccgccacatctaccatcaccctctacatcaccgccccgaccttagctctcaccatcgctcttctactatgaacccccctccccatacccaaccccctggtcaacctcaacctaggcctcctatttattctagccacctctagcctagccgtttactcaatcctctgatcagggtgagcatcaaactcaaactacgccctgatcggcgcactgcgagcagtagcccaaacaatctcatatgaagtcaccctagccatcattctactatcaacattactaataagtggctcctttaacctctccacccttatcacaacacaagaacacctctgattactcctgccatcatgacccttggccataatatgatttatctccacactagcagagaccaaccgaacccccttcgaccttgccgaaggggagtccgaactagtctcaggcttcaacatcgaatacgccgcaggccccttcgccctattcttcatagccgaatacacaaacattattataataaacaccctcaccactacaatcttcctaggaacaacatatgacgcactctcccctgaactctacacaacatattttgtcaccaagaccctacttctaacctccctgttcttatgaattcgaacagcatacccccgattccgctacgaccaactcatacacctcctatgaaaaaacttcctaccactcaccctagcattacttatatgatatgtctccatacccattacaatctccagcattccccctcaaacctaagaaatatgtctgataaaagagttactttgatagagtaaataataggagcttaaacccccttatttctaggactatgagaatcgaacccatccctgagaatccaaaattctccgtgccacctatcacaccccatcctaaagtaaggtcagctaaataagctatcgggcccataccccgaaaatgttggttatacccttcccgtactaattaatcccctggcccaacccgtcatctactctaccatctttgcaggcacactcatcacagcgctaagctcgcactgattttttacctgagtaggcctagaaataaacatactagcttttattccagttctaaccaaaaaaataaaccctcgttccacagaagctgccatcaagtatttcctcacgcaagcaaccgcatccataatccttctaatagctatcctcttcaacaatatactctccggacaatgaaccataaccaatactaccaatcaatactcatcattaataatcataatggctatagcaataaaactaggaatagccccctttcacttctgagtcccagaggttacccaaggcacccctctgacatccggcctgcttcttctcacatgacaaaaactagcccccatctcaatcatataccaaatctctccctcactaaacgtaagccttctcctcactctctcaatcttatccatcatagcaggcagttgaggtggattaaaccaaacccagctacgcaaaatcttagcatactcctcaattacccacataggatgaataatagcagttctaccgtacaaccctaacataaccattcttaatttaactatttatattatcctaactactaccgcattcctactactcaacttaaactccagcaccacgaccctactactatctcgcacctgaaacaagctaacatgactaacacccttaattccatccaccctcctctccctaggaggcctgcccccgctaaccggctttttgcccaaatgggccattatcgaagaattcacaaaaaacaatagcctcatcatccccaccatcatagccaccatcaccctccttaacctctacttctacctacgcctaatctactccacctcaatcacactactccccatatctaacaacgtaaaaataaaatgacagtttgaacatacaaaacccaccccattcctccccacactcatcgcccttaccacgctactcctacctatctccccttttatactaataatcttatagaaatttaggttaaatacagaccaagagccttcaaagccctcagtaagttgcaatacttaatttctgtaacagctaaggactgcaaaaccccactctgcatcaactgaacgcaaatcagccactttaattaagctaagcccttactagaccaatgggacttaaacccacaaacacttagttaacagctaagcaccctaatcaactggcttcaatctacttctcccgccgccgggaaaaaaggcgggagaagccccggcaggtttgaagctgcttcttcgaatttgcaattcaatatgaaaatcacctcggagctggtaaaaagaggcctaacccctgtctttagatttacagtccaatgcttcactcagccattttacctcacccccactgatgttcgccgaccgttgactattctctacaaaccacaaagacattggaacactatacctattattcggcgcatgagctggagtcctaggcacagctctaagcctccttattcgagccgagctgggccagccaggcaaccttctaggtaacgaccacatctacaacgttatcgtcacagcccatgcatttgtaataatcttcttcatagtaatacccatcataatcggaggctttggcaactgactagttcccctaataatcggtgcccccgatatggcgtttccccgcataaacaacataagcttctgactcttacctccctctctcctactcctgctcgcatctgctatagtggaggccggagcaggaacaggttgaacagtctaccctcccttagcagggaactactcccaccctggagcctccgtagacctaaccatcttctccttacacctagcaggtgtctcctctatcttaggggccatcaatttcatcacaacaattatcaatataaaaccccctgccataacccaataccaaacgcccctcttcgtctgatccgtcctaatcacagcagtcctacttctcctatctctcccagtcctagctgctggcatcactatactactaacagaccgcaacctcaacaccaccttcttcgaccccgccggaggaggagaccccattctataccaacacctattctgatttttcggtcaccctgaagtttatattcttatcctaccaggcttcggaataatctcccatattgtaacttactactccggaaaaaaagaaccatttggatacataggtatggtctgagctatgatatcaattggcttcctagggtttatcgtgtgagcacaccatatatttacagtaggaatagacgtagacacacgagcatatttcacctccgctaccataatcatcgctatccccaccggcgtcaaagtatttagctgactcgccacactccacggaagcaatatgaaatgatctgctgcagtgctctgagccctaggattcatctttcttttcaccgtaggtggcctgactggcattgtattagcaaactcatcactagacatcgtactacacgacacgtactacgttgtagctcacttccactatgtcctatcaataggagctgtatttgccatcataggaggcttcattcactgatttcccctattctcaggctacaccctagaccaaacctacgccaaaatccatttcactatcatattcatcggcgtaaatctaactttcttcccacaacactttctcggcctatccggaatgccccgacgttactcggactaccccgatgcatacaccacatgaaacatcctatcatctgtaggctcattcatttctctaacagcagtaatattaataattttcatgatttgagaagccttcgcttcgaagcgaaaagtcctaatagtagaagaaccctccataaacctggagtgactatatggatgccccccaccctaccacacattcgaagaacccgtatacataaaatctagacaaaaaaggaaggaatcgaaccccccaaagctggtttcaagccaaccccatggcctccatgactttttcaaaaaggtattagaaaaaccatttcataactttgtcaaagttaaattataggctaaatcctatatatcttaatggcacatgcagcgcaagtaggtctacaagacgctacttcccctatcatagaagagcttatcacctttcatgatcacgccctcataatcattttccttatctgcttcctagtcctgtatgcccttttcctaacactcacaacaaaactaactaatactaacatctcagacgctcaggaaatagaaaccgtctgaactatcctgcccgccatcatcctagtcctcatcgccctcccatccctacgcatcctttacataacagacgaggtcaacgatccctcccttaccatcaaatcaattggccaccaatggtactgaacctacgagtacaccgactacggcggactaatcttcaactcctacatacttcccccattattcctagaaccaggcgacctgcgactccttgacgttgacaatcgagtagtactcccgattgaagcccccattcgtataataattacatcacaagacgtcttgcactcatgagctgtccccacattaggcttaaaaacagatgcaattcccggacgtctaaaccaaaccactttcaccgctacacgaccgggggtatactacggtcaatgctctgaaatctgtggagcaaaccacagtttcatgcccatcgtcctagaattaattcccctaaaaatctttgaaatagggcccgtatttaccctatagcaccccctctaccccctctagagcccactgtaaagctaacttagcattaaccttttaagttaaagattaagagaaccaacacctctttacagtgaaatgccccaactaaatactaccgtatggcccaccataattacccccatactccttacactattcctcatcacccaactaaaaatattaaacacaaactaccacctacctccctcaccaaagcccataaaaataaaaaattataacaaaccctgagaaccaaaatgaacgaaaatctgttcgcttcattcattgcccccacaatcctaggcctacccgccgcagtactgatcattctatttccccctctattgatccccacctccaaatatctcatcaacaaccgactaatcaccacccaacaatgactaatcaaactaacctcaaaacaaatgataaccatacacaacactaaaggacgaacctgatctcttatactagtatccttaatcatttttattgccacaactaacctcctcggactcctgcctcactcatttacaccaaccacccaactatctataaacctagccatggccatccccttatgagcgggcgcagtgattataggctttcgctctaagattaaaaatgccctagcccacttcttaccacaaggcacacctacaccccttatccccatactagttattatcgaaaccatcagcctactcattcaaccaatagccctggccgtacgcctaaccgctaacattactgcaggccacctactcatgcacctaattggaagcgccaccctagcaatatcaaccattaaccttccctctacacttatcatcttcacaattctaattctactgactatcctagaaatcgctgtcgccttaatccaagcctacgttttcacacttctagtaagcctctacctgcacgacaacacataatgacccaccaatcacatgcctatcatatagtaaaacccagcccatgacccctaacaggggccctctcagccctcctaatgacctccggcctagccatgtgatttcacttccactccataacgctcctcatactaggcctactaaccaacacactaaccatataccaatgatggcgcgatgtaacacgagaaagcacataccaaggccaccacacaccacctgtccaaaaaggccttcgatacgggataatcctatttattacctcagaagtttttttcttcgcaggatttttctgagccttttaccactccagcctagcccctaccccccaattaggagggcactggcccccaacaggcatcaccccgctaaatcccctagaagtcccactcctaaacacatccgtattactcgcatcaggagtatcaatcacctgagctcaccatagtctaatagaaaacaaccgaaaccaaataattcaagcactgcttattacaattttactgggtctctattttaccctcctacaagcctcagagtacttcgagtctcccttcaccatttccgacggcatctacggctcaacattttttgtagccacaggcttccacggacttcacgtcattattggctcaactttcctcactatctgcttcatccgccaactaatatttcactttacatccaaacatcactttggcttcgaagccgccgcctgatactggcattttgtagatgtggtttgactatttctgtatgtctccatctattgatgagggtcttactcttttagtataaatagtaccgttaacttccaattaactagttttgacaacattcaaaaaagagtaataaacttcgccttaattttaataatcaacaccctcctagccttactactaataattattacattttgactaccacaactcaacggctacatagaaaaatccaccccttacgagtgcggcttcgaccctatatcccccgcccgcgtccctttctccataaaattcttcttagtagctattaccttcttattatttgatctagaaattgccctccttttacccctaccatgagccctacaaacaactaacttgccactaatagttatgtcatccctcttattaatcatcatcctagccctaagtctggcctatgagtgactacaaaaaggattagactgaaccgaattggtatatagtttaaacaaaacgaatgatttcgactcattaaattatgataatcatatttaccaaatgcccctcatttacataaatattatactagcatttaccatctcacttctaggaatactagtatatcgctcacacctcatatcctccctactatgcctagaaggaataatactatcgctgttcattatagctactctcataaccctcaacacccactccctcttagccaatattgtgcctattgccatactagtctttgccgcctgcgaagcagcggtgggcctagccctactagtctcaatctccaacacatatggcctagactacgtacataacctaaacctactccaatgctaaaactaatcgtcccaacaattatattactaccactgacatgactttccaaaaaacacataatttgaatcaacacaaccacccacagcctaattattagcatcatccctctactattttttaaccaaatcaacaacaacctatttagctgttccccaaccttttcctccgaccccctaacaacccccctcctaatactaactacctgactcctacccctcacaatcatggcaagccaacgccacttatccagtgaaccactatcacgaaaaaaactctacctctctatactaatctccctacaaatctccttaattataacattcacagccacagaactaatcatattttatatcttcttcgaaaccacacttatccccaccttggctatcatcacccgatgaggcaaccagccagaacgcctgaacgcaggcacatacttcctattctacaccctagtaggctcccttcccctactcatcgcactaatttacactcacaacaccctaggctcactaaacattctactactcactctcactgcccaagaactatcaaactcctgagccaacaacttaatatgactagcttacacaatagcttttatagtaaagatacctctttacggactccacttatgactccctaaagcccatgtcgaagcccccatcgctgggtcaatagtacttgccgcagtactcttaaaactaggcggctatggtataatacgcctcacactcattctcaaccccctgacaaaacacatagcctaccccttccttgtactatccctatgaggcataattataacaagctccatctgcctacgacaaacagacctaaaatcgctcattgcatactcttcaatcagccacatagccctcgtagtaacagccattctcatccaaaccccctgaagcttcaccggcgcagtcattctcataatcgcccacgggcttacatcctcattactattctgcctagcaaactcaaactacgaacgcactcacagtcgcatcataatcctctctcaaggacttcaaactctactcccactaatagctttttgatgacttctagcaagcctcgctaacctcgccttaccccccactattaacctactgggagaactctctgtgctagtaaccacgttctcctgatcaaatatcactctcctacttacaggactcaacatactagtcacagccctatactccctctacatatttaccacaacacaatggggctcactcacccaccacattaacaacataaaaccctcattcacacgagaaaacaccctcatgttcatacacctatcccccattctcctcctatccctcaaccccgacatcattaccgggttttcctcttgtaaatatagtttaaccaaaacatcagattgtgaatctgacaacagaggcttacgaccccttatttaccgagaaagctcacaagaactgctaactcatgcccccatgtctaacaacatggctttctcaacttttaaaggataacagctatccattggtcttaggccccaaaaattttggtgcaactccaaataaaagtaataaccatgcacactactataaccaccctaaccctgacttccctaattccccccatccttaccaccctcgttaaccctaacaaaaaaaactcatacccccattatgtaaaatccattgtcgcatccacctttattatcagtctcttccccacaacaatattcatgtgcctagaccaagaagttattatctcgaactgacactgagccacaacccaaacaacccagctctccctaagcttcaaactagactacttctccataatattcatccctgtagcattgttcgttacatggtccatcatagaattctcactgtgatatataaactcagacccaaacattaatcagttcttcaaatatctactcatcttcctaattaccatactaatcttagttaccgctaacaacctattccaactgttcatcggctgagagggcgtaggaattatatccttcttgctcatcagttgatgatacgcccgagcagatgccaacacagcagccattcaagcaatcctatacaaccgtatcggcgatatcggtttcatcctcgccttagcatgatttatcctacactccaactcatgagacccacaacaaatagcccttctaaacgctaatccaagcctcaccccactactaggcctcctcctagcagcagcaggcaaatcagcccaattaggtctccacccctgactcccctcagccatagaaggccccaccccagtctcagccctactccactcaagcactatagttgtagcaggaatcttcttactcatccgcttccaccccctagcagaaaatagcccactaatccaaactctaacactatgcttaggcgctatcaccactctgttcgcagcagtctgcgcccttacacaaaatgacatcaaaaaaatcgtagccttctccacttcaagtcaactaggactcataatagttacaatcggcatcaaccaaccacacctagcattcctgcacatctgtacccacgccttcttcaaagccatactatttatgtgctccgggtccatcatccacaaccttaacaatgaacaagatattcgaaaaataggaggactactcaaaaccatacctctcacttcaacctccctcaccattggcagcctagcattagcaggaatacctttcctcacaggtttctactccaaagaccacatcatcgaaaccgcaaacatatcatacacaaacgcctgagccctatctattactctcatcgctacctccctgacaagcgcctatagcactcgaataattcttctcaccctaacaggtcaacctcgcttccccacccttactaacattaacgaaaataaccccaccctactaaaccccattaaacgcctggcagccggaagcctattcgcaggatttctcattactaacaacatttcccccgcatcccccttccaaacaacaatccccctctacctaaaactcacagccctcgctgtcactttcctaggacttctaacagccctagacctcaactacctaaccaacaaacttaaaataaaatccccactatgcacattttatttctccaacatactcggattctaccctagcatcacacaccgcacaatcccctatctaggccttcttacgagccaaaacctgcccctactcctcctagacctaacctgactagaaaagctattacctaaaacaatttcacagcaccaaatctccacctccatcatcacctcaacccaaaaaggcataattaaactttacttcctctctttcttcttcccactcatcctaaccctactcctaatcacataacctattcccccgagcaatctcaattacaatatatacaccaacaaacaatgttcaaccagtaactactactaatcaacgcccataatcatacaaagcccccgcaccaataggatcctcccgaatcaaccctgacccctctccttcataaattattcagcttcctacactattaaagtttaccacaaccaccaccccatcatactctttcacccacagcaccaatcctacctccatcgctaaccccactaaaacactcaccaagacctcaacccctgacccccatgcctcaggatactcctcaatagccatcgctgtagtatatccaaagacaaccatcattccccctaaataaattaaaaaaactattaaacccatataacctcccccaaaattcagaataataacacacccgaccacaccgctaacaatcaatactaaacccccataaataggagaaggcttagaagaaaaccccacaaaccccattactaaacccacactcaacagaaacaaagcatacatcattattctcgcacggactacaaccacgaccaatgatatgaaaaaccatcgttgtatttcaactacaagaacaccaatgaccccaatacgcaaaactaaccccctaataaaattaattaaccactcattcatcgacctccccaccccatccaacatctccgcatgatgaaacttcggctcactccttggcgcctgcctgatcctccaaatcaccacaggactattcctagccatgcactactcaccagacgcctcaaccgccttttcatcaatcgcccacatcactcgagacgtaaattatggctgaatcatccgctaccttcacgccaatggcgcctcaatattctttatctgcctcttcctacacatcgggcgaggcctatattacggatcatttctctactcagaaacctgaaacatcggcattatcctcctgcttgcaactatagcaacagccttcataggctatgtcctcccgtgaggccaaatatcattctgaggggccacagtaattacaaacttactatccgccatcccatacattgggacagacctagttcaatgaatctgaggaggctactcagtagacagtcccaccctcacacgattctttacctttcacttcatcttgcccttcattattgcagccctagcagcactccacctcctattcttgcacgaaacgggatcaaacaaccccctaggaatcacctcccattccgataaaatcaccttccacccttactacacaatcaaagacgccctcggcttacttctcttccttctctccttaatgacattaacactattctcaccagacctcctaggcgacccagacaattataccctagccaaccccttaaacacccctccccacatcaagcccgaatgatatttcctattcgcctacacaattctccgatccgtccctaacaaactaggaggcgtccttgccctattactatccatcctcatcctagcaataatccccatcctccatatatccaaacaacaaagcataatatttcgcccactaagccaatcactttattgactcctagccgcagacctcctcattctaacctgaatcggaggacaaccagtaagctacccttttaccatcattggacaagtagcatccgtactatacttcacaacaatcctaatcctaataccaactatctccctaattgaaaacaaaatactcaaatgggcctgtccttgtagtataaattaatacaccagtcttgtaaaccggagatgaaaacctttttccaaggacaaatcagagaaaaagtctttaactccaccattagcacccaaagctaagattctaatttaaactattctctgttctttcatggggaagcagatttgggtaccacccaagtattgactcacccatcaacaaccgctatgtatttcgtacattactgccagccaccatgaatattgtacggtaccataaatacttgaccacctgtagtacataaaaacccaatccacatcaaaaccccctccccatgcttacaagcaagtacagcaatcaaccctcaactatcacacatcaactgcaactccaaagccacccctcacccactaggataccaacaaacctacccacccttaacagtacatagtacataaagccatttaccgtacatagcacattacagtcaaatcccttctcgtccccatggatgacccccctcagataggggtcccttgaccaccatcctccgtgaaatcaatatcccgcacaagagtgctactctcctcgctccgggcccataacacttgggggtagctaaagtgaactgtatccgacatctggttcctacttcagggtcataaagcctaaatagcccacacgttccccttaaataagacatcacgatg

SEQ ID NO: 522 - DNA, 16569 bp, Homo sapiens mitochondrial
  3107: "n" refers to a nucleotide at position 3107 of the Cambridge Reference Sequence (CRS, Anderson et al. 1981 Nature 290:457-465), later determined to be absent from the human mtDNA sequence according to the revised CRS (rCRS, Andrews et al. 1999 Nature Genetics 23:147); "n" therefore represents a single nucleotide deletion at a position corresponding to nucleotide 3107 of SEQ ID NO:1 as provided herein.
gatcacaggtctatcaccctattaaccactcacgggagctctccatgcatttggtattttcgtctggggggtatgcacgcgatagcattgcgagacgctggagccggagcaccctatgtcgcagtatctgtctttgattcctgcctcatcctattatttatcgcacctacgttcaatattacaggcgaacatacttactaaagtgtgttaattaattaatgcttgtaggacataataataacaattgaatgtctgcacagccactttccacacagacatcataacaaaaaatttccaccaaaccccccctcccccgcttctggccacagcacttaaacacatctctgccaaaccccaaaaacaaagaaccctaacaccagcctaaccagatttcaaattttatcttttggcggtatgcacttttaacagtcaccccccaactaacacattattttcccctcccactcccatactactaatctcatcaatacaacccccgcccatcctacccagcacacacacaccgctgctaaccccataccccgaaccaaccaaaccccaaagacaccccccacagtttatgtagcttacctcctcaaagcaatacactgaaaatgtttagacgggctcacatcaccccataaacaaataggtttggtcctagcctttctattagctcttagtaagattacacatgcaagcatccccgttccagtgagttcaccctctaaatcaccacgatcaaaagggacaagcatcaagcacgcagcaatgcagctcaaaacgcttagcctagccacacccccacgggaaacagcagtgattaacctttagcaataaacgaaagtttaactaagctatactaaccccagggttggtcaatttcgtgccagccaccgcggtcacacgattaacccaagtcaatagaagccggcgtaaagagtgttttagatcaccccctccccaataaagctaaaactcacctgagttgtaaaaaactccagttgacacaaaatagactacgaaagtggctttaacatatctgaacacacaatagctaagacccaaactgggattagataccccactatgcttagccctaaacctcaacagttaaatcaacaaaactgctcgccagaacactacgagccacagcttaaaactcaaaggacctggcggtgcttcatatccctctagaggagcctgttctgtaatcgataaaccccgatcaacctcaccacctcttgctcagcctatataccgccatcttcagcaaaccctgatgaaggctacaaagtaagcgcaagtacccacgtaaagacgttaggtcaaggtgtagcccatgaggtggcaagaaatgggctacattttctaccccagaaaactacgatagcccttatgaaacttaagggtcgaaggtggatttagcagtaaactgagagtagagtgcttagttgaacagggccctgaagcgcgtacacaccgcccgtcaccctcctcaagtatacttcaaaggacatttaactaaaacccctacgcatttatatagaggagacaagtcgtaacatggtaagtgtactggaaagtgcacttggacgaaccagagtgtagcttaacacaaagcacccaacttacacttaggagatttcaacttaacttgaccgctctgagctaaacctagccccaaacccactccaccttactaccagacaaccttagccaaaccatttacccaaataaagtataggcgatagaaattgaaacctggcgcaatagatatagtaccgcaagggaaagatgaaaaattataaccaagcataatatagcaaggactaacccctataccttctgcataatgaattaactagaaataactttgcaaggagagccaaagctaagacccccgaaaccagacgagctacctaagaacagctaaaagagcacacccgtctatgtagcaaaatagtgggaagatttataggtagaggcgacaaacctaccgagcctggtgatagctggttgtccaagatagaatcttagttcaactttaaatttgcccacagaaccctctaaatccccttgtaaatttaactgttagtccaaagaggaacagctctttggacactaggaaaaaaccttgtagagagagtaaaaaatttaacacccatagtaggcctaaaagcagccaccaattaagaaagcgttcaagctcaacacccactacctaaaaaatcccaaacatataactgaactcctcacacccaattggaccaatctatcaccctatagaagaactaatgttagtataagtaacatgaaaacattctcctccgcataagcctgcgtcagattaaaacactgaactgacaattaacagcccaatatctacaatcaaccaacaagtcattattaccctcactgtcaacccaacacaggcatgctcataaggaaaggttaaaaaaagtaaaaggaactcggcaaatcttaccccgcctgtttaccaaaaacatcacctctagcatcaccagtattagaggcaccgcctgcccagtgacacatgtttaacggccgcggtaccctaaccgtgcaaaggtagcataatcacttgttccttaaatagggacctgtatgaatggctccacgagggttcagctgtctcttacttttaaccagtgaaattgacctgcccgtgaagaggcgggcatgacacagcaagacgagaagaccctatggagctttaatttattaatgcaaacagtacctaacaaacccacaggtcctaaactaccaaacctgcattaaaaatttcggttggggcgacctcggagcagaacccaacctccgagcagtacatgctaagacttcaccagtcaaagcgaactactatactcaattgatccaataacttgaccaacggaacaagttaccctagggataacagcgcaatcctattctagagtccatatcaacaatagggtttacgacctcgatgttggatcaggacatcccgatggtgcagccgctattaaaggttcgtttgttcaacgattaaagtcctacgtgatctgagttcagaccggagtaatccaggtcggtttctatctacnttcaaattcctccctgtacgaaaggacaagagaaataaggcctacttcacaaagcgccttcccccgtaaatgatatcatctcaacttagtattatacccacacccacccaagaacagggtttgttaagatggcagagcccggtaatcgcataaaacttaaaactttacagtcagaggttcaattcctcttcttaacaacatacccatggccaacctcctactcctcattgtacccattctaatcgcaatggcattcctaatgcttaccgaacgaaaaattctaggctatatacaactacgcaaaggccccaacgttgtaggcccctacgggctactacaacccttcgctgacgccataaaactcttcaccaaagagcccctaaaacccgccacatctaccatcaccctctacatcaccgccccgaccttagctctcaccatcgctcttctactatgaacccccctccccatacccaaccccctggtcaacctcaacctaggcctcctattcattctagccacctctagcctagccgtttactcaatcctctgatcagggtgagcatcaaactcaaactacgccctgatcggcgcactgcgagcagtagcccaaacaatctcatatgaagtcaccctagccatcattctactatcaacattactaataagtggctcctttaacctctccacccttatcacaacacaagaacacctctgattactcctgccatcatgacccttggccataatatgatttatctccacactagcagagaccaaccgaacccccttcgaccttgccgaaggggagtccgaactagtctcaggcttcaacatcgaatacgccgcaggccccttcgccctattcttcatagccgaatacacaaacattattataataaacaccctcaccactacaatcttcctaggaacaacatatgacgcactctcccctgaactctacacaacatattttgtcaccaagaccctacttctaacctccctgttcttatgaattcgaacagcatacccccgattccgctacgaccaactcatacacctcctatgaaaaaacttcctaccactcaccctagcattacttatatgatatgtctccatacccattacaatctccagcattccccctcaaacctaagaaatatgtctgataaaagagttactttgatagagtaaataataggagcttaaacccccttatttctaggactatgagaatcgaacccatccctgagaatccaaaattctccgtgccacctatcacaccccatcctaaagtaaggtcagctaaataagctatcgggcccataccccgaaaatgttggttatacccttcccgtactaattaatcccctggcccaacccgtcatctactctaccatctttgcaggcacactcatcacagcgctaagctcgcactgattttttacctgagtaggcctagaaataaacatgctagcttttattccagttctaaccaaaaaaataaaccctcgttccacagaagctgccatcaagtatttcctcacgcaagcaaccgcatccataatccttctaatagctatcctcttcaacaatatactctccggacaatgaaccataaccaatactaccaatcaatactcatcattaataatcataatggctatagcaataaaactaggaatagccccctttcacttctgagtcccagaggttacccaaggcacccctctgacatccggcctgcttcttctcacatgacaaaaactagcccccatctcaatcatataccaaatctctccctcactaaacgtaagccttctcctcactctctcaatcttatccatcatagcaggcagttgaggtggattaaaccaaacccagctacgcaaaatcttagcatactcctcaattacccacataggatgaataatagcagttctaccgtacaaccctaacataaccattcttaatttaactatttatattatcctaactactaccgcattcctactactcaacttaaactccagcaccacgaccctactactatctcgcacctgaaacaagctaacatgactaacacccttaattccatccaccctcctctccctaggaggcctgcccccgctaaccggctttttgcccaaatgggccattatcgaagaattcacaaaaaacaatagcctcatcatccccaccatcatagccaccatcaccctccttaacctctacttctacctacgcctaatctactccacctcaatcacactactccccatatctaacaacgtaaaaataaaatgacagtttgaacatacaaaacccaccccattcctccccacactcatcgcccttaccacgctactcctacctatctccccttttatactaataatcttatagaaatttaggttaaatacagaccaagagccttcaaagccctcagtaagttgcaatacttaatttctgtaacagctaaggactgcaaaaccccactctgcatcaactgaacgcaaatcagccactttaattaagctaagcccttactagaccaatgggacttaaacccacaaacacttagttaacagctaagcaccctaatcaactggcttcaatctacttctcccgccgccgggaaaaaaggcgggagaagccccggcaggtttgaagctgcttcttcgaatttgcaattcaatatgaaaatcacctcggagctggtaaaaagaggcctaacccctgtctttagatttacagtccaatgcttcactcagccattttacctcacccccactgatgttcgccgaccgttgactattctctacaaaccacaaagacattggaacactatacctattattcggcgcatgagctggagtcctaggcacagctctaagcctccttattcgagccgagctgggccagccaggcaaccttctaggtaacgaccacatctacaacgttatcgtcacagcccatgcatttgtaataatcttcttcatagtaatacccatcataatcggaggctttggcaactgactagttcccctaataatcggtgcccccgatatggcgtttccccgcataaacaacataagcttctgactcttacctccctctctcctactcctgctcgcatctgctatagtggaggccggggcaggaacaggttgaacagtctaccctcccttagcagggaactactcccaccctggagcctccgtagacctaaccatcttctccttacacctagcaggtgtctcctctatcttaggggccatcaatttcatcacaacaattatcaatataaaaccccctgccataacccaataccaaacacccctcttcgtctgatccgtcctaatcacagcagtcctacttctcctatctctcccagtcctagctgctggcatcactatactactaacagaccgcaacctcaacaccaccttcttcgaccccgccggaggaggagaccccattctataccaacacctattctgatttttcggtcaccctgaagtttatattcttatcctaccaggcttcggaataatctcccatattgtaacttactactccggaaaaaaagaaccatttggatacataggtatggtctgagctatgatatcaattggcttcctagggtttatcgtgtgagcacaccatatatttacagtaggaatagacgtagacacacgagcatatttcacctccgctaccataatcatcgctatccccaccggcgtcaaagtatttagctgactcgccacactccacggaagcaatatgaaatgatctgctgcagtgctctgagccctaggattcatctttcttttcaccgtaggtggcctgactggcattgtattagcaaactcatcactagacatcgtactacacgacacgtactacgttgtagctcacttccactatgtcctatcaataggagctgtatttgccatcataggaggcttcattcactgatttcccctattctcaggctacaccctagaccaaacctacgccaaaatccatttcactatcatattcatcggcgtaaatctaactttcttcccacaacactttctcggcctatccggaatgccccgacgttactcggactaccccgatgcatacaccacatgaaacatcctatcatctgtaggctcattcatttctctaacagcagtaatattaataattttcatgatttgagaagccttcgcttcgaagcgaaaagtcctaatagtagaagaaccctccataaacctggagtgactatatggatgccccccaccctaccacacattcgaagaacccgtatacataaaatctagacaaaaaaggaaggaatcgaaccccccaaagctggtttcaagccaaccccatggcctccatgactttttcaaaaaggtattagaaaaaccatttcataactttgtcaaagttaaattataggctaaatcctatatatcttaatggcacatgcagcgcaagtaggtctacaagacgctacttcccctatcatagaagagcttatcacctttcatgatcacgccctcataatcattttccttatctgcttcctagtcctgtatgcccttttcctaacactcacaacaaaactaactaatactaacatctcagacgctcaggaaatagaaaccgtctgaactatcctgcccgccatcatcctagtcctcatcgccctcccatccctacgcatcctttacataacagacgaggtcaacgatccctcccttaccatcaaatcaattggccaccaatggtactgaacctacgagtacaccgactacggcggactaatcttcaactcctacatacttcccccattattcctagaaccaggcgacctgcgactccttgacgttgacaatcgagtagtactcccgattgaagcccccattcgtataataattacatcacaagacgtcttgcactcatgagctgtccccacattaggcttaaaaacagatgcaattcccggacgtctaaaccaaaccactttcaccgctacacgaccgggggtatactacggtcaatgctctgaaatctgtggagcaaaccacagtttcatgcccatcgtcctagaattaattcccctaaaaatctttgaaatagggcccgtatttaccctatagcaccccctctaccccctctagagcccactgtaaagctaacttagcattaaccttttaagttaaagattaagagaaccaacacctctttacagtgaaatgccccaactaaatactaccgtatggcccaccataattacccccatactccttacactattcctcatcacccaactaaaaatattaaacacaaactaccacctacctccctcaccaaagcccataaaaataaaaaattataacaaaccctgagaaccaaaatgaacgaaaatctgttcgcttcattcattgcccccacaatcctaggcctacccgccgcagtactgatcattctatttccccctctattgatccccacctccaaatatctcatcaacaaccgactaatcaccacccaacaatgactaatcaaactaacctcaaaacaaatgataaccatacacaacactaaaggacgaacctgatctcttatactagtatccttaatcatttttattgccacaactaacctcctcggactcctgcctcactcatttacaccaaccacccaactatctataaacctagccatggccatccccttatgagcgggcgcagtgattataggctttcgctctaagattaaaaatgccctagcccacttcttaccacaaggcacacctacaccccttatccccatactagttattatcgaaaccatcagcctactcattcaaccaatagccctggccgtacgcctaaccgctaacattactgcaggccacctactcatgcacctaattggaagcgccaccctagcaatatcaaccattaaccttccctctacacttatcatcttcacaattctaattctactgactatcctagaaatcgctgtcgccttaatccaagcctacgttttcacacttctagtaagcctctacctgcacgacaacacataatgacccaccaatcacatgcctatcatatagtaaaacccagcccatgacccctaacaggggccctctcagccctcctaatgacctccggcctagccatgtgatttcacttccactccataacgctcctcatactaggcctactaaccaacacactaaccatataccaatgatggcgcgatgtaacacgagaaagcacataccaaggccaccacacaccacctgtccaaaaaggccttcgatacgggataatcctatttattacctcagaagtttttttcttcgcaggatttttctgagccttttaccactccagcctagcccctaccccccaattaggagggcactggcccccaacaggcatcaccccgctaaatcccctagaagtcccactcctaaacacatccgtattactcgcatcaggagtatcaatcacctgagctcaccatagtctaatagaaaacaaccgaaaccaaataattcaagcactgcttattacaattttactgggtctctattttaccctcctacaagcctcagagtacttcgagtctcccttcaccatttccgacggcatctacggctcaacattttttgtagccacaggcttccacggacttcacgtcattattggctcaactttcctcactatctgcttcatccgccaactaatatttcactttacatccaaacatcactttggcttcgaagccgccgcctgatactggcattttgtagatgtggtttgactatttctgtatgtctccatctattgatgagggtcttactcttttagtataaatagtaccgttaacttccaattaactagttttgacaacattcaaaaaagagtaataaacttcgccttaattttaataatcaacaccctcctagccttactactaataattattacattttgactaccacaactcaacggctacatagaaaaatccaccccttacgagtgcggcttcgaccctatatcccccgcccgcgtccctttctccataaaattcttcttagtagctattaccttcttattatttgatctagaaattgccctccttttacccctaccatgagccctacaaacaactaacctgccactaatagttatgtcatccctcttattaatcatcatcctagccctaagtctggcctatgagtgactacaaaaaggattagactgaaccgaattggtatatagtttaaacaaaacgaatgatttcgactcattaaattatgataatcatatttaccaaatgcccctcatttacataaatattatactagcatttaccatctcacttctaggaatactagtatatcgctcacacctcatatcctccctactatgcctagaaggaataatactatcgctgttcattatagctactctcataaccctcaacacccactccctcttagccaatattgtgcctattgccatactagtctttgccgcctgcgaagcagcggtgggcctagccctactagtctcaatctccaacacatatggcctagactacgtacataacctaaacctactccaatgctaaaactaatcgtcccaacaattatattactaccactgacatgactttccaaaaaacacataatttgaatcaacacaaccacccacagcctaattattagcatcatccctctactattttttaaccaaatcaacaacaacctatttagctgttccccaaccttttcctccgaccccctaacaacccccctcctaatactaactacctgactcctacccctcacaatcatggcaagccaacgccacttatccagtgaaccactatcacgaaaaaaactctacctctctatactaatctccctacaaatctccttaattataacattcacagccacagaactaatcatattttatatcttcttcgaaaccacacttatccccaccttggctatcatcacccgatgaggcaaccagccagaacgcctgaacgcaggcacatacttcctattctacaccctagtaggctcccttcccctactcatcgcactaatttacactcacaacaccctaggctcactaaacattctactactcactctcactgcccaagaactatcaaactcctgagccaacaacttaatatgactagcttacacaatagcttttatagtaaagatacctctttacggactccacttatgactccctaaagcccatgtcgaagcccccatcgctgggtcaatagtacttgccgcagtactcttaaaactaggcggctatggtataatacgcctcacactcattctcaaccccctgacaaaacacatagcctaccccttccttgtactatccctatgaggcataattataacaagctccatctgcctacgacaaacagacctaaaatcgctcattgcatactcttcaatcagccacatagccctcgtagtaacagccattctcatccaaaccccctgaagcttcaccggcgcagtcattctcataatcgcccacgggcttacatcctcattactattctgcctagcaaactcaaactacgaacgcactcacagtcgcatcataatcctctctcaaggacttcaaactctactcccactaatagctttttgatgacttctagcaagcctcgctaacctcgccttaccccccactattaacctactgggagaactctctgtgctagtaaccacgttctcctgatcaaatatcactctcctacttacaggactcaacatactagtcacagccctatactccctctacatatttaccacaacacaatggggctcactcacccaccacattaacaacataaaaccctcattcacacgagaaaacaccctcatgttcatacacctatcccccattctcctcctatccctcaaccccgacatcattaccgggttttcctcttgtaaatatagtttaaccaaaacatcagattgtgaatctgacaacagaggcttacgaccccttatttaccgagaaagctcacaagaactgctaactcatgcccccatgtctaacaacatggctttctcaacttttaaaggataacagctatccattggtcttaggccccaaaaattttggtgcaactccaaataaaagtaataaccatgcacactactataaccaccctaaccctgacttccctaattccccccatccttaccaccctcgttaaccctaacaaaaaaaactcatacccccattatgtaaaatccattgtcgcatccacctttattatcagtctcttccccacaacaatattcatgtgcctagaccaagaagttattatctcgaactgacactgagccacaacccaaacaacccagctctccctaagcttcaaactagactacttctccataatattcatccctgtagcattgttcgttacatggtccatcatagaattctcactgtgatatataaactcagacccaaacattaatcagttcttcaaatatctactcatcttcctaattaccatactaatcttagttaccgctaacaacctattccaactgttcatcggctgagagggcgtaggaattatatccttcttgctcatcagttgatgatacgcccgagcagatgccaacacagcagccattcaagcaatcctatacaaccgtatcggcgatatcggtttcatcctcgccttagcatgatttatcctacactccaactcatgagacccacaacaaatagcccttctaaacgctaatccaagcctcaccccactactaggcctcctcctagcagcagcaggcaaatcagcccaattaggtctccacccctgactcccctcagccatagaaggccccaccccagtctcagccctactccactcaagcactatagttgtagcaggaatcttcttactcatccgcttccaccccctagcagaaaatagcccactaatccaaactctaacactatgcttaggcgctatcaccactctgttcgcagcagtctgcgcccttacacaaaatgacatcaaaaaaatcgtagccttctccacttcaagtcaactaggactcataatagttacaatcggcatcaaccaaccacacctagcattcctgcacatctgtacccacgccttcttcaaagccatactatttatgtgctccgggtccatcatccacaaccttaacaatgaacaagatattcgaaaaataggaggactactcaaaaccatacctctcacttcaacctccctcaccattggcagcctagcattagcaggaatacctttcctcacaggtttctactccaaagaccacatcatcgaaaccgcaaacatatcatacacaaacgcctgagccctatctattactctcatcgctacctccctgacaagcgcctatagcactcgaataattcttctcaccctaacaggtcaacctcgcttccccacccttactaacattaacgaaaataaccccaccctactaaaccccattaaacgcctggcagccggaagcctattcgcaggatttctcattactaacaacatttcccccgcatcccccttccaaacaacaatccccctctacctaaaactcacagccctcgctgtcactttcctaggacttctaacagccctagacctcaactacctaaccaacaaacttaaaataaaatccccactatgcacattttatttctccaacatactcggattctaccctagcatcacacaccgcacaatcccctatctaggccttcttacgagccaaaacctgcccctactcctcctagacctaacctgactagaaaagctattacctaaaacaatttcacagcaccaaatctccacctccatcatcacctcaacccaaaaaggcataattaaactttacttcctctctttcttcttcccactcatcctaaccctactcctaatcacataacctattcccccgagcaatctcaattacaatatatacaccaacaaacaatgttcaaccagtaactactactaatcaacgcccataatcatacaaagcccccgcaccaataggatcctcccgaatcaaccctgacccctctccttcataaattattcagcttcctacactattaaagtttaccacaaccaccaccccatcatactctttcacccacagcaccaatcctacctccatcgctaaccccactaaaacactcaccaagacctcaacccctgacccccatgcctcaggatactcctcaatagccatcgctgtagtatatccaaagacaaccatcattccccctaaataaattaaaaaaactattaaacccatataacctcccccaaaattcagaataataacacacccgaccacaccgctaacaatcaatactaaacccccataaataggagaaggcttagaagaaaaccccacaaaccccattactaaacccacactcaacagaaacaaagcatacatcattattctcgcacggactacaaccacgaccaatgatatgaaaaaccatcgttgtatttcaactacaagaacaccaatgaccccaatacgcaaaactaaccccctaataaaattaattaaccactcattcatcgacctccccaccccatccaacatctccgcatgatgaaacttcggctcactccttggcgcctgcctgatcctccaaatcaccacaggactattcctagccatgcactactcaccagacgcctcaaccgccttttcatcaatcgcccacatcactcgagacgtaaattatggctgaatcatccgctaccttcacgccaacggcgcctcaatattctttatctgcctcttcctacacatcgggcgaggcctatattacggatcatttctctactcagaaacctgaaacatcggcattatcctcctgcttgcaactatagcaacagccttcataggctatgtcctcccgtgaggccaaatatcattctgaggggccacagtaattacaaacttactatccgccatcccatacattgggacagacctagttcaatgaatctgaggaggctactcagtagacagtcccaccctcacacgattctttacctttcacttcatcttgcccttcattattgcagccctagcagcactccacctcctattcttgcacgaaacgggatcaaacaaccccctaggaatcacctcccattccgataaaatcaccttccacccttactacacaatcaaagacgccctcggcttacttctcttccttctctccttaatgacattaacactattctcaccagacctcctaggcgacccagacaattataccctagccaaccccttaaacacccctccccacatcaagcccgaatgatatttcctattcgcctacacaattctccgatccgtccctaacaaactaggaggcgtccttgccctattactatccatcctcatcctagcaataatccccatcctccatatatccaaacaacaaagcataatatttcgcccactaagccaatcactttattgactcctagccgcagacctcctcattctaacctgaatcggaggacaaccagtaagctacccttttaccatcattggacaagtagcatccgtactatacttcacaacaatcctaatcctaataccaactatctccctaattgaaaacaaaatactcaaatgggcctgtccttgtagtataaactaatacaccagtcttgtaaaccggagatgaaaacctttttccaaggacaaatcagagaaaaagtctttaactccaccattagcacccaaagctaagattctaatttaaactattctctgttctttcatggggaagcagatttgggtaccacccaagtattgactcacccatcaacaaccgctatgtatttcgtacattactgccagccaccatgaatattgtacggtaccataaatacttgaccacctgtagtacataaaaacccaatccacatcaaaaccccctccccatgcttacaagcaagtacagcaatcaaccctcaactatcacacatcaactgcaactccaaagccacccctcacccactaggataccaacaaacctacccacccttaacagtacatagtacataaagccatttaccgtacatagcacattacagtcaaatcccttctcgtccccatggatgacccccctcagataggggtcccttgaccaccatcctccgtgaaatcaatatcccgcacaagagtgctactctcctcgctccgggcccataacacttgggggtagctaaagtgaactgtatccgacatctggttcctacttcagggtcataaagcctaaatagcccacacgttccccttaaataagacatcacgatg

SEQ ID NO: 523 - DNA, 16569 bp, Homo sapiens mitochondrial
  3107: "n" refers to a nucleotide at position 3107 of the Cambridge Reference Sequence (CRS, Anderson et al. 1981 Nature 290:457-465), later determined to be absent from the human mtDNA sequence according to the revised CRS (rCRS, Andrews et al. 1999 Nature Genetics 23:147); "n" therefore represents a single nucleotide deletion at a position corresponding to nucleotide 3107 of SEQ ID NO:1 as provided herein.
gatcacaggtctatcaccctattaaccactcacgggagctctccatgcatttggtattttcgtctggggggtatgcacgcgatagcattgcgagacgctggagccggagcaccctatgtcgcagtatctgtctttgattcctgcctcatcctattatttatcgcacctacgttcaatattacaggcgaacatacttactaaagtgtgttaattaattaatgcttgtaggacataataataacaattgaatgtctgcacagccactttccacacagacatcataacaaaaaatttccaccaaaccccccctcccccgcttctggccacagcacttaaacacatctctgccaaaccccaaaaacaaagaaccctaacaccagcctaaccagatttcaaattttatcttttggcggtatgcacttttaacagtcaccccccaactaacacattattttcccctcccactcccatactactaatctcatcaatacaacccccgcccatcctacccagcacacacacaccgctgctaaccccataccccgaaccaaccaaaccccaaagacaccccccacagtttatgtagcttacctcctcaaagcaatacactgaaaatgtttagacgggctcacatcaccccataaacaaataggtttggtcctagcctttctattagctcttagtaagattacacatgcaagcatccccgttccagtgagttcaccctctaaatcaccacgatcaaaagggacaagcatcaagcacgcagcaatgcagctcaaaacgcttagcctagccacacccccacgggaaacagcagtgattaacctttagcaataaacgaaagtttaactaagctatactaaccccagggttggtcaatttcgtgccagccaccgcggtcacacgattaacccaagtcaatagaagccggcgtaaagagtgttttagatcaccccctccccaataaagctaaaactcacctgagttgtaaaaaactccagttgacacaaaatagactacgaaagtggctttaacatatctgaacacacaatagctaagacccaaactgggattagataccccactatgcttagccctaaacctcaacagttaaatcaacaaaactgctcgccagaacactacgagccacagcttaaaactcaaaggacctggcggtgcttcatatccctctagaggagcctgttctgtaatcgataaaccccgatcaacctcaccacctcttgctcagcctatataccgccatcttcagcaaaccctgatgaaggctacaaagtaagcgcaagtacccacgtaaagacgttaggtcaaggtgtagcccatgaggtggcaagaaatgggctacattttctaccccagaaaactacgatagcccttatgaaacttaagggtcgaaggtggatttagcagtaaactgagagtagagtgcttagttgaacagggccctgaagcgcgtacacaccgcccgtcaccctcctcaagtatacttcaaaggacatttaactaaaacccctacgcatttatatagaggagacaagtcgtaacatggtaagtgtactggaaagtgcacttggacgaaccagagtgtagcttaacacaaagcacccaacttacacttaggagatttcaacttaacttgaccgctctgagctaaacctagccccaaacccactccaccttactaccagacaaccttagccaaaccatttacccaaataaagtataggcgatagaaattgaaacctggcgcaatagatatagtaccgcaagggaaagatgaaaaattataaccaagcataatatagcaaggactaacccctataccttctgcataatgaattaactagaaataactttgcaaggagagccaaagctaagacccccgaaaccagacgagctacctaagaacagctaaaagagcacacccgtctatgtagcaaaatagtgggaagatttataggtagaggcgacaaacctaccgagcctggtgatagctggttgtccaagatagaatcttagttcaactttaaatttgcccacagaaccctctaaatccccttgtaaatttaactgttagtccaaagaggaacagctctttggacactaggaaaaaaccttgtagagagagtaaaaaatttaacacccatagtaggcctaaaagcagccaccaattaagaaagcgttcaagctcaacacccactacctaaaaaatcccaaacatataactgaactcctcacacccaattggaccaatctatcaccctatagaagaactaatgttagtataagtaacatgaaaacattctcctccgcataagcctgcgtcagattaaaacactgaactgacaattaacagcccaatatctacaatcaaccaacaagtcattattaccctcactgtcaacccaacacaggcatgctcataaggaaaggttaaaaaaagtaaaaggaactcggcaaatcttaccccgcctgtttaccaaaaacatcacctctagcatcaccagtattagaggcaccgcctgcccagtgacacatgtttaacggccgcggtaccctaaccgtgcaaaggtagcataatcacttgttccttaaatagggacctgtatgaatggctccacgagggttcagctgtctcttacttttaaccagtgaaattgacctgcccgtgaagaggcgggcatgacacagcaagacgagaagaccctatggagctttaatttattaatgcaaacagtacctaacaaacccacaggtcctaaactaccaaacctgcattaaaaatttcggttggggcgacctcggagcagaacccaacctccgagcagtacatgctaagacttcaccagtcaaagcgaactactatactcaattgatccaatagcttgaccaacggaacaagttaccctagggataacagcgcaatcctattctagagtccatatcaacaatagggtttacgacctcgatgttggatcaggacatcccgatggtgcagccgctattaaaggttcgtttgttcaacgattaaagtcctacgtgatctgagttcagaccggagtaatccaggtcggtttctatctacnttcaaattcctccctgtacgaaaggacaagagaaataaggcctacttcacaaagcgccttcccccgtaaatgatatcatctcaacttagtattatacccacacccacccaagaacagggtttgttaagatggcagagcccggtaatcgcataaaacttaaaactttacagtcagaggttcaattcctcttcttaacaacatacccatggccaacctcctactcctcattgtacccattctaatcgcaatggcattcctaatgcttaccgaacgaaaaattctaggctatgtacaactacgcaaaggccccaacgttgtaggcccctacgggctactacaacccttcgctgacgccataaaactcttcaccaaagagcccctaaaacccgccacatctaccatcaccctctacatcaccgccccgaccttagctctcaccatcgctcttctactatgaacccccctccccatacccaaccccctggtcaacctcaacctaggcctcctatttattctagccacctctagcctagccgtttactcaatcctctgatcagggtgagcatcaaactcaaactacgccctgatcggcgcactgcgagcagtagcccaaacaatctcatatgaagtcaccctagccatcattctactatcaacattactaataagtggctcctttaacctctccacccttatcacaacacaagaacacctctgattactcctgccatcatgacccttggccataatatgatttatctccacactagcagagaccaaccgaacccccttcgaccttgccgaaggggagtccgaactagtctcaggcttcaacatcgaatacgccgcaggccccttcgccctattcttcatagccgaatacacaaacattattataataaacaccctcaccactacaatcttcctaggaacaacatatgacgcactctcccctgaactctacacaacatattttgtcaccaagaccctacttctaacctccctgttcttatgaattcgaacagcatacccccgattccgctacgaccaactcatacacctcctatgaaaaaacttcctaccactcaccctagcattacttatatgatatgtctccatacccattacaatctccagcattccccctcaaacctaagaaatatgtctgataaaagagttactttgatagagtaaataataggagcttaaacccccttatttctaggactatgagaatcgaacccatccctgagaatccaaaattctccgtgccacctatcacaccccatcctaaagtaaggtcagctaaataagctatcgggcccataccccgaaaatgttggttatacccttcccgtactaattaatcccctggcccaacccgtcatctactctaccatctttgcaggcacactcatcacagcgctaagctcgcactgattttttacctgagtaggcctagaaataaacatgctagcttttattccagttctaaccaaaaaaataaaccctcgttccacagaagctgccatcaagtatttcctcacgcaagcaaccgcatccataatccttctaatagctatcctcttcaacaatatactctccggacaatgaaccataaccaatactaccaatcaatactcatcattaataatcataatggctatagcaataaaactaggaatagccccctttcacttctgagtcccagaggttacccaaggcacccctctgacatccggcctgcttcttctcacatgacaaaaactagcccccatctcaatcatataccaaatctctccctcactaaacgtaagccttctcctcactctctcaatcttatccatcatagcaggcagttgaggtggattaaaccaaacccagctacgcaaaatcttagcatactcctcaattacccacataggatgaataatagcagttctaccgtacaaccctaacataaccattcttaatttaactatttatattatcctaactactaccgcattcctactactcaacttaaactccagcaccacgaccctactactatctcgcacctgaaacaagctaacatgactaacacccttaattccatccaccctcctctccctaggaggcctgcccccgctaaccggctttttgcccaaatgggccattatcgaagaattcacaaaaaacaatagcctcatcatccccaccatcatagccaccatcaccctccttaacctctacttctacctacgcctaatctactccacctcaatcacactactccccatatctaacaacgtaaaaataaaatgacagtttgaacatacaaaacccaccccattcctccccacactcatcgcccttaccacgctactcctacctatctccccttttatactaataatcttatagaaatttaggttaaatacagaccaagagccttcaaagccctcagtaagttgcaatacttaatttctgtaacagctaaggactgcaaaaccccactctgcatcaactgaacgcaaatcagccactttaattaagctaagcccttactagaccaatgggacttaaacccacaaacacttagttaacagctaagcaccctaatcaactggcttcaatctacttctcccgccgccgggaaaaaaggcgggagaagccccggcaggtttgaagctgcttcttcgaatttgcaattcaatatgaaaatcacctcggagctggtaaaaagaggcctaacccctgtctttagatttacagtccaatgcttcactcagccattttacctcacccccactgatgttcgccgaccgttgactattctctacaaaccacaaagacattggaacactatacctattattcggcgcatgagctggagtcctaggcacagctctaagcctccttattcgagccgagctgggccagccaggcaaccttctaggtaacgaccacatctacaacgttatcgtcacagcccatgcatttgtaataatcttcttcatagtaatacccatcataatcggaggctttggcaactgactagttcccctaataatcggtgcccccgatatggcgtttccccgcataaacaacataagcttctgactcttacctccctctctcctactcctgctcgcatctgctatagtggaggccggagcaggaacaggttgaacagtctaccctcccttagcagggaactactcccaccctggagcctccgtagacctaaccatcttctccttacacctagcaggtgtctcctctatcttaggggccatcaatttcatcacaacaattatcaatataaaaccccctgccataacccaataccaaacgcccctcttcgtctgatccgtcctaatcacagcagtcctacttctcctatctctcccagtcctagctgctggcatcactatactactaacagaccgcaacctcaacaccaccttcttcgaccccgccggaggaggagaccccattctataccaacacctattctgatttttcggtcaccctgaagtttatattcttatcctaccaggcttcggaataatctcccatattgtaacttactactccggaaaaaaagaaccatttggatacataggtatggtctgagctatgatatcaattggcttcctagggtttatcgtgtgagcacaccatatatttacagtaggaatagacgtagacacacgagcatatttcacctccgctaccataatcatcgctatccccaccggcgtcaaagtatttagctgactcgccacactccacggaagcaatatgaaatgatctgctgcagtgctctgagccctaggattcatctttcttttcaccgtaggtggcctgactggcattgtattagcaaactcatcactagacatcgtactacacgacacgtactacgttgtagctcacttccactatgtcctatcaataggagctgtatttgccatcataggaggcttcattcactgatttcccctattctcaggctacaccctagaccaaacctacgccaaaatccatttcactatcatattcatcggcgtaaatctaactttcttcccacaacactttctcggcctatccggaatgccccgacgttactcggactaccccgatgcatacaccacatgaaacatcctatcatctgtaggctcattcatttctctaacagcagtaatattaataattttcatgatttgagaagccttcgcttcgaagcgaaaagtcctaatagtagaagaaccctccataaacctggagtgactatatggatgccccccaccctaccacacattcgaagaacccgtatacataaaatctagacaaaaaaggaaggaatcgaaccccccaaagctggtttcaagccaaccccatggcctccatgactttttcaaaaaggtattagaaaaaccatttcataactttgtcaaagttaaattataggctaaatcctatatatcttaatggcacatgcagcgcaagtaggtctacaagacgctacttcccctatcatagaagagcttatcacctttcatgatcacgccctcataatcattttccttatctgcttcctagtcctgtatgcccttttcctaacactcacaacaaaactaactaatactaacatctcagacgctcaggaaatagaaaccgtctgaactatcctgcccgccatcatcctagtcctcatcgccctcccatccctacgcatcctttacataacagacgaggtcaacgatccctcccttaccatcaaatcaattggccaccaatggtactgaacctacgagtacaccgactacggcggactaatcttcaactcctacatacttcccccattattcctagaaccaggcgacctgcgactccttgacgttgacaatcgagtagtactcccgattgaagcccccattcgtataataattacatcacaagacgtcttgcactcatgagctgtccccacattaggcttaaaaacagatgcaattcccggacgtctaaaccaaaccactttcaccgctacacgaccgggggtatactacggtcaatgctctgaaatctgtggagcaaaccacagtttcatgcccatcgtcctagaattaattcccctaaaaatctttgaaatagggcccgtatttaccctatagcaccccctctaccccctctagagcccactgtaaagctaacttagcattaaccttttaagttaaagattaagagaaccaacacctctttacagtgaaatgccccaactaaatactaccgtatggcccaccataattacccccatactccttacactattcctcatcacccaactaaaaatattaaacacaaactaccacctacctccctcaccaaagcccataaaaataaaaaattataacaaaccctgagaaccaaaatgaacgaaaatctgttcgcttcattcattgcccccacaatcctaggcctacccgccgcagtactgatcattctatttccccctctattgatccccacctccaaatatctcatcaacaaccgactaatcaccacccaacaatgactaatcaaactaacctcaaaacaaatgataaccatacacaacactaaaggacgaacctgatctcttatactagtatccttaatcatttttattgccacaactaacctcctcggactcctgcctcactcatttacaccaaccacccaactatctataaacctagccatggccatccccttatgagcgggcgcagtgattataggctttcgctctaagattaaaaatgccctagcccacttcttaccacaaggcacacctacaccccttatccccatactagttattatcgaaaccatcagcctactcattcaaccaatagccctggccgtacgcctaaccgctaacattactgcaggccacctactcatgcacctaattggaagcgccaccctagcaatatcaaccattaaccttccctctacacttatcatcttcacaattctaattctactgactatcctagaaatcgctgtcgccttaatccaagcctacgttttcacacttctagtaagcctctacctgcacgacaacacataatgacccaccaatcacatgcctatcatatagtaaaacccagcccatgacccctaacaggggccctctcagccctcctaatgacctccggcctagccatgtgatttcacttccactccataacgctcctcatactaggcctactaaccaacacactaaccatataccaatgatggcgcgatgtaacacgagaaagcacataccaaggccaccacacaccacctgtccaaaaaggccttcgatacgggataatcctatttattacctcagaagtttttttcttcgcaggatttttctgagccttttaccactccagcctagcccctaccccccaattaggagggcactggcccccaacaggcatcaccccgctaaatcccctagaagtcccactcctaaacacatccgtattactcgcatcaggagtatcaatcacctgagctcaccatagtctaatagaaaacaaccgaaaccaaataattcaagcactgcttattacaattttactgggtctctattttaccctcctacaagcctcagagtacttcgagtctcccttcaccatttccgacggcatctacggctcaacattttttgtagccacaggcttccacggacttcacgtcattattggctcaactttcctcactatctgcttcatccgccaactaatatttcactttacatccaaacatcactttggcttcgaagccgccgcctgatactggcattttgtagatgtggtttgactatttctgtatgtctccatctattgatgagggtcttactcttttagtataaatagtaccgttaacttccaattaactagttttgacaacattcaaaaaagagtaataaacttcgccttaattttaataatcaacaccctcctagccttactactaataattattacattttgactaccacaactcaacggctacatagaaaaatccaccccttacgagtgcggcttcgaccctatatcccccgcccgcgtccctttctccataaaattcttcttagtagctattaccttcttattatttgatctagaaattgccctccttttacccctaccatgagccctacaaacaactaacctgccactaatagttatgtcatccctcttattaatcatcatcctagccctaagtctggcctatgagtgactacaaaaaggattagactgaaccgaattggtatatagtttaaacaaaacgaatgatttcgactcattaaattatgataatcatatttaccaaatgcccctcatttacataaatattatactagcatttaccatctcacttctaggaatactagtatatcgctcacacctcatatcctccctactatgcctagaaggaataatactatcgctgttcattatagctactctcataaccctcaacacccactccctcttagccaatattgtgcctattgccatactagtctttgccgcctgcgaagcagcggtgggcctagccctactagtctcaatctccaacacatatggcctagactacgtacataacctaaacctactccaatgctaaaactaatcgtcccaacaattatattactaccactgacatgactttccaaaaaacacataatttgaatcaacacaaccacccacagcctaattattagcatcatccctctactattttttaaccaaatcaacaacaacctatttagctgttccccaaccttttcctccgaccccctaacaacccccctcctaatactaactacctgactcctacccctcacaatcatggcaagccaacgccacttatccagtgaaccactatcacgaaaaaaactctacctctctatactaatctccctacaaatctccttaattataacattcacagccacagaactaatcatattttatatcttcttcgaaaccacacttatccccaccttggctatcatcacccgatgaggcaaccagccagaacgcctgaacgcaggcacatacttcctattctacaccctagtaggctcccttcccctactcatcgcactaatttacactcacaacaccctaggctcactaaacattctactactcactctcactgcccaagaactatcaaactcctgagccaacaacttaatatgactagcttacacaatagcttttatagtaaagatacctctttacggactccacttatgactccctaaagcccatgtcgaagcccccatcgctgggtcaatagtacttgccgcagtactcttaaaactaggcggctatggtataatacgcctcacactcattctcaaccccctgacaaaacacatagcctaccccttccttgtactatccctatgaggcataattataacaagctccatctgcctacgacaaacagacctaaaatcgctcattgcatactcttcaatcagccacatagccctcgtagtaacagccattctcatccaaaccccctgaagcttcaccggcgcagtcattctcataatcgcccacgggcttacatcctcattactattctgcctagcaaactcaaactacgaacgcactcacagtcgcatcataatcctctctcaaggacttcaaactctactcccactaatagctttttgatgacttctagcaagcctcgctaacctcgccttaccccccactattaacctactgggagaactctctgtgctagtaaccacgttctcctgatcaaatatcactctcctacttacaggactcaacatactagtcacagccctatactccctctacatatttaccacaacacaatggggctcactcacccaccacattaacaacataaaaccctcattcacacgagaaaacaccctcatgttcatacacctatcccccattctcctcctatccctcaaccccgacatcattaccgggttttcctcttgtaaatatagtttaaccaaaacatcagattgtgaatctgacaacagaggcttacgaccccttatttaccgagaaagctcacaagaactgctaactcatgcccccatgtctaacaacatggctttctcaacttttaaaggataacagctatccattggtcttaggccccaaaaattttggtgcaactccaaataaaagtaataaccatgcacactactataaccaccctaaccctgacttccctaattccccccatccttaccaccctcgttaaccctaacaaaaaaaactcatacccccattatgtaaaatccattgtcgcatccacctttattatcagtctcttccccacaacaatattcatgtgcctagaccaagaagttattatctcgaactgacactgagccacaacccaaacaacccagctctccctaagcttcaaactagactacttctccataatattcatccctgtagcattgttcgttacatggtccatcatagaattctcactgtgatatataaactcagacccaaacattaatcagttcttcaaatatctactcatcttcctaattaccatactaatcttagttaccgctaacaacctattccaactgttcatcggctgagagggcgtaggaattatatccttcttgctcatcagttgatgatacgcccgagcagatgccaacacagcagccattcaagcaatcctatacaaccgtatcggcgatatcggtttcatcctcgccttagcatgatttatcctacactccaactcatgagacccacaacaaatagcccttctaaacgctaatccaagcctcaccccactactaggcctcctcctagcagcagcaggcaaatcagcccaattaggtctccacccctgactcccctcagccatagaaggccccaccccagtctcagccctactccactcaagcactatagttgtagcaggaatcttcttactcatccgcttccaccccctagcagaaaatagcccactaatccaaactctaacactatgcttaggcgctatcaccactctgttcgcagcagtctgcgcccttacacaaaatgacatcaaaaaaatcgtagccttctccacttcaagtcaactaggactcataatagttacaatcggcatcaaccaaccacacctagcattcctgcacatctgtacccacgccttcttcaaagccatactatttatgtgctccgggtccatcatccacaaccttaacaatgaacaagatattcgaaaaataggaggactactcaaaaccatacctctcacttcaacctccctcaccattggcagcctagcattagcaggaatacctttcctcacaggtttctactccaaagaccacatcatcgaaaccgcaaacatatcatacacaaacgcctgagccctatctattactctcatcgctacctccctgacaagcgcctatagcactcgaataattcttctcaccctaacaggtcaacctcgcttccccacccttactaacattaacgaaaataaccccaccctactaaaccccattaaacgcctggcagccggaagcctattcgcaggatttctcattactaacaacatttcccccgcatcccccttccaaacaacaatccccctctacctaaaactcacagccctcgctgtcactttcctaggacttctaacagccctagacctcaactacctaaccaacaaacttaaaataaaatccccactatgcacattttatttctccaacatactcggattctaccctagcatcacacaccgcacaatcccctatctaggccttcttacgagccaaaacctgcccctactcctcctagacctaacctgactagaaaagctattacctaaaacaatttcacagcaccaaatctccacctccatcatcacctcaacccaaaaaggcataattaaactttacttcctctctttcttcttcccactcatcctaaccctactcctaatcacataacctattcccccgagcaatctcaattacaatatatacaccaacaaacaatgttcaaccagtaactactactaatcaacgcccataatcatacaaagcccccgcaccaataggatcctcccgaatcaaccctgacccctctccttcataaattattcagcttcctacactattaaagtttaccacaaccaccaccccatcatactctttcacccacagcaccaatcctacctccatcgctaaccccactaaaacactcaccaagacctcaacccctgacccccatgcctcaggatactcctcaatagccatcgctgtagtatatccaaagacaaccatcattccccctaaataaattaaaaaaactattaaacccatataacctcccccaaaattcagaataataacacacccgaccacaccgctaacaatcaatactaaacccccataaataggagaaggcttagaagaaaaccccacaaaccccattactaaacccacactcaacagaaacaaagcatacatcattattctcgcacggactacaaccacgaccaatgatatgaaaaaccatcgttgtatttcaactacaagaacaccaatgaccccaatacgcaaaactaaccccctaataaaattaattaaccactcattcatcgacctccccaccccatccaacatctccgcatgatgaaacttcggctcactccttggcgcctgcctgatcctccaaatcaccacaggactattcctagccatgcactactcaccagacgcctcaaccgccttttcatcaatcgcccacatcactcgagacgtaaattatggctgaatcatccgctaccttcacgccaatggcgcctcaatattctttatctgcctcttcctacacatcgggcgaggcctatattacggatcatttctctactcagaaacctgaaacatcggcattatcctcctgcttgcaactatagcaacagccttcataggctatgtcctcccgtgaggccaaatatcattctgaggggccacagtaattacaaacttactatccgccatcccatacattgggacagacctagttcaatgaatctgaggaggctactcagtagacagtcccaccctcacacgattctttacctttcacttcatcttgcccttcattattgcagccctagcagcactccacctcctattcttgcacgaaacgggatcaaacaaccccctaggaatcacctcccattccgataaaatcaccttccacccttactacacaatcaaagacgccctcggcttacttctcttccttctctccttaatgacattaacactattctcaccagacctcctaggcgacccagacaattataccctagccaaccccttaaacacccctccccacatcaagcccgaatgatatttcctattcgcctacacaattctccgatccgtccctaacaaactaggaggcgtccttgccctattactatccatcctcatcctagcaataatccccatcctccatatatccaaacaacaaagcataatatttcgcccactaagccaatcactttattgactcctagccgcagacctcctcattctaacctgaatcggaggacaaccagtaagctacccttttaccatcattggacaagtagcatccgtactatacttcacaacaatcctaatcctaataccaactatctccctaattgaaaacaaaatactcaaatgggcctgtccttgtagtataaactaatacaccagtcttgtaaaccggagatgaaaacctttttccaaggacaaatcagagaaaaagtctttaactccaccattagcacccaaagctaagattctaatttaaactattctctgttctttcatggggaagcagatttgggtaccacccaagtattgactcacccatcaacaaccgctatgtatttcgtacattactgccagccaccatgaatattgtacggtaccataaatacttgaccacctgtagtacataaaaacccaatccacatcaaaaccccctccccatgcttacaagcaagtacagcaatcaaccctcaactatcacacatcaactgcaactccaaagccacccctcacccactaggataccaacaaacctacccacccttaacagtacatagtacataaagccatttaccgtacatagcacattacagtcaaatcccttctcgtccccatggatgacccccctcagataggggtcccttgaccaccatcctccgtgaaatcaatatcccgcacaagagtgctactctcctcgctccgggcccataacacttgggggtagctaaagtgaactgtatccgacatctggttcctacttcagggtcataaagcctaaatagcccacacgttccccttaaataagacatcacgatg

SEQ ID NO: 524 - DNA, 16569 bp, Homo sapiens mitochondrial
  3107: "n" refers to a nucleotide at position 3107 of the Cambridge Reference Sequence (CRS, Anderson et al. 1981 Nature 290:457-465), later determined to be absent from the human mtDNA sequence according to the revised CRS (rCRS, Andrews et al. 1999 Nature Genetics 23:147); "n" therefore represents a single nucleotide deletion at a position corresponding to nucleotide 3107 of SEQ ID NO:1 as provided herein.
gatcacaggtctatcaccctattaaccactcacgggagctctccatgcatttggtattttcgtctggggggtatgcacgcgatagcattgcgagacgctggagccggagcaccctatgtcgcagtatctgtctttgattcctgcctcatcctattatttatcgcacctacgttcaatattacaggcgaacatacttactaaagtgtgttaattaattaatgcttgtaggacataataataacaattgaatgtctgcacagccactttccacacagacatcataacaaaaaatttccaccaaaccccccctcccccgcttctggccacagcacttaaacacatctctgccaaaccccaaaaacaaagaaccctaacaccagcctaaccagatttcaaattttatcttttggcggtatgcacttttaacagtcaccccccaactaacacattattttcccctcccactcccatactactaatctcatcaatacaacccccgcccatcctacccagcacacacacaccgctgctaaccccataccccgaaccaaccaaaccccaaagacaccccccacagtttatgtagcttacctcctcaaagcaatacactgaaaatgtttagacgggctcacatcaccccataaacaaataggtttggtcctagcctttctattagctcttagtaagattacacatgcaagcatccccgttccagtgagttcaccctctaaatcaccacgatcaaaagggacaagcatcaagcacgcagcaatgcagctcaaaacgcttagcctagccacacccccacgggaaacagcagtgattaacctttagcaataaacgaaagtttaactaagctatactaaccccagggttggtcaatttcgtgccagccaccgcggtcacacgattaacccaagtcaatagaagccggcgtaaagagtgttttagatcaccccctccccaataaagctaaaactcacctgagttgtaaaaaactccagttgacacaaaatagactacgaaagtggctttaacatatctgaacacacaatagctaagacccaaactgggattagataccccactatgcttagccctaaacctcaacagttaaatcaacaaaactgctcgccagaacactacgagccacagcttaaaactcaaaggacctggcggtgcttcatatccctctagaggagcctgttctgtaatcgataaaccccgatcaacctcaccacctcttgctcagcctatataccgccatcttcagcaaaccctgatgaaggctacaaagtaagcgcaagtacccacgtaaagacgttaggtcaaggtgtagcccatgaggtggcaagaaatgggctacattttctaccccagaaaactacgatagcccttatgaaacttaagggtcgaaggtggatttagcagtaaactgagagtagagtgcttagttgaacagggccctgaagcgcgtacacaccgcccgtcaccctcctcaagtatacttcaaaggacatttaactaaaacccctacgcatttatatagaggagacaagtcgtaacatggtaagtgtactggaaagtgcacttggacgaaccagagtgtagcttaacacaaagcacccaacttacacttaggagatttcaacttaacttgaccgctctgagctaaacctagccccaaacccactccaccttactaccagacaaccttagccaaaccatttacccaaataaagtataggcgatagaaattgaaacctggcgcaatagatatagtaccgcaagggaaagatgaaaaattataaccaagcataatatagcaaggactaacccctataccttctgcataatgaattaactagaaataactttgcaaggagagccaaagctaagacccccgaaaccagacgagctacctaagaacagctaaaagagcacacccgtctatgtagcaaaatagtgggaagatttataggtagaggcgacaaacctaccgagcctggtgatagctggttgtccaagatagaatcttagttcaactttaaatttgcccacagaaccctctaaatccccttgtaaatttaactgttagtccaaagaggaacagctctttggacactaggaaaaaaccttgtagagagagtaaaaaatttaacacccatagtaggcctaaaagcagccaccaattaagaaagcgttcaagctcaacacccactacctaaaaaatcccaaacatataactgaactcctcacacccaattggaccaatctatcaccctatagaagaactaatgttagtataagtaacatgaaaacattctcctccgcataagcctgcgtcagattaaaacactgaactgacaattaacagcccaatatctacaatcaaccaacaagtcattattaccctcactgtcaacccaacacaggcatgctcataaggaaaggttaaaaaaagtaaaaggaactcggcaaatcttaccccgcctgtttaccaaaaacatcacctctagcatcaccagtattagaggcaccgcctgcccagtgacacatgtttaacggccgcggtaccctaaccgtgcaaaggtagcataatcacttgttccttaaatagggacctgtatgaatggctccacgagggttcagctgtctcttacttttaaccagtgaaattgacctgcccgtgaagaggcgggcataacacagcaagacgagaagaccctatggagctttaatttattaatgcaaacagtacctaacaaacccacaggtcctaaactaccaaacctgcattaaaaatttcggttggggcgacctcggagcagaacccaacctccgagcagtacatgctaagacttcaccagtcaaagcgaactactatactcaattgatccaataacttgaccaacggaacaagttaccctagggataacagcgcaatcctattctagagtccatatcaacaatagggtttacgacctcgatgttggatcaggacatcccgatggtgcagccgctattaaaggttcgtttgttcaacgattaaagtcctacgtgatctgagttcagaccggagtaatccaggtcggtttctatctacnttcaaattcctccctgtacgaaaggacaagagaaataaggcctacttcacaaagcgccttcccccgtaaatgatatcatctcaacttagtattatacccacacccacccaagaacagggtttgttaagatggcagagcccggtaatcgcataaaacttaaaactttacagtcagaggttcaattcctcttcttaacaacatacccatggccaacctcctactcctcattgtacccatcctaatcgcaatggcattcctaatgcttaccgaacgaaaaattctaggctatatacaactacgcaaaggccccaacgttgtaggcccctacgggctactacaacccttcgctgacgccataaaactcttcaccaaagagcccctaaaacccgccacatctaccatcaccctctacatcaccgccccgaccttagctctcaccatcgctcttctactatgaacccccctccccatacccaaccccctggtcaacctcaacctaggcctcctatttattctagccacctctagcctagccgtttactcaatcctctgatcagggtgagcatcaaactcaaactacgccctgatcggcgcactgcgagcagtagcccaaacaatctcatatgaagtcaccctagccatcattctactatcaacattactaataagtggctcctttaacctctccacccttatcacaacacaagaacacctctgattactcctgccatcatgacccttggccataatatgatttatctccacactagcagagaccaaccgaacccccttcgaccttgccgaaggggagtccgaactagtctcaggcttcaacatcgaatacgccgcaggccccttcgccctattcttcatagccgaatacacaaacattattataataaacaccctcaccactacaatcttcctaggaacaacatatgacgcactctcccctgaactctacacaacatattttgtcaccaagaccctacttctaacctccctgttcttatgaattcgaacagcatacccccgattccgctacgaccaactcatacacctcctatgaaaaaacttcctaccactcaccctagcattacttatatgatatgtctccatacccattacaatctccagcattccccctcaaacctaagaaatatgtctgataaaagagttactttgatagagtaaataataggagcttaaacccccttatttctaggactatgagaatcgaacccatccctgagaatccaaaattctccgtgccacctatcacaccccatcctaaagtaaggtcagctaaataagctatcgggcccataccccgaaaatgttggttatacccttcccgtactaattaatcccctggcccaacccgtcatctactctaccatctttgcaggcacactcatcacagcgctaagctcgcactgattttttacctgagtaggcctagaaataaacatgctagcttttattccagttctaaccaaaaaaataaaccctcgttccacagaagctgccatcaagtatttcctcacgcaagcaaccgcatccataatccttctaatagctatcctcttcaacaatatactctccggacaatgaaccataaccaatactaccaatcaatactcatcattaataatcataatggctatagcaataaaactaggaatagccccctttcacttctgagtcccagaggttacccaaggcacccctctgacatccggcctgcttcttctcacatgacaaaaactagcccccatctcaatcatataccaaatctctccctcactaaacgtaagccttctcctcactctctcaatcttatccatcatagcaggcagttgaggtggattaaaccaaacccagctacgcaaaatcttagcatactcctcaattacccacataggatgaataatagcagttctaccgtacaaccctaacataaccattcttaatttaactatttatattatcctaactactaccgcattcctactactcaacttaaactccagcaccacgaccctactactatctcgcacctgaaacaagctaacatgactaacacccttaattccatccaccctcctctccctaggaggcctgcccccgctaaccggctttttgcccaaatgggccattatcgaagaattcacaaaaaacaatagcctcatcatccccaccatcatagccaccatcaccctccttaacctctacttctacctacgcctaatctactccacctcaatcacactactccccatatctaacaacgtaaaaataaaatgacagtttgaacatacaaaacccaccccattcctccccacactcatcgcccttaccacgctactcctacctatctccccttttatactaataatcttatagaaatttaggttaaatacagaccaagagccttcaaagccctcagtaagttgcaatacttaatttctgtaacagctaaggactgcaaaaccccactctgcatcaactgaacgcaaatcagccactttaattaagctaagcccttactagaccaatgggacttaaacccacaaacacttagttaacagctaagcaccctaatcaactggcttcaatctacttctcccgccgccgggaaaaaaggcgggagaagccccggcaggtttgaagctgcttcttcgaatttgcaattcaatatgaaaatcacctcggagctggtaaaaagaggcctaacccctgtctttagatttacagtccaatgcttcactcagccattttacctcacccccactgatgttcgccgaccgttgactattctctacaaaccacaaagacattggaacactatacctattattcggcgcatgagctggagtcctaggcacagctctaagcctccttattcgagccgagctgggccagccaggcaaccttctaggtaacgaccacatctacaacgttatcgtcacagcccatgcatttgtaataatcttcttcatagtaatacccatcataatcggaggctttggcaactgactagttcccctaataatcggtgcccccgatatggcgtttccccgcataaacaacataagcttctgactcttacctccctctctcctactcctgctcgcatctgctatagtggaggccggagcaggaacaggttgaacagtctaccctcccttagcagggaactactcccaccctggagcctccgtagacctaaccatcttctccttacacctagcaggtgtctcctctatcttaggggccatcaatttcatcacaacaattatcaatataaaaccccctgccataacccaataccaaacgcccctcttcgtctgatccgtcctaatcacagcagtcctacttctcctatctctcccagtcctagctgctggcatcactatactactaacagaccgcaacctcaacaccaccttcttcgaccccgccggaggaggagaccccattctataccaacacctattctgatttttcggtcaccctgaagtttatattcttatcctaccaggcttcggaataatctcccatattgtaacttactactccggaaaaaaagaaccatttggatacataggtatggtctgagctatgatatcaattggcttcctagggtttatcgtgtgagcacaccacatatttacagtaggaatagacgtagacacacgagcatatttcacctccgctaccataatcatcgctatccccaccggcgtcaaagtatttagctgactcgccacactccacggaagcaatatgaaatgatctgctgcagtgctctgagccctaggattcatctttcttttcaccgtaggtggcctgactggcattgtattagcaaactcatcactagacatcgtactacacgacacgtactacgttgtagcccacttccactatgtcctatcaataggagctgtatttgccatcataggaggcttcattcactgatttcccctattctcaggctacaccctagaccaaacctacgccaaaatccatttcactatcatattcatcggcgtaaatctaactttcttcccacaacactttctcggcctatccggaatgccccgacgttactcggactaccccgatgcatacaccacatgaaacatcctatcatctgtaggctcattcatttctctaacagcagtaatattaataattttcatgatttgagaagccttcgcttcgaagcgaaaagtcctaatagtagaagaaccctccataaacctggagtgactatatggatgccccccaccctaccacacattcgaagaacccgtatacataaaatctagacaaaaaaggaaggaatcgaaccccccaaagctggtttcaagccaaccccatggcctccatgactttttcaaaaaggtattagaaaaaccatttcataactttgtcaaagttaaattataggctaaatcctatatatcttaatggcacatgcagcgcaagtaggtctacaagacgctacttcccctatcatagaagagcttatcacctttcatgatcacgccctcataatcattttccttatctgcttcctagtcctgtatgcccttttcctaacactcacaacaaaactaactaatactaacatctcagacgctcaggaaatagaaaccgtctgaactatcctgcccgccatcatcctagtcctcatcgccctcccatccctacgcatcctttacataacagacgaggtcaacgatccctcccttaccatcaaatcaattggccaccaatggtactgaacctacgagtacaccgactacggcggactaatcttcaactcctacatacttcccccattattcctagaaccaggcgacctgcgactccttgacgttgacaatcgagtagtactcccgattgaagcccccattcgtataataattacatcacaagacgtcttgcactcatgagctgtccccacattaggcttaaaaacagatgcaattcccggacgtctaaaccaaaccactttcaccgctacacgaccgggggtatactacggtcaatgctctgaaatctgtggagcaaaccacagtttcatgcccatcgtcctagaattaattcccctaaaaatctttgaaatagggcccgtatttaccctatagcaccccctctaccccctctagagcccactgtaaagctaacttagcattaaccttttaagttaaagattaagagaaccaacacctctttacagtgaaatgccccaactaaatactaccgtatggcccaccataattacccccatactccttacactattcctcatcacccaactaaaaatattaaacacaaactaccacctacctccctcaccaaagcccataaaaataaaaaattataacaaaccctgagaaccaaaatgaacgaaaatctgttcgcttcattcattgcccccacaatcctaggcctacccgccgcagtactgatcattctatttccccctctattgatccccacctccaaatatctcatcaacaaccgactaatcaccacccaacaatgactaatcaaactaacctcaaaacaaatgataaccatacacaacactaaaggacgaacctgatctcttatactagtatccttaatcatttttattgccacaactaacctcctcggactcctgcctcactcatttacaccaaccacccaactatctataaacctagccatggctatccccttatgagcgggcgcagtgattataggctttcgctctaagattaaaaatgccctagcccacttcttaccacaaggcacacctacaccccttatccccatactagttattatcgaaaccatcagcctactcattcaaccaatagccctggccgtacgcctaaccgctaacattactgcaggccacctactcatgcacctaattggaagcgccaccctagcaatatcaaccattaaccttccctctacacttatcatcttcacaattctaatcctactgactatcctagaaatcgctgtcgccttaatccaagcctacgttttcacacttctagtaagcctctacctgcacgacaacacataatgacccaccaatcacatgcctatcatatagtaaaacccagcccatgacccctaacaggggccctctcagccctcctaatgacctccggcctagccatgtgatttcacttccactccataacgctcctcatactaggcctactaaccaacacactaaccatataccaatgatggcgcgatgtaacacgagaaagcacataccaaggccaccacacaccacctgtccaaaaaggccttcgatacgggataatcctatttattacctcagaagtttttttcttcgcaggatttttctgagccttttaccactccagcctagcccctaccccccaattaggagggcactggcccccaacaggcatcaccccgctaaatcccctagaagtcccactcctaaacacatccgtattactcgcatcaggagtatcaatcacctgagctcaccatagtctaatagaaaacaaccgaaaccaaataattcaagcactgcttattacaattttactgggtctctattttaccctcctacaagcctcagagtacttcgagtctcccttcaccatttccgacggcatctacggctcaacattttttgtagccacaggcttccacggacttcacgtcattattggctcaactttcctcactatctgcttcatccgccaactaatatttcactttacatccaaacatcactttggcttcgaagccgccgcctgatactggcattttgtagatgtggtttgactatttctgtatgtctccatctattgatgagggtcttactcttttagtataaatagtaccgttaacttccaattaactagttttgacaacattcaaaaaagagtaataaacttcgccttaattttaataatcaacaccctcctagccttactactaataattattacattttgactaccacaactcaacggctacatagaaaaatccaccccttacgagtgcggcttcgaccctatatcccccgcccgcgtccctttctccataaaattcttcttagtagctattaccttcttattatttgatctagaaattgccctccttttacccctaccatgagccctacaaacaactaacctgccactaatagttatgtcatccctcttattaatcatcatcctagccctaagtctggcctatgagtgactacaaaaaggattagactgaaccgaattggtatatagtttaaacaaaacgaatgatttcgactcattaaattatgataatcatatttaccaaatgcccctcatttacataaatattatactagcatttaccatctcacttctaggaatactagtatatcgctcacacctcatatcctccctactatgcctagaaggaataatactatcgctgttcattatagctactctcataaccctcaacacccactccctcttagccaatattgtgcctattgccatactagtctttgccgcctgcgaagcagcagtgggcctagccctactagtctcaatctccaacacatatggcctagactacgtacataacctaaacctactccaatgctaaaactaatcgtcccaacaattatattactaccactgacatgactttccaaaaaacacataatttgaatcaacacaaccacccacagcctaattattagcatcatccctctactattttttaaccaaatcaacaacaacctatttagctgttccccaaccttttcctccgaccccctaacaacccccctcctaatactaactacctgactcctacccctcacaatcatggcaagccaacgccacttatccagtgaaccactatcacgaaaaaaactctacctctctatactaatctccctacaaatctccttaattataacattcacagccacagaactaatcatattttatatcttcttcgaaaccacacttatccccaccttggctatcatcacccgatgaggcaaccagccagaacgcctgaacgcaggcacatacttcctattctacaccctagtaggctcccttcccctactcatcgcactaatttacactcacaacaccctaggctcactaaacattctactactcactctcactgcccaagaactatcaaactcctgagccaacaacttaatatgactagcttacacaatagcttttatagtaaagatacctctttacggactccacttatgactccctaaagcccatgtcgaagcccccatcgctgggtcaatagtacttgccgcagtactcttaaaactaggcggctatggtataatacgcctcacactcattctcaaccccctgacaaaacacatagcctaccccttccttgtactatccctatgaggcataattataacaagctccatctgcctacgacaaacagacctaaaatcgctcattgcatactcttcaatcagccacatagccctcgtagtaacagccattctcatccaaaccccctgaagcttcaccggcgcagtcattctcataatcgcccacgggcttacatcctcattactattctgcctagcaaactcaaactacgaacgcactcacagtcgcatcataatcctctctcaaggacttcaaactctactcccactaatagctttttgatgacttctagcaagcctcgctaacctcgccttaccccccactattaacctactgggagaactctctgtgctagtaaccacgttctcctgatcaaatatcactctcctacttacaggactcaacatactagtcacagccctatactccctctacatatttaccacaacacaatggggctcactcacccaccacattaacaacataaaaccctcattcacacgagaaaacaccctcatgttcatacacctatcccccattctcctcctatccctcaaccccgacatcattaccgggttttcctcttgtaaatatagtttaaccaaaacatcagattgtgaatctgacaacagaggcttacgaccccttatttaccgagaaagctcacaagaactgctaactcatgcccccatgtctaacaacatggctttctcaacttttaaaggataacagctatccattggtcttaggccccaaaaattttggtgcaactccaaataaaagtaataaccatgcacactactataaccaccctaaccctgacttccctaattccccccatccttaccaccctcgttaaccctaacaaaaaaaactcatacccccattatgtaaaatccattgtcgcatccacctttattatcagtctcttccccacaacaatattcatgtgcctagaccaagaagttattatctcgaactgacactgagccacaacccaaacaacccagctctccctaagcttcaaactagactacttctccataatattcatccctgtagcattgttcgttacatggtccatcatagaattctcactgtgatatataaactcagacccaaacattaatcagttcttcaaatatctactcatcttcctaattaccatactaatcttagttaccgctaacaacctattccaactgttcatcggctgagagggcgtaggaattatatccttcttgctcatcagttgatgatacgcccgagcagatgccaacacagcagccattcaagcaatcctatacaaccgtatcggcgatatcggtttcatcctcgccttagcatgatttatcctacactccaactcatgagacccacaacaaatagcccttctaaacgctaatccaagcctcaccccactactaggcctcctcctagcagcagcaggcaaatcagcccaattaggtctccacccctgactcccctcagccatagaaggccccaccccagtctcagccctactccactcaagcactatagttgtagcaggagtcttcttactcatccgcttccaccccctagcagaaaatagcccactaatccaaactctaacactatgcttaggcgctatcaccactctgttcgcagcagtctgcgcccttacacaaaatgacatcaaaaaaatcgtagccttctccacttcaagtcaactaggactcataatagttacaatcggcatcaaccaaccacacctagcattcctgcacatctgtacccacgccttcttcaaagccatactatttatgtgctccgggtccatcatccacaaccttaacaatgaacaagatattcgaaaaataggaggactactcaaaaccatacctctcacttcaacctccctcaccattggcagcctagcattagcaggaatacctttcctcacaggtttctactccaaagaccacatcatcgaaaccgcaaacatatcatacacaaacgcctgagccctatctattactctcatcgctacctccctgacaagcgcctatagcactcgaataattcttctcaccctaacaggtcaacctcgcttccccacccttactaacattaacgaaaataaccccaccctactaaaccccattaaacgcctggcagccggaagcctattcgcaggatttctcattactaacaacatttcccccgcatcccccttccaaacaacaatccccctctacctaaaactcacagccctcgctgtcactttcctaggacttctaacagccctagacctcaactacctaaccaacaaacttaaaataaaatccccactatgcacattttatttctccaacatactcggattctaccctagcatcacacaccgcacaatcccctatctaggccttcttacgagccaaaacctgcccctactcctcctagacctaacctgactagaaaagctattacctaaaacaatttcacagcaccaaatctccacctccatcatcacctcaacccaaaaaggcataattaaactttacttcctctctttcttcttcccactcatcctaaccctactcctaatcacataacctattcccccgagcaatctcaattacaatatatacaccaacaaacaatgttcaaccagtaactactactaatcaacgcccataatcatacaaagcccccgcaccaataggatcctcccgaatcaaccctgacccctctccttcataaattattcagcttcctacactattaaagtttaccacaaccaccaccccatcatactctttcacccacagcaccaatcctacctccatcgctaaccccactaaaacactcaccaagacctcaacccctgacccccatgcctcaggatactcctcaatagccatcgctgtagtatatccaaagacaaccatcattccccctaaataaattaaaaaaactattaaacccatataacctcccccaaaattcagaataataacacacccgaccacaccgctaacaatcaatactaaacccccataaataggagaaggcttagaagaaaaccccacaaaccccattactaaacccacactcaacagaaacaaagcatacatcattattctcgcacggactacaaccacgaccaatgatatgaaaaaccatcgttgtatttcaactacaagaacaccaatgaccccaatacgcaaaactaaccccctaataaaattaattaaccactcattcatcgacctccccaccccatccaacatctccgcatgatgaaacttcggctcactccttggcgcctgcctgatcctccaaatcaccacaggactattcctagccatgcactactcaccagacgcctcaaccgccttttcatcaatcgcccacatcactcgagacgtaaattatggctgaatcatccgctaccttcacgccaatggcgcctcaatattctttatctgcctcttcctacacatcgggcgaggcctatattacggatcatttctctactcagaaacctgaaacatcggcattatcctcctgcttgcaactatagcaacagccttcataggctatgtcctcccgtgaggccaaatatcattctgaggggccacagtaattacaaacttactatccgccatcccatacattgggacagacctagttcaatgaatctgaggaggctactcagtagacagtcccaccctcacacgattctttacctttcacttcatcttgcccttcattattgcagccctagcagcactccacctcctattcttgcacgaaacgggatcaaacaaccccctaggaatcacctcccattccgataaaatcaccttccacccttactacacaatcaaagacgccctcggcttacttctcttccttctctccttaatgacattaacactattctcaccagacctcctaggcgacccagacaattataccctagccaaccccttaaacacccctccccacatcaagcccgaatgatatttcctattcgcctacacaattctccgatccgtccctaacaaactaggaggcgtccttgccctattactatccatcctcatcctagcaataatccccatcctccatatatccaaacaacaaagcataatatttcgcccactaagccaatcactttattgactcctagccgcagacctcctcattctaacctgaatcggaggacaaccagtaagctacccttttaccatcattggacaagtagcatccgtactatacttcacaacaatcctaatcctaataccaactatctccctaattgaaaacaaaatactcaaatgggcctgtccttgtagtataaactaatacaccagtcttgtaaaccggagatgaaaacctttttccaaggacaaatcagagaaaaagtctttaactccaccattagcacccaaagctaagattctaatttaaactattctctgttctttcatggggaagcagatttgggtaccacccaagtattgactcacccatcaacaaccgctatgtatttcgtacattactgccagccaccatgaatattgtacggtaccataaatacttgaccacctgtagtacataaaaacccaatccacatcaaaaccccctccccatgcttacaagcaagtacagcaatcaaccctcaactatcacacatcaactgcaactccaaagccacccctcacccactaggataccaacaaacctacccacccttaacagtacatagtacataaagccatttaccgtacatagcacattacagtcaaatcccttctcgtccccatggatgacccccctcagataggggtcccttgaccaccatcctccgtgaaatcaatatcccgcacaagagtgctactctcctcgctccgggcccataacacttgggggtagctaaagtgaactgtatccgacatctggttcctacttcagggtcataaagcctaaatagcccacacgttccccttaaataagacatcacgatg

SEQ ID NO: 525 - DNA, 16569 bp, Homo sapiens mitochondrial
  3107: "n" refers to a nucleotide at position 3107 of the Cambridge Reference Sequence (CRS, Anderson et al. 1981 Nature 290:457-465), later determined to be absent from the human mtDNA sequence according to the revised CRS (rCRS, Andrews et al. 1999 Nature Genetics 23:147); "n" therefore represents a single nucleotide deletion at a position corresponding to nucleotide 3107 of SEQ ID NO:1 as provided herein.
gatcacaggtctatcaccctattaaccactcacgggagctctccatgcatttggtattttcgtctggggggtatgcacgcgatagcattgcgagacgctggagccggagcaccctatgtcgcagtatctgtctttgattcctgcctcatcctattatttatcgcacctacgttcaatattacaggcgaacatacttactaaagtgtgttaattaattaatgcttgtaggacataataataacaattgaatgtctgcacagccactttccacacagacatcataacaaaaaatttccaccaaaccccccctcccccgcttctggccacagcacttaaacacatctctgccaaaccccaaaaacaaagaaccctaacaccagcctaaccagatttcaaattttatcttttggcggtatgcacttttaacagtcaccccccaactaacacattattttcccctcccactcccatactactaatctcatcaatacaacccccgcccatcctacccagcacacacacaccgctgctaaccccataccccgaaccaaccaaaccccaaagacaccccccacagtttatgtagcttacctcctcaaagcaatacactgaaaatgtttagacgggctcacatcaccccataaacaaataggtttggtcctagcctttctattagctcttagtaagattacacatgcaagcatccccgttccagtgagttcaccctctaaatcaccacgatcaaaagggacaagcatcaagcacgcagcaatgcagctcaaaacgcttagcctagccacacccccacgggaaacagcagtgattaacctttagcaataaacgaaagtttaactaagctatactaaccccagggttggtcaatttcgtgccagccaccgcggtcacacgattaacccaagtcaatagaagccggcgtaaagagtgttttagatcaccccctccccaataaagctaaaactcacctgagttgtaaaaaactccagttgacacaaaatagactacgaaagtggctttaacatatctgaacacacaatagctaagacccaaactgggattagataccccactatgcttagccctaaacctcaacagttaaatcaacaaaactgctcgccagaacactacgagccacagcttaaaactcaaaggacctggcggtgcttcatatccctctagaggagcctgttctgtaatcgataaaccccgatcaacctcaccacctcttgctcagcctatataccgccatcttcagcaaaccctgatgaaggctacaaagtaagcgcaagtacccacgtaaagacgttaggtcaaggtgtagcccatgaggtggcaagaaatgggctacattttctaccccagaaaactacgatagcccttatgaaacttaagggtcgaaggtggatttagcagtaaactgagagtagagtgcttagttgaacagggccctgaagcgcgtacacaccgcccgtcaccctcctcaagtatacttcaaaggacatttaactaaaacccctacgcatttatatagaggagacaagtcgtaacatggtaagtgtactggaaagtgcacttggacgaaccagagtgtagcttaacacaaagcacccaacttacacttaggagatttcaacttaacttgaccgctctgagctaaacctagccccaaacccactccaccttactaccagacaaccttaaccaaaccatttacccaaataaagtataggcgatagaaattgaaacctggcgcaatagatatagtaccgcaagggaaagatgaaaaattataaccaagcataatatagcaaggactagcccctataccttctgcataatgaattaactagaaataactttgcaaggagagccaaagctaagacccccgaaaccagacgagctacctaagaacagctaaaagagcacacccgtctatgtagcaaaatagtgggaagatttataggtagaggcgacaaacctaccgagcctggtgatagctggttgtccaagatagaatcttagttcaactttaaatttgcccacagaaccctctaaatccccttgtaaatttaactgttagtccaaagaggaacagctctttggacactaggaaaaaaccttgtagagagagtaaaaaatttaacacccatagtaggcctaaaagcagccaccaattaagaaagcgttcaagctcaacacccactacctaaaaaatcccaaacatataactgaactcctcacacccaattggaccaatctatcaccctatagaagaactaatgttagtataagtaacatgaaaacattctcctccgcataagcctgcgtcagattaaaacactgaactgacaattaacagcccaatatctacaatcaaccaacaagtcattattaccctcactgtcaacccaacacaggcatgctcataaggaaaggttaaaaaaagtaaaaggaactcggcaaatcttaccccgcctgtttaccaaaaacatcacctctagcatcaccagtattagaggcaccgcctgcccagtgacacatgtttaacggccgcggtaccctaaccgtgcaaaggtagcataatcacttgttccttaaatagggacctgtatgaatggctccacgagggttcagctgtctcttacttttaaccagtgaaattgacctgcccgtgaagaggcgggcatgacacagcaagacgagaagaccctatggagctttaatttattaatgcaaacagtacctaacaaacccacaggtcctaaactaccaaacctgcattaaaaatttcggttggggcgacctcggagcagaacccaacctccgagcagtacatgctaagacttcaccagtcaaagcgaactactatactcaattgatccaataacttgaccaacggaacaagttaccctagggataacagcgcaatcctattctagagtccatatcaacaatagggtttacgacctcgatgttggatcaggacatcccgatggtgcagccgctattaaaggttcgtttgttcaacgattaaagtcctacgtgatctgagttcagaccggagtaatccaggtcggtttctatctacnttcaaattcctccctgtacgaaaggacaagagaaataaggcctacttcacaaagcgccttcccccgtaaatgatatcatctcaacttagtattatacccacacccacccaagaacagggtttgttaagatggcagagcccggtaatcgcataaaacttaaaactttacagtcagaggttcaattcctcttcttaacaacatacccatggccaacctcctactcctcattgtacccattctaatcgcaatggcattcctaatgcttaccgaacgaaaaattctaggctatatacaactacgcaaaggccccaacgttgtaggcccctacgggctactacagcccttcgctgacgccataaaactcttcaccaaagagcccctaaaacccgccacatctaccatcaccctctacatcaccgccccgaccttagctctcaccatcgctcttctactatgaacccccctccccatacccaaccccctggtcaacctcaacctaggcctcctatttattctagccacctctagcctagccgtttactcaatcctctgatcagggtgagcatcaaactcaaactacgccctgatcggcgcactgcgagcagtagcccaaacaatctcatatgaagtcaccctagccatcattctactatcaacattactaataagtggctcctttaacctctccacccttatcacaacacaagaacacctctgattactcctgccatcatgacccttggccataatatgatttatctccacactagcagagaccaaccgaacccccttcgaccttgccgaaggggagtccgaactagtctcaggcttcaacatcgaatacgccgcaggccccttcgccctattcttcatagccgaatatacaaacattattataataaacaccctcaccaccacaatcttcctaggaacaacatatgacgcactctcccctgaactctacacaacatattttgtcaccaagaccctacttctaacctccctgttcttatgaattcgaacagcatacccccgattccgctacgaccaactcatacacctcctatgaaaaaacttcctaccactcaccctagcattacttatatgatatgtctccatacccattacaatctccagcattccccctcaaacctaagaaatatgtctgataaaagagttactttgatagagtaaataataggagcttaaacccccttatttctaggactatgagaatcgaacccatccctgagaatccaaaattctccgtgccacctatcacaccccatcctaaagtaaggtcagctaaataagctatcgggcccataccccgaaaatgttggttatacccttcccgtactaattaatcccctggcccaacccgtcatctactctaccatctttgcaggcacactcatcactgcgctaagctcgcactgattttttacctgagtaggcctagaaataaacatgctagcttttattccagttctaaccaaaaaaataaaccctcgttccacagaagctgccatcaagtatttcctcacgcaagcaaccgcatccataatccttctaatagctatcctcttcaacaatatactctccggacaatgaaccataaccaatactaccaatcaatactcatcattaataatcataatggctatagcaataaaactaggaatagccccctttcacttctgagtcccagaggttacccaaggcacccctctgacatccggcctgcttcttctcacatgacaaaaactagcccccatctcaatcatataccaaatctctccctcactaaacgtaagccttctcctcactctctcaatcttatccatcatagcaggcagttgaggtggattaaaccaaacccagctacgcaaaatcttagcatactcctcaattacccacataggatgaataatagcagttctaccgtacaaccctaacataaccattcttaatttaactatttatattatcctaactactaccgcattcctactactcaacttaaactccagcaccacgaccctactactatctcgcacctgaaacaagctaacatgactaacacccttaattccatccaccctcctctccctaggaggcctgcccccgctaaccggctttttgcccaaatgggccattatcgaagaattcacaaaaaacaatagcctcatcatccccaccatcatagccaccatcaccctccttaacctctacttctacctacgcctaatctactccacctcaatcacactactccccatatctaacaacgtaaaaataaaatgacagtttgaacatacaaaacccaccccattcctccccacactcatcgcccttaccacgctactcctacctatctccccttttatactaataatcttatagaaatttaggttaaatacagaccaagagccttcaaagccctcagtaagttgcaatacttaatttctgtaacagctaaggactgcaaaaccccactctgcatcaactgaacgcaaatcagccactttaattaagctaagcccttactagaccaatgggacttaaacccacaaacacttagttaacagctaagcaccctaatcaactggcttcaatctacttctcccgccgccgggaaaaaaggcgggagaagccccggcaggtttgaagctgcttcttcgaatttgcaattcaatatgaaaatcacctcggagctggtaaaaagaggcctaacccctgtctttagatttacagtccaatgcttcactcagccattttacctcacccccactgatgttcgccgaccgttgactattctctacaaaccacaaagacattggaacactatacctattattcggcgcatgagctggagtcctaggcacagctctaagcctccttattcgagccgagctgggccagccaggcaaccttctaggtaacgaccacatctacaacgttatcgtcacagcccatgcatttgtaataatcttcttcatagtaatacccatcataatcggaggctttggcaactgactagttcccctaataatcggtgcccccgatatggcgtttccccgcataaacaacataagcttctgactcttacctccctctctcctactcctgctcgcatctgctatagtggaggccggagcaggaacaggttgaacagtctaccctcccttagcagggaactactcccaccctggagcctccgtagacctaaccatcttctccttacacctagcaggtgtctcctctatcttaggggccatcaatttcatcacaacaattatcaatataaaaccccctgccataacccaataccaaacgcccctcttcgtctgatccgtcctaatcacagcagtcctacttctcctatctctcccagtcctagctgctggcatcactatactactaacagaccgcaacctcaacaccaccttcttcgaccccgccggaggaggagaccccattctataccaacacctattctgatttttcggtcaccctgaagtttatattcttatcctaccaggcttcggaataatctcccatattgtaacttactactccggaaaaaaagaaccatttggatacataggtatggtctgagctataatatcaattggcttcctagggtttatcgtgtgagcacaccatatatttacagtaggaatagacgtagacacacgagcatatttcacctccgctaccataatcatcgctatccccaccggcgtcaaagtatttagctgactcgccacactccacggaagcaatatgaaatgatctgctgcagtgctctgagccctaggattcatctttcttttcaccgtaggtggcctgactggcattgtattagcaaactcatcactagacatcgtactacacgacacgtactacgttgtagctcacttccactatgtcctatcaataggagctgtatttgccatcataggaggcttcattcactgatttcccctattctcaggctacaccctagaccaaacctacgccaaaatccatttcactatcatattcatcggcgtaaatctaactttcttcccacaacactttctcggcctatccggaatgccccgacgttactcggactaccccgatgcatacaccacatgaaacatcctatcatctgtaggctcattcatttctctaacagcagtaatattaataattttcatgatttgagaagccttcgcttcgaagcgaaaagtcctaatagtagaagaaccctccataaacctggagtgactatatggatgccccccaccctaccacacattcgaagaacccgtatacataaaatctagacaaaaaaggaaggaatcgaaccccccaaagctggtttcaagccaaccccatggcctccatgactttttcaaaaaggtattagaaaaaccatttcataactttgtcaaagttaaattataggctaaatcctatatatcttaatggcacatgcagcgcaagtaggtctacaagacgctacttcccctatcatagaagagcttatcacctttcatgatcacgccctcataatcattttccttatctgcttcctagtcctgtatgcccttttcctaacactcacaacaaaactaactaatactaacatctcagacgctcaggaaatagaaaccgtctgaactatcctgcccgccatcatcctagtcctcatcgccctcccatccctacgcatcctttacataacagacgaggtcaacgatccctcccttaccatcaaatcaattggccaccaatggtactgaacctacgagtacaccgactacggcggactaatcttcaactcctacatacttcccccattattcctagaaccaggcgacctgcgactccttgacgttgacaatcgagtagtactcccgattgaagcccccattcgtataataattacatcacaagacgtcttgcactcatgagctgtccccacattaggcttaaaaacagatgcaattcccggacgtctaaaccaaaccactttcaccgctacacgaccgggggtatactacggtcaatgctctgaaatctgtggagcaaaccacagtttcatgcccatcgtcctagaattaattcccctaaaaatctttgaaataggacccgtatttaccctatagcaccccctctaccccctctagagcccactgtaaagctaacttagcattaaccttttaagttaaagattaagagaaccaacacctctttacagtgaaatgccccaactaaatactaccgtatggcccaccataattacccccatactccttacactattcctcatcacccaactaaaaatattaaacacaaactaccacctacctccctcaccaaagcccataaaaataaaaaattataacaaaccctgagaaccaaaatgaacgaaaatctgttcgcttcattcattgcccccacaatcctaggcctacccgccgcagtactgatcattctatttccccctctatttatccccacctccaaatatctcatcaacaaccgactaatcaccacccaacaatgactaatcaaactaacctcaaaacaaatgataaccatacacaacactaaaggacgaacctgatctcttatactagtatccttaatcatttttattgccacaactaacctcctcggactcctgcctcactcatttacaccaaccacccaactatctataaacctagccatggccatccccttatgagcgggcgcagtgattataggctttcgctctaagattaaaaatgccctagcccacttcttaccacaaggcacacctacaccccttatccccatactagttattatcgaaaccatcagcctactcattcaaccaatagccctggccgtacgcctaaccgctaacattactgcaggccacctactcatgcacctaattggaagcgccaccctagcaatatcaaccattaaccttccctctacacttatcatcttcacaattctaattctactgactatcctagaaatcgctgtcgccttaatccaagcctacgttttcacacttctagtaagcctctacctgcacgacaacacataatgacccaccaatcacatgcctatcatatagtaaaacccagcccatgacccctaacaggggccctctcagccctcctaatgacctccggcctagccatgtgatttcacttccactccataacgctcctcatactaggcctactaaccaacacactaaccatataccaatgatggcgcgatgtaacacgagaaagcacataccaaggccaccacacaccacctgtccaaaaaggccttcgatacgggataatcctatttattacctcagaagtttttttcttcgcaggatttttctgagccttttaccactccagcctagcccctaccccccaattaggagggcactggcccccaacaggcatcaccccgctaaatcccctagaagtcccactcctaaacacatccgtattactcgcatcaggagtatcaatcacctgagctcaccatagtctaatagaaaacaaccgaaaccaaataattcaagcactgcttattacaattttactgggtctctattttaccctcctacaagcctcagagtacttcgagtctcccttcaccatttccgacggcatctacggctcaacattttttgtagccacaggcttccacggacttcacgtcattattggctcaactttcctcactatctgcttcatccgccaactaatatttcactttacatccaaacatcactttggcttcgaagccgccgcctgatactggcattttgtagatgtagtttgactatttctgtatgtctccatctattgatgagggtcttactcttttagtataaatagtaccgttaacttccaattaactagctttgacaacattcaaaaaagagtaataaacttcgccttaattttaataatcaacaccctcctagccttactactaataattattacattttgactaccacaactcaacggctacatagaaaaatccaccccttacgagtgcggcttcgaccctatatcccccgcccgcgtccctttctccataaaattcttcttagtagctatcaccttcttattatttgatctagaaattgccctccttttacccctaccatgagccctacaaacaactaacctgccactaatagttatgtcatccctcttattaatcatcatcctagccctaagtctggcctatgagtgactacaaaaaggattagactgagccgaattggtatatagtttaaacaaaacgaatgatttcgactcattaaattatgataatcatatttaccaaatgcccctcatttacataaatattatactagcatttaccatctcacttctaggaatactagtatatcgctcacacctcatatcctccctactatgcctagaaggaataatactatcgctgttcattatagctactctcataaccctcaacacccactccctcttagccaatattgtgcctattgccatactagtctttgccgcctgcgaagcagcggtgggcctagccctactagtctcaatctccaacacatatggcctagactacgtacataacctaaacctactccaatgctaaaactaatcgtcccaacaattatattactaccactgacatgactttccaaaaaacacataatttgaatcaacacaaccacccacagcctaattattagcatcatccctctactattttttaaccaaatcaacaacaacctatttagctgctccccaaccttttcctccgaccccctaacaacccccctcctaatactaactacctgactcctacccctcacaatcatggcaagccaacgccacttatccagtgaaccactatcacgaaaaaaactctacctctctatactaatctccctacaaatctccttaattataacattcacagccacagaactaatcatattttatatcttcttcgaaaccacacttatccccaccttggctatcatcacccgatgaggcaaccagccagaacgcctgaacgcaggcacatacttcctattctacaccctagtaggctcccttcccctactcatcgcactaatttacactcacaacaccctaggctcactaaacattctactactcactctcactgcccaagaactatcaaactcctgagccaacaacttaatatgactagcttacacaatagcttttatagtaaagatacctctttacggactccacttatgactccctaaagcccatgtcgaagcccccatcgctgggtcaatagtacttgccgcagtactcttaaaactaggcggctatggtataatacgcctcacactcattctcaaccccctgacaaaacacatagcctaccccttccttgtactatccctatgaggcataattataacaagctccatctgcctacgacaaacagacctaaaatcgctcattgcatactcttcaatcagccacatagccctcgtagtaacagccattctcatccaaaccccctgaagcttcaccggcgcagtcattctcataatcgcccacggacttacatcctcattactattctgcctagcaaactcaaactacgaacgcactcacagtcgcatcataatcctctctcaaggacttcaaactctactcccactaatagctttttgatgacttctagcaagcctcgctaacctcgccttaccccccactattaacctactgggagaactctctgtgctagtaaccacgttctcctgatcaaatatcactctcctacttacaggactcaacatactagtcacagccctatactccctctacatatttaccacaacacaatggggctcactcacccaccacattaacaacataaaaccctcattcacacgagaaaacaccctcatgttcatacacctatcccccattctcctcctatccctcaaccccgacatcattaccgggttttcctcttgtaaatatagtttaaccaaaacatcagattgtgaatctgacaacagaggcttacgaccccttatttaccgagaaagctcacaagaactgctaactcatgcccccatgtctaacaacatggctttctcaacttttaaaggataacagctatccattggtcttaggccccaaaaattttggtgcaactccaaataaaagtaataaccatgcacactactataaccaccctaaccctgacttccctaattccccccatccttaccaccctcgttaaccctaacaaaaaaaactcatacccccattatgtaaaatccattgtcgcatccacctttattatcagtctcttccccacaacaatattcatatgcctagaccaagaagttattatctcgaactgacactgagccacaacccaaacaacccagctctccctaagcttcaaactagactacttctccataatattcatccctgtagcattgttcgttacatggtccatcatagaattctcactgtgatatataaactcagacccaaacattaatcagttcttcaaatatctactcattttcctaattaccatactaatcttagttaccgctaacaacctattccaactgttcatcggctgagagggcgtaggaattatatccttcttgctcatcagttgatgatacgcccgagcagatgccaacacagcagccattcaagcaatcctatacaaccgtatcggcgatatcggtttcatcctcgccttagcatgatttatcctacactccaactcatgagacccacaacaaatagcccttctaaacgctaatccaagccttaccccactactaggcctcctcctagcagcagcaggcaaatcagcccaattaggtctccacccctgactcccctcagccatagaaggccccaccccagtctcagccctactccactcaagcactatagttgtagcaggaatcttcttactcatccgcttccaccccctagcagaaaatagcccactaatccaaactctaacactatgcttaggcgctatcaccactctgttcgcagcagtctgcgcccttacacaaaatgacatcaaaaaaatcgtagccttctccacttcaagtcaactaggactcataatagttacaatcggcatcaaccaaccacacctagcattcctgcacatctgtacccacgccttcttcaaagccatactatttatgtgctccgggtccatcatccacaaccttaacaatgaacaagatattcgaaaaataggaggactactcaaaaccatacctctcacttcaacctccctcaccattggcagcctagcattagcaggaatacccttcctcacaggtttctactccaaagaccacatcatcgaaaccgcaaacatatcatacacaaacgcctgagccctatctattactctcatcgctacctccctgacaagcgcctatagcactcgaataattcttctcaccctaacaggtcaacctcgcttccccacccttactaacattaacgaaaataaccccaccctactaaaccccattaaacgcctggcagccggaagcctattcgcaggatttctcattactaacaacatttcccccgcatcccccttccaaacaacagtccccctctacctaaaactcacagccctcgctgtcactttcctaggacttctaacagccctagacctcaactacctaaccaacaaacttaaaataaaatccccactatgcacattttatttctccaacatactcggattctaccctagcatcacacaccgcacaatcccctatctaggccttcttacgagccaaaacctgcccctactcctcctagacctaacctgactagaaaagctattacctaaaacaatttcacagcaccaaatctccacctccatcatcacctcaacccaaaaaggcataattaaactttacttcctctctttcttcttcccactcatcctaaccctactcctaatcacataacctattcccccgagcaatctcaattacaatatatacaccaacaaacaatgttcaaccagtaactactactaatcaacgcccataatcatacaaagcccccgcaccaataggatcctcccgaatcaaccctgacccctctccttcataaattattcagcttcctacactattaaagtttaccacaaccaccaccccatcatactctttcacccacagcaccaatcctacctccatcgctaaccccactaaaacactcaccaagacctcaacccctgacccccatgcctcaggatactcctcaatagccatcgctgtagtatatccaaagacaaccatcattccccctaaataaattaaaaaaactattaaacccatataacctcccccaaaattcagaataataacacacccgaccacaccgctaacaatcaatactaaacccccataaataggagaaggcttagaagaaaaccccacaaaccccattactaaacccacactcaacagaaacaaagcatacatcattattctcgcacggactacaaccacgaccaatgatatgaaaaaccatcgttgtatttcaactacaagaacaccaatgaccccaatacgcaaaattaaccccctaataaaattaattaaccactcattcatcgacctccccaccccatccaacatctccgcatgatgaaacttcggctcactccttggcgcctgcctgatcctccaaatcaccacaggactattcctagccatgcactactcaccagacgcctcaaccgccttttcatcaatcgcccacatcactcgagacgtaaattatggctgaatcatccgctaccttcacgccaatggcgcctcaatattctttatctgcctcttcctacacatcggacgaggcctatattacggatcatttctctactcagaaacctgaaacatcggcattatcctcctgcttgcaactatagcaacagccttcataggctatgtcctcccgtgaggccaaatatcattctgaggggccacagtaattacaaacttactatccgccatcccatacattgggacagacctagttcaatgaatctgaggaggctactcagtagacagtcccaccctcacacgattctttacctttcacttcatcttgcccttcattattgcagccctagcagcactccacctcctattcttgcacgaaacgggatcaaacaaccccctaggaatcacctcccattccgataaaatcaccttccacccttactacacaatcaaagacgccctcggcttacttctcttccttctctccttaatgacattaacactattctcaccagacctcctaggcgacccagacaattataccctagccaaccccttaaacacccctccccacatcaagcccgaatgatatttcctattcgcctacacaattctccgatccgtccctaacaaactaggaggcgtccttgccctattactatccatcctcatcctagcaataatccccatcctccatatatccaaacaacaaagcataatatttcgcccactaagccaatcactttattgactcctagccgcagacctcctcattctaacctgaatcggaggacaaccagtaagctacccttttaccatcattggacaagtagcatccgtactatacttcacaacaatcctaatcctaataccaactatctccctaattgaaaacaaaatactcaaatgggcctgtccttgtagtataaactaatacaccagtcttgtaagccggagatgaaaacctttttccaaggacaaatcagagaaaaagtctttaactccaccattagcacccaaagctaagattctaatttaaactattctctgttctttcatggggaagcagatttgggtaccacccaagtattgactcacccatcaacaaccgctatgtatttcgtacattactgccagccaccatgaatattgtacggtaccataaatacttgaccacctgtagtacataaaaacccaatccacatcaaaaccccctccccatgcttacaagcaagtacagcaatcaaccctcaactatcacacatcaactgcaactccaaagccacccctcacccactaggataccaacaaacctacccacccttaacagtacatagtacataaagccatttaccgtacatagcacattacagtcaaatcccttctcgtccccatggatgacccccctcagataggggtcccttgaccaccatcctccgtgaaatcaatatcccgcacaagagtgctactctcctcgctccgggcccataacacttgggggtagctaaagtgaactgtatccgacatctggttcctacttcagggtcataaagcctaaatagcccacacgttccccttaaataagacatcacgatg

SEQ ID NO: 526 - DNA, 16569 bp, Homo sapiens mitochondrial; identical to SEQ ID NO: 1
  3107: "n" refers to a nucleotide at position 3107 of the Cambridge Reference Sequence (CRS, Anderson et al. 1981 Nature 290:457-465), later determined to be absent from the human mtDNA sequence according to the revised CRS (rCRS, Andrews et al. 1999 Nature Genetics 23:147); "n" therefore represents a single nucleotide deletion at a position corresponding to nucleotide 3107 of SEQ ID NO:1 as provided herein.

SEQ ID NO: 527 - DNA, 16569 bp, Homo sapiens mitochondrial
  3107: "n" refers to a nucleotide at position 3107 of the Cambridge Reference Sequence (CRS, Anderson et al. 1981 Nature 290:457-465), later determined to be absent from the human mtDNA sequence according to the revised CRS (rCRS, Andrews et al. 1999 Nature Genetics 23:147); "n" therefore represents a single nucleotide deletion at a position corresponding to nucleotide 3107 of SEQ ID NO:1 as provided herein.
gatcacaggtctatcaccctattaaccactcacgggagctctccatgcatttggtattttcgtctggggggtatgcacgcgatagcattgcgagacgctggagccggagcaccctatgtcgcagtatctgtctttgattcctgcctcatcctattatttatcgcacctacgttcaatattacaggcgaacatacttactaaagtgtgttaattaattaatgcttgtaggacataataataacaattgaatgtctgcacagccactttccacacagacatcataacaaaaaatttccaccaaaccccccctcccccgcttctggccacagcacttaaacacatctctgccaaaccccaaaaacaaagaaccctaacaccagcctaaccagatttcaaattttatcttttggcggtatgcacttttaacagtcaccccccaactaacacattattttcccctcccactcccatactactaatctcatcaatacaacccccgcccatcctacccagcacacacacaccgctgctaaccccataccccgaaccaaccaaaccccaaagacaccccccacagtttatgtagcttacctcctcaaagcaatacactgaaaatgtttagacgggctcacatcaccccataaacaaataggtttggtcctagcctttctattagctcttagtaagattacacatgcaagcatccccgttccagtgagtccaccctctaaatcaccacgatcaaaaggaacaagcatcaagcacgcagcaatgcagctcaaaacgcttagcctagccacacccccacgggaaacagcagtgattaacctttagcaataaacgaaagtttaactaagctatactaaccccagggttggtcaatttcgtgccagccaccgcggtcacacgattaacccaagtcaatagaagccggcgtaaagagtgttttagatcaccccctccccaataaagctaaaactcacctgagttgtaaaaaactccagttgacacaaaatagactacgaaagtggctttaacatatctgaacacacaatagctaagacccaaactgggattagataccccactatgcttagccctaaacctcaacagttaaatcaacaaaactgctcgccagaacactacgagccacagcttaaaactcaaaggacctggcggtgcttcatatccctctagaggagcctgttctgtaatcgataaaccccgatcaacctcaccacctcttgctcagcctatataccgccatcttcagcaaaccctgatgaaggctacaaagtaagcgcaagtacccacgtaaagacgttaggtcaaggtgtagcccatgaggtggcaagaaatgggctacattttctaccccagaaaactacgatagcccttatgaaacttaagggtcgaaggtggatttagcagtaaactaagagtagagtgcttagttgaacagggccctgaagcgcgtacacaccgcccgtcaccctcctcaagtatacttcaaaggacatttaactaaaacccctacgcatttatatagaggagacaagtcgtaacatggtaagtgtactggaaagtgcacttggacgaaccagagtgtagcttaacacaaagcacccaacttacacttaggagatttcaacttaacttgaccgctctgagctaaacctagccccaaacccactccaccttactaccagacaaccttagccaaaccatttacccaaataaagtataggcgatagaaattgaaacctggcgcaatagatatagtaccgcaagggaaagatgaaaaattataaccaagcataatatagcaaggactaacccctataccttctgcataatgaattaactagaaataactttgcaaggagagccaaagctaagacccccgaaaccagacgagctacctaagaacagctaaaagagcacacccgtctatgtagcaaaatagtgggaagatttataggtagaggcgacaaacctaccgagcctggtgatagctggttgtccaagatagaatcttagttcaactttaaatttgcccacagaaccctctaaatccccttgtaaatttaactgttagtccaaagaggaacagctctttggacactaggaaaaaaccttgtagagagagtaaaaaatttaacacccatagtaggcctaaaagcagccaccaattaagaaagcgttcaagctcaacacccactacctaaaaaatcccaaacatataactgaactcctcacacccaattggaccaatctatcaccctatagaagaactaatgttagtataagtaacatgaaaacattctcctccgcataagcctgcgtcagattaaaacactgaactgacaattaacagcccaatatctacaatcaaccaacaagtcattattaccctcactgtcaacccaacacaggcatgctcataaggaaaggttaaaaaaagtaaaaggaactcggcaaatcttaccccgcctgtttaccaaaaacatcacctctagcatcaccagtattagaggcaccgcctgcccagtgacacatgtttaacggccgcggtaccctaaccgtgcaaaggtagcataatcacttgttccttaaatagggacctgtatgaatggctccacgagggttcagctgtctcttacttttaaccagtgaaattgacctgcccgtgaagaggcgggcataacacagcaagacgagaagaccctatggagctttaatttattaatgcaaacagtacctaacaaacccacaggtcctaaactaccaaacctgcattaaaaatttcggttggggcgacctcggagcagaacccaacctccgagcagtacatgctaagacttcaccagtcaaagcgaactactatactcaattgatccaataacttgaccaacggaacaagttaccctagggataacagcgcaatcctattctagagtccatatcaacaatagggtttacgacctcgatgttggatcaggacatcccgatggtgcagccgctattaaaggttcgtttgttcaacgattaaagtcctacgtgatctgagttcagaccggagtaatccaggtcggtttctatctacnttcaaattcctccctgtacgaaaggacaagagaaataaggcctacttcacaaagcgccttcccccgtaaatgatatcatctcaacttagtattatacccacacccacccaagaacagggtttgttaagatggcagagcccggtaatcgcataaaacttaaaactttacagtcagaggttcaattcctcttcttaacaacatacccatggccaacctcctactcctcattgtacccattctaatcgcaatggcattcctaatgcttaccgaacgaaaaattctaggctatatacaactacgcaaaggccccaacgttgtaggcccctacgggctactacaacccttcgctgacgccataaaactcttcaccaaagagcccctaaaacccgccacatctaccatcaccctctacatcaccgccccgaccttagctctcaccatcgctcttctactatgaacccccctccccatacccaaccccctggtcaacctcaacctaggcctcctatttattctagccacctctagcctagccgtttactcaatcctctgatcagggtgagcatcaaactcaaactacgccctgatcggcgcactgcgagcagtagcccaaacaatctcatatgaagtcaccctagccatcattctactatcaacattactaataagtggctcctttaacctctccacccttatcacaacacaagaacacctctgattactcctgccatcatgacccttggccataatatgatttatctccacactagcagagaccaaccgaacccccttcgaccttgccgaaggggagtccgaactagtctcaggcttcaacatcgaatacgccgcaggccccttcgccctattcttcatagccgaatacacaaacattattataataaacaccctcaccactacaatcttcctaggaacaacatatgacgcactctcccctgaactctacacaacatattttgtcaccaagaccctacttctaacctccctgttcttatgaattcgaacagcatacccccgattccgctacgaccaactcatacacctcctatgaaaaaacttcctaccactcaccctagcattacttatatgatatgtctccatacccattacaatctccagcattccccctcaaacctaagaaatatgtctgataaaagagttactttgatagagtaaataataggagcttaaacccccttatttctaggactatgagaatcgaacccatccctgagaatccaaaattctccgtgccacctatcacaccccatcctaaagtaaggtcagctaaataagctatcgggcccataccccgaaaatgttggttatacccttcccgtactaattaatcccctggcccaacccgtcatctactctaccatctttgcaggcacactcatcacagcgctaagctcgcactgattttttacctgagtaggcctagaaataaacatgctagcttttattccagttctaaccaaaaaaataaaccctcgttccacagaagctgccatcaagtatttcctcacgcaagcaaccgcatccataatccttctaatagctatcctcttcaacaatatactctccggacaatgaaccataaccaatactaccaatcaatactcatcattaataatcataatagctatagcaataaaactaggaatagccccctttcacttctgagtcccagaggttacccaaggcacccctctgacatccggcctgcttcttctcacatgacaaaaactagcccccatctcaatcatataccaaatctctccctcactaaacgtaagccttctcctcactctctcaatcttatccatcatagcaggcagttgaggtggattaaaccaaacccagctacgcaaaatcttagcatactcctcaattacccacataggatgaataatagcagttctaccgtacaaccctaacataaccattcttaatttaactatttatattatcctaactactaccgcattcctactactcaacttaaactccagcaccacgaccctactactatctcgcacctgaaacaagctaacatgactaacacccttaattccatccaccctcctctccctaggaggcctgcccccgctaaccggctttttgcccaaatgggccattatcgaagaattcacaaaaaacaatagcctcatcatccccaccatcatagccaccatcaccctccttaacctctacttctacctacgcctaatctactccacctcaatcacactactccccatatctaacaacgtaaaaataaaatgacagtttgaacatacaaaacccaccccattcctccccacactcatcgcccttaccacgctactcctacctatctccccttttatactaataatcttatagaaatttaggttaaatacagaccaagagccttcaaagccctcagtaagttgcaatacttaatttctgtaacagctaaggactgcaaaaccccactctgcatcaactgaacgcaaatcagccactttaattaagctaagcccttactagaccaatgggacttaaacccacaaacacttagttaacagctaagcaccctaatcaactggcttcaatctacttctcccgccgccgggaaaaaaggcgggagaagccccggcaggtttgaagctgcttcttcgaatttgcaattcaatatgaaaatcacctcggagctggtaaaaagaggcctaacccctgtctttagatttacagtccaatgcttcactcagccattttacctcacccccactgatgttcgccgaccgttgactattctctacaaaccacaaagacattggaacactatacctattattcggcgcatgagctggagtcctaggcacagctctaagcctccttattcgagccgagctgggccagccaggcaaccttctaggtaacgaccacatctacaacgttatcgtcacagcccatgcatttgtaataatcttcttcatagtaatacccatcataatcggaggctttggcaactgactagttcccctaataatcggtgcccccgatatggcgtttccccgcataaacaacataagcttctgactcttacctccctctctcctactcctgctcgcatctgctatagtggaggccggagcaggaacaggttgaacagtctaccctcccttagcagggaactactcccaccctggagcctccgtagacctaaccatcttctccttacacctagcaggtgtctcctctatcttaggggccatcaatttcatcacaacaattatcaatataaaaccccctgccataacccaataccaaacgcccctcttcgtctgatccgtcctaatcacagcagtcctacttctcctatctctcccagtcctagctgctggcatcactatactactaacagaccgcaacctcaacaccaccttcttcgaccccgccggaggaggagaccccattctataccaacacctattctgatttttcggtcaccctgaagtttatattcttatcctaccaggcttcggaataatctcccatattgtaacttactactccggaaaaaaagaaccatttggatacataggtatggtctgagctatgatatcaattggcttcctagggtttatcgtgtgagcacaccatatatttacagtaggaatagacgtagacacacgagcatatttcacctccgctaccataatcatcgctatccccaccggcgtcaaagtatttagctgactcgccacactccacggaagcaatatgaaatgatctgctgcagtgctctgagccctaggattcatctttcttttcaccgtaggtggcctgactggcattgtattagcaaactcatcactagacatcgtactacacgacacgtactacgttgtagcccacttccactatgtcctatcaataggagctgtatttgccatcataggaggcttcattcactgatttcccctattctcaggctacaccctagaccaaacctacgccaaaatccatttcactatcatattcatcggcgtaaatctaactttcttcccacaacactttctcggcctatccggaatgccccgacgttactcggactaccccgatgcatacaccacatgaaacatcctatcatctgtaggctcattcatttctctaacagcagtaatattaataattttcatgatttgagaagccttcgcttcgaagcgaaaagtcctaatagtagaagaaccctccataaacctggagtgactatatggatgccccccaccctaccacacattcgaagaacccgtatacataaaatctagacaaaaaaggaaggaatcgaaccccccaaagctggtttcaagccaaccccatggcctccatgactttttcaaaaaggtattagaaaaaccatttcataactttgtcaaagttaaattataggctaaatcctatatatcttaatggcacatgcagcgcaagtaggtctacaagacgctacttcccctatcatagaagagcttatcacctttcatgatcacgccctcataatcattttccttatctgcttcctagtcctgtatgcccttttcctaacactcacaacaaaactaactaatactaacatctcagacgctcaggaaatagaaaccgtctgaactatcctgcccgccatcatcctagtcctcatcgccctcccatccctacgcatcctttacataacagacgaggtcaacgatccctcccttaccatcaaatcaattggccaccaatggtactgaacctacgagtacaccgactacggcggactaatcttcaactcctacatacttcccccattattcctagaaccaggcgacctgcgactccttgacgttgacaatcgagtagtactcccgattgaagcccccattcgtataataattacatcacaagacgtcttgcactcatgagctgtccccacattaggcttaaaaacagatgcaattcccggacgtctaaaccaaaccactttcaccgctacacgaccgggggtatactacggtcaatgctctgaaatctgtggagcaaaccacagtttcatgcccatcgtcctagaattaattcccctaaaaatctttgaaatagggcccgtatttaccctatagcaccccctctaccccctctagagcccactgtaaagctaacttagcattaaccttttaagttaaagattaagagaaccaacacctctttacagtgaaatgccccaactaaatactaccgtatggcccaccataattacccccatactccttacactattcctcatcacccaactaaaaatattaaacacaaactaccacctacctccctcaccaaagcccataaaaataaaaaattataacaaaccctgagaaccaaaatgaacgaaaatctgttcgcttcattcattgcccccacaatcctaggcctacccgccgcagtactgatcattctatttccccctctattgatccccacctccaaatatctcatcaacaaccgactaatcaccacccaacaatgactaatcaaactaacctcaaaacaaatgataaccatacacaacactaaaggacgaacctgatctcttatactagtatccttaatcatttttattgccacaactaacctcctcggactcctgcctcactcatttacaccaaccacccaactatctataaacctagccatggccatccccttatgagcgggcacagtgattataggctttcgctctaagattaaaaatgccctagcccacttcttaccacaaggcacacctacaccccttatccccatactagttattatcgaaaccatcagcctactcattcaaccaatagccctggccgtacgcctaaccgctaacattactgcaggccacctactcatgcacctaattggaagcgccaccctagcaatatcaaccattaaccttccctctacacttatcatcttcacaattctaattctactgactatcctagaaatcgctgtcgccttaatccaagcctacgttttcacacttctagtaagcctctacctgcacgacaacacataatgacccaccaatcacatgcctatcatatagtaaaacccagcccatgacccctaacaggggccctctcagccctcctaatgacctccggcctagccatgtgatttcacttccactccataacgctcctcatactaggcctactaaccaacacactaaccatataccaatgatggcgcgatgtaacacgagaaagcacataccaaggccaccacacaccacctgtccaaaaaggccttcgatacgggataatcctatttattacctcagaagtttttttcttcgcaggatttttctgagccttttaccactccagcctagcccctaccccccaattaggagggcactggcccccaacaggcatcaccccgctaaatcccctagaagtcccactcctaaacacatccgtattactcgcatcaggagtatcaatcacctgagctcaccatagtctaatagaaaacaaccgaaaccaaataattcaagcactgcttattacaattttactgggtctctattttaccctcctacaagcctcagagtacttcgagtctcccttcaccatttccgacggcatctacggctcaacattttttgtagccacaggcttccacggacttcacgtcattattggctcaactttcctcactatctgcttcatccgccaactaatatttcactttacatccaaacatcactttggcttcgaagccgccgcctgatactggcattttgtagatgtggtttgactatttctgtatgtctccatctattgatgagggtcttactcttttagtataaatagtaccgttaacttccaattaactagttttgacaacattcaaaaaagagtaataaacttcgccttaattttaataatcaacaccctcctagccttactactaataattattacattttgactaccacaactcaacggctacatagaaaaatccaccccttacgagtgcggcttcgaccctatatcccccgcccgcgtccctttctccataaaattcttcttagtagctattaccttcttattatttgatctagaaattgccctccttttacccctaccatgagccctacaaacaactaacctgccactaatagttatgtcatccctcttattaatcatcatcctagccctaagtctggcctatgagtgactacaaaaaggattagactgaaccgaattggtatatagtttaaacaaaacgaatgatttcgactcattaaattatgataatcatatttaccaaatgcccctcatttacataaatattatactagcatttaccatctcacttctaggaatactagtatatcgctcacacctcatatcctccctactatgcctagaaggaataatactatcgctgttcattatagctactctcataaccctcaacacccactccctcttagccaatattgtgcctattgccatactagtctttgccgcctgcgaagcagcggtgggcctagccctactagtctcaatctccaacacatatggcctagactacgtacataacctaaacctactccaatgctaaaactaatcgtcccaacaattatattactaccactgacatgactttccaaaaaacacataatttgaatcaacacaaccacccacagcctaattattagcatcatccctctactattttttaaccaaatcaacaacaacctatttagctgttccccaaccttttcctccgaccccctaacaacccccctcctaatactaactacctgactcctacccctcacaatcatggcaagccaacgccacttatccagtgaaccactatcacgaaaaaaactctacctctctatactaatctccctacaaatctccttaattataacattcacagccacagaactaatcatattttatatcttcttcgaaaccacacttatccccaccttggctatcatcacccgatgaggcaaccagccagaacgcctgaacgcaggcacatacttcctattctacaccctagtaggctcccttcccctactcatcgcactaatttacactcacaacaccctaggctcactaaacattctactactcactctcactgcccaagaactatcaaactcctgagccaacaacttaatatgactagcttacacaatagcttttatagtaaagatacctctttacggactccacttatgactccctaaagcccatgtcgaagcccccatcgctgggtcaatagtacttgccgcagtactcttaaaactaggcggctatggtataatacgcctcacactcattctcaaccccctgacaaaacacatagcctaccccttccttgtactatccctatgaggcataattataacaagctccatctgcctacgacaaacagacctaaaatcgctcattgcatactcttcaatcagccacatagccctcgtagtaacagccattctcatccaaaccccctgaagcttcaccggcgcagtcattctcataatcgcccacgggcttacatcctcattactattctgcctagcaaactcaaactacgaacgcactcacagtcgcatcataatcctctctcaaggacttcaaactctactcccactaatagctttttgatgacttctagcaagcctcgctaacctcgccttaccccccactattaacctactgggagaactctctgtgctagtaaccacgttctcctgatcaaatatcactctcctacttacaggactcaacatactagtcacagccctatactccctctacatatttaccacaacacaatggggctcactcacccaccacattaacaacataaaaccctcattcacacgagaaaacaccctcatgttcatacacctatcccccattctcctcctatccctcaaccccgacatcattaccgggttttcctcttgtaaatatagtttaaccaaaacatcagattgtgaatctgacaacagaggcttacgaccccttatttaccgagaaagctcacaagaactgctaactcatgcccccatgtctaacaacatggctttctcaacttttaaaggataacagctatccattggtcttaggccccaaaaattttggtgcaactccaaataaaagtaataaccatgcacactactataaccaccctaaccctgacttccctaattccccccatccttaccaccctcgttaaccctaacaaaaaaaactcatacccccattatgtaaaatccattgtcgcatccacctttattatcagtctcttccccacaacaatattcatgtgcctagaccaagaagttattatctcgaactgacactgagccacaacccaaacaacccagctctccctaagcttcaaactagactacttctccataatattcatccctgtagcattgttcgttacatggtccatcatagaattctcactgtgatatataaactcagacccaaacattaatcagttcttcaaatatctactcatcttcctaattaccatactaatcttagttaccgctaacaacctattccaactgttcatcggctgagagggcgtaggaattatatccttcttgctcatcagttgatgatacgcccgagcagatgccaacacagcagccattcaagcaatcctatacaaccgtatcggcgatatcggtttcatcctcgccttagcatgatttatcctacactccaactcatgagacccacaacaaatagcccttctaaacgctaatccaagcctcaccccactactaggcctcctcctagcagcagcaggcaaatcagcccaattaggtctccacccctgactcccctcagccatagaaggccccaccccagtctcagccctactccactcaagcactatagttgtagcaggaatcttcttactcatccgcttccaccccctagcagaaaatagcccactaatccaaactctaacactatgcttaggcgctatcaccactctgttcgcagcagtctgcgcccttacacaaaatgacatcaaaaaaatcgtagccttctccacttcaagtcaactaggactcataatagttacaatcggcatcaaccaaccacacctagcattcctgcacatctgtacccacgccttcttcaaagccatactatttatgtgctccgggtccatcatccacaaccttaacaatgaacaagatattcgaaaaataggaggactactcaaaaccatacctctcacttcaacctccctcaccattggcagcctagcattagcaggaatacctttcctcacaggtttctactccaaagaccacatcatcgaaaccgcaaacatatcatacacaaacgcctgagccctatctattactctcatcgctacctccctgacaagcgcctatagcactcgaataattcttctcaccctaacaggtcaacctcgcttccccacccttactaacattaacgaaaataaccccaccctactaaaccccattaaacgcctggcagccggaagcctattcgcaggatttctcattactaacaacatttcccccgcatcccccttccaaacaacaatccccctctacctaaaactcacagccctcgctgtcactttcctaggacttctaacagccctagacctcaactacctaaccaacaaacttaaaataaaatccccactatgcacattttatttctccaacatactcggattctaccctagcatcacacaccgcacaatcccctatctagcccttcttacgagccaaaacctgcccctactcctcctagacctaacctgactagaaaagctattacctaaaacaatttcacagcaccaaatctccacctccatcatcacctcaacccaaaaaggcataattaaactttacttcctctctttcttcttcccactcatcctaaccctactcctaatcacataacctattcccccgagcaatctcaattacaatatatacaccaacaaacaatgttcaaccagtaactactactaatcaacgcccataatcatacaaagcccccgcaccaataggatcctcccgaatcaaccctgacccctctccttcataaattattcagcttcctacactattaaagtttaccacaaccaccaccccatcatactctttcacccacagcaccaatcctacctccatcgctaaccccactaaaacactcaccaagacctcaacccctgacccccatgcctcaggatactcctcaatagccatcgctgtagtatatccaaagacaaccatcattccccctaaataaattaaaaaaactattaaacccatataacctcccccaaaattcagaataataacacacccgaccacaccgctaacaatcaatactaaacccccataaataggagaaggcttagaagaaaaccccacaaaccccattactaaacccacactcaacagaaacaaagcatacatcattattctcgcacggactacaaccacgaccaatgatatgaaaaaccatcgttgtatttcaactacaagaacaccaatgaccccaatacgcaaaactaaccccctaataaaattaattaaccactcattcatcgacctccccaccccatccaacatctccgcatgatgaaacttcggctcactccttggcgcctgcctgatcctccaaatcaccacaggactattcctagccatgcactactcaccagacgcctcaaccgccttttcatcaatcgcccacatcactcgagacgtaaattatggctgaatcatccgctaccttcacgccaatggcgcctcaatattctttatctgcctcttcctacacatcgggcgaggcctatattacggatcatttctctactcagaaacctgaaacatcggcattatcctcctgcttgcaactatagcaacagccttcataggctatgtcctcccgtgaggccaaatatcattctgaggggccacagtaattacaaacttactatccgccatcccatacattgggacagacctagttcaatgaatctgaggaggctactcagtagacagtcccaccctcacacgattctttacctttcacttcatcttgcccttcattattgcagccctagcaacactccacctcctattcttgcacgaaacgggatcaaacaaccccctaggaatcacctcccattccgataaaatcaccttccacccttactacacaatcaaagacgccctcggcttacttctcttccttctctccttaatgacattaacactattctcaccagacctcctaggcgacccagacaattataccctagccaaccccttaaacacccctccccacatcaagcccgaatgatatttcctattcgcctacacaattctccgatccgtccctaacaaactaggaggcgtccttgccctattactatccatcctcatcctagcaataatccccatcctccatatatccaaacaacaaagcataatatttcgcccactaagccaatcactttattgactcctagccgcagacctcctcattctaacctgaatcggaggacaaccagtaagctacccttttaccatcattggacaagtagcatccgtactatacttcacaacaatcctaatcctaataccaactatctccctaattgaaaacaaaatactcaaatgggcctgtccttgtagtataaactaatacaccagtcttgtaaaccggagatgaaaacctttttccaaggacaaatcagagaaaaagtctttaactccaccattagcacccaaagctaagattctaatttaaactattctctgttctttcatggggaagcagatttgggtaccacccaagtattgactcacccatcaacaaccgctatgtatttcgtacattactgccagccaccatgaatattgtacggtaccataaatacttgaccacctgtagtacataaaaacccaatccacatcaaaaccccctccccatgcttacaagcaagtacagcaatcaaccctcaactatcacacatcaactgcaactccaaagccacccctcacccactaggataccaacaaacctacccacccttaacagtacatagtacataaagccatttaccgtacatagcacattacagtcaaatcccttctcgtccccatggatgacccccctcagataggggtcccttgaccaccatcctccgtgaaatcaatatcccgcacaagagtgctactctcctcgctccgggcccataacacttgggggtagctaaagtgaactgtatccgacatctggttcctacttcagggtcataaagcctaaatagcccacacgttccccttaaataagacatcacgatg

SEQ ID NO: 528 - DNA, 16569 bp, Homo sapiens mitochondrial; identical to SEQ ID NO: 520
  3107: "n" refers to a nucleotide at position 3107 of the Cambridge Reference Sequence (CRS, Anderson et al. 1981 Nature 290:457-465), later determined to be absent from the human mtDNA sequence according to the revised CRS (rCRS, Andrews et al. 1999 Nature Genetics 23:147); "n" therefore represents a single nucleotide deletion at a position corresponding to nucleotide 3107 of SEQ ID NO:1 as provided herein.

SEQ ID NO: 529 - DNA, 16569 bp, Homo sapiens mitochondrial
  3107: "n" refers to a nucleotide at position 3107 of the Cambridge Reference Sequence (CRS, Anderson et al. 1981 Nature 290:457-465), later determined to be absent from the human mtDNA sequence according to the revised CRS (rCRS, Andrews et al. 1999 Nature Genetics 23:147); "n" therefore represents a single nucleotide deletion at a position corresponding to nucleotide 3107 of SEQ ID NO:1 as provided herein.
gatcacaggtctatcaccctattaaccactcacgggagctctccatgcatttggtattttcgtctggggggtatgcacgcgatagcattgcgagacgctggagccggagcaccctatgtcgcagtatctgtctttgattcctgcctcatcctattatttatcgcacctacgttcaatattacaggcgaacatacttactaaagtgtgttaattaattaatgcttgtaggacataataataacaattgaatgtctgcacagccactttccacacagacatcataacaaaaaatttccaccaaaccccccctcccccgcttctggccacagcacttaaacacatctctgccaaaccccaaaaacaaagaaccctaacaccagcctaaccagatttcaaattttatcttttggcggtatgcacttttaacagtcaccccccaactaacacattattttcccctcccactcccatactactaatctcatcaatacaacccccgcccatcctacccagcacacacacaccgctgctaaccccataccccgaaccaaccaaaccccaaagacaccccccacagtttatgtagcttacctcctcaaagcaatacactgaaaatgtttagacgggctcacatcaccccataaacaaataggtttggtcctagcctttctattagctcttagtaagattacacatgcaagcatccccgttccagtgagttcaccctctaaatcaccacgatcaaaagggacaagcatcaagcacgcagcaatgcagctcaaaacgcttagcctagccacacccccacgggaaacagcagtgattaacctttagcaataaacgaaagtttaactaagctatactaaccccagggttggtcaatttcgtgccagccaccgcggtcacacgattaacccaagtcaatagaagccggcgtaaagagtgttttagatcaccccctccccaataaagctaaaactcacctgagttgtaaaaaactccagttgacacaaaatagactacgaaagtggctttaacatatctgaacacacaatagctaagacccaaactgggattagataccccactatgcttagccctaaacctcaacagttaaatcaacaaaactgctcgccagaacactacgagccacagcttaaaactcaaaggacctggcggtgcttcatatccctctagaggagcctgttctgtaatcgataaaccccgatcaacctcaccacctcttgctcagcctatataccgccatcttcagcaaaccctgatgaaggctacaaagtaagcgcaagtacccacgtaaagacgttaggtcaaggtgtagcccatgaggtggcaagaaatgggctacattttctaccccagaaaactacgatagcccttatgaaacttaagggtcgaaggtggatttagcagtaaactgagagtagagtgcttagttgaacagggccctgaagcgcgtacacaccgcccgtcaccctcctcaagtatacttcaaaggacatttaactaaaacccctacgcatttatatagaggagacaagtcgtaacatggtaagtgtactggaaagtgcacttggacgaaccagagtgtagcttaacacaaagcacccaacttacacttaggagatttcaacttaacttgaccgctctgagctaaacctagccccaaacccactccaccttactaccagacaaccttagccaaaccatttacccaaataaagtataggcgatagaaattgaaacctggcgcaatagatatagtaccgcaagggaaagatgaaaaattataaccaagcataatatagcaaggactaacccctataccttctgcataatgaattaactagaaataactttgcaaggagagccaaagctaagacccccgaaaccagacgagctacctaagaacagctaaaagagcacacccgtctatgtagcaaaatagtgggaagatttataggtagaggcgacaaacctaccgagcctggtgatagctggttgtccaagatagaatcttagttcaactttaaatttgcccacagaaccctctaaatccccttgtaaatttaactgttagtccaaagaggaacagctctttggacactaggaaaaaaccttgtagagagagtaaaaaatttaacacccatagtaggcctaaaagcagccaccaattaagaaagcgttcaagctcaacacccactacctaaaaaatcccaaacatataactgaactcctcacacccaattggaccaatctatcaccctatagaagaactaatgttagtataagtaacatgaaaacattctcctccgcataagcctgcgtcagattaaaacactgaactgacaattaacagcccaatatctacaatcaaccaacaagtcattattaccctcactgtcaacccaacacaggcatgctcataaggaaaggttaaaaaaagtaaaaggaactcggcaaatcttaccccgcctgtttaccaaaaacatcacctctagcatcaccagtattagaggcaccgcctgcccagtgacacatgtttaacggccgcggtaccctaaccgtgcaaaggtagcataatcacttgttccttaaatagggacctgtatgaatggctccacgagggttcagctgtctcttacttttaaccagtgaaattgacctgcccgtgaagaggcgggcataacacagcaagacgagaagaccctatggagctttaatttattaatgcaaacagtacctaacaaacccacaggtcctaaactaccaaacctgcattaaaaatttcggttggggcgacctcggagcagaacccaacctccgagcagtacatgctaagacttcaccagtcaaagcgaactactatactcaattgatccaataacttgaccaacggaacaagttaccctagggataacagcgcaatcctattctagagtccatatcaacaatagggtttacgacctcgatgttggatcaggacatcccgatggtgcagccgctattaaaggttcgtttgttcaacgattaaagtcctacgtgatctgagttcagaccggagtaatccaggtcggtttctatctacnttcaaattcctccctgtacgaaaggacaagagaaataaggcctacttcacaaagcgccttcccccgtaaatgatatcatctcaacttagtattatacccacacccacccaagaacagggtttgttaagatggcagagcccggtaatcgcataaaacttaaaactttacagtcagaggttcaattcctcttcttaacaacatacccatggccaacctcctactcctcattgtacccattctaatcgcaatggcattcctaatgcttaccgaacgaaaaattctaggctatatacaactacgcaaaggccccaacgttgtaggcccctacgggctactacaacccttcgctgacgccataaaactcttcaccaaagagcccctaaaacccgccacatctaccatcaccctctacatcaccgccccgaccttagctctcaccatcgctcttctactatgaacccccctccccatacccaaccccctggtcaacctcaacctaggcctcctatttattctagccacctctagcctagccgtttactcaatcctctgatcagggtgagcatcaaactcaaactacgccctgatcggcgcactgcgagcagtagcccaaacaatctcatatgaagtcaccctagccatcattctactatcaacattactaataagtggctcctttaacctctccacccttatcacaacacaagaacacctctgattactcctgccatcatgacccttggccataatatgatttatctccacactagcagagaccaaccgaacccccttcgaccttgccgaaggggagtccgaactagtctcaggcttcaacatcgaatacgccgcaggccccttcgccctattcttcatagccgaatacacaaacattattataataaacaccctcaccactacaatcttcctaggaacaacatatgacgcactctcccctgaactctacacaacatattttgtcaccaagaccctacttctaacctccctgttcttatgaattcgaacagcatacccccgattccgctacgaccaactcatacacctcctatgaaaaaacttcctaccactcaccctagcattacttatatgatatgtctccatacccattacaatctccagcattccccctcaaacctaagaaatatgtctgataaaagagttactttgatagagtaaataataggagcttaaacccccttatttctaggactatgagaatcgaacccatccctgagaatccaaaattctccgtgccacctatcacaccccatcctaaagtaaggtcagctaaataagctatcgggcccataccccgaaaatgttggttatacccttcccgtactaattaatcccctggcccaacccgtcatctactctaccatctttgcaggcacactcatcacagcgctaagctcgcactgattttttacctgagtaggcctagaaataaacatgctagcttttattccagttctaaccaaaaaaataaaccctcgttccacagaagctgccatcaagtatttcctcacgcaagcaaccgcatccataatccttctaatagctatcctcttcaacaatatactctccggacaatgaaccataaccaatactaccaatcaatactcatcattaataatcataatggctatagcaataaaactaggaatagccccctttcacttctgagtcccagaggttacccaaggcacccctctgacatccggcctgcttcttctcacatgacaaaaactagcccccatctcaatcatataccaaatctctccctcactaaacgtaagccttctcctcactctctcaatcttatccatcatagcaggcagttgaggtggattaaaccaaacccagctacgcaaaatcttagcatactcctcaattacccacataggatgaataatagcagttctaccgtacaaccctaacataaccattcttaatttaactatttatattatcctaactactaccgcattcctactactcaacttaaactccagcaccacgaccctactactatctcgcacctgaaacaagctaacatgactaacacccttaattccatccaccctcctctccctaggaggcctgcccccgctaaccggctttttgcccaaatgggccattatcgaagaattcacaaaaaacaatagcctcatcatccccaccatcatagccaccatcaccctccttaacctctacttctacctacgcctaatctactccacctcaatcacactactccccatatctaacaacgtaaaaataaaatgacagtttgaacatacaaaacccaccccattcctccccacactcatcgcccttaccacgctactcctacctatctccccttttatactaataatcttatagaaatttaggttaaatacagaccaagagccttcaaagccctcagtaagttgcaatacttaatttctgtaacagctaaggactgcaaaaccccactctgcatcaactgaacgcaaatcagccactttaattaagctaagcccttactagaccaatgggacttaaacccacaaacacttagttaacagctaagcaccctaatcaactggcttcaatctacttctcccgccgccgggaaaaaaggcgggagaagccccggcaggtttgaagctgcttcttcgaatttgcaattcaatatgaaaatcacctcggagctggtaaaaagaggcctaacccctgtctttagatttacagtccaatgcttcactcagccattttacctcacccccactgatgttcgccgaccgttgactattctctacaaaccacaaagacattggaacactatacctattattcggcgcatgagctggagtcctaggcacagctctaagcctccttattcgagccgagctgggccagccaggcaaccttctaggtaacgaccacatctacaacgttatcgtcacagcccatgcatttgtaataatcttcttcatagtaatacccatcataatcggaggctttggcaactgactagttcccctaataatcggtgcccccgatatggcgtttccccgcataaacaacataagcttctgactcttacctccctctctcctactcctgctcgcatctgctatagtggaggccggagcaggaacaggttgaacagtctaccctcccttagcagggaactactcccaccctggagcctccgtagacctaaccatcttctccttacacctagcaggtgtctcctctatcttaggggccatcaatttcatcacaacaattatcaatataaaaccccctgccataacccaataccaaacgcccctcttcgtctgatccgtcctaatcacagcagtcctacttctcctatctctcccagtcctagctgctggcatcactatactactaacagaccgcaacctcaacaccaccttcttcgaccccgccggaggaggagaccccattctataccaacacctattctgatttttcggtcaccctgaagtttatattcttatcctaccaggcttcggaataatctcccatattgtaacttactactccggaaaaaaagaaccatttggatacataggtatggtctgagctatgatatcaattggcttcctagggtttatcgtgtgagcacaccacatatttacagtaggaatagacgtagacacacgagcatatttcacctccgctaccataatcatcgctatccccaccggcgtcaaagtatttagctgactcgccacactccacggaagcaatatgaaatgatctgctgcagtgctctgagccctaggattcatctttcttttcaccgtaggtggcctgactggcattgtattagcaaactcatcactagacatcgtactacacgacacgtactacgttgtagcccacttccactatgtcctatcaataggagctgtatttgccatcataggaggcttcattcactgatttcccctattctcaggctacaccctagaccaaacctacgccaaaatccatttcactatcatattcatcggcgtaaatctaactttcttcccacaacactttctcggcctatccggaatgccccgacgttactcggactaccccgatgcatacaccacatgaaacatcctatcatctgtaggctcattcatttctctaacagcagtaatattaataattttcatgatttgagaagccttcgcttcgaagcgaaaagtcctaatagtagaagaaccctccataaacctggagtgactatatggatgccccccaccctaccacacattcgaagaacccgtatacataaaatctagacaaaaaaggaaggaatcgaaccccccaaagctggtttcaagccaaccccatggcctccatgactttttcaaaaaggtattagaaaaaccatttcataactttgtcaaagttaaattataggctaaatcctatatatcttaatggcacatgcagcgcaagtaggtctacaagacgctacttcccctatcatagaagagcttatcacctttcatgatcacgccctcataatcattttccttatctgcttcctagtcctgtatgcccttttcctaacactcacaacaaaactaactaatactaacatctcagacgctcaggaaatagaaaccgtctgaactatcctgcccgccatcatcctagtcctcatcgccctcccatccctacgcatcctttacataacagacgaggtcaacgatccctcccttaccatcaaatcaattggccaccaatggtactgaacctacgagtacaccgactacggcggactaatcttcaactcctacatacttcccccattattcctagaaccaggcgacctgcgactccttgacgttgacaatcgagtagtactcccgattgaagcccccattcgtataataattacatcacaagacgtcttgcactcatgagctgtccccacattaggcttaaaaacagatgcaattcccggacgtctaaaccaaaccactttcaccgctacacgaccgggggtatactacggtcaatgctctgaaatctgtggagcaaaccacagtttcatgcccatcgtcctagaattaattcccctaaaaatctttgaaatagggcccgtatttaccctatagcaccccctctaccccctctagagcccactgtaaagctaacttagcattaaccttttaagttaaagattaagagaaccaacacctctttacagtgaaatgccccaactaaatactaccgtatggcccaccataattacccccatactccttacactattcctcatcacccaactaaaaatattaaacacaaactaccacctacctccctcaccaaagcccataaaaataaaaaattataacaaaccctgagaaccaaaatgaacgaaaatctgttcgcttcattcattgcccccacaatcctaggcctacccgccgcagtactgatcattctatttccccctctattgatccccacctccaaatatctcatcaacaaccgactaatcaccacccaacaatgactaatcaaactaacctcaaaacaaatgataaccatacacaacactaaaggacgaacctgatctcttatactagtatccttaatcatttttattgccacaactaacctcctcggactcctgcctcactcatttacaccaaccacccaactatctataaacctagccatggccatccccttatgagcgggcgcagtgattataggctttcgctctaagattaaaaatgccctagcccacttcttaccacaaggcacacctacaccccttatccccatactagttattatcgaaaccatcagcctactcattcaaccaatagccctggccgtacgcctaaccgctaacattactgcaggccacctactcatgcacctaattggaagcgccaccctagcaatatcaaccattaaccttccctctacacttatcatcttcacaattctaattctactgactatcctagaaatcgctgtcgccttaatccaagcctacgttttcacacttctagtaagcctctacctgcacaacaacacataatgacccaccaatcacatgcctatcatatagtaaaacccagcccatgacccctaacaggggccctctcagccctcctaatgacctccggcctagccatgtgatttcacttccactccataacgctcctcatactaggcctactaaccaacacactaaccatataccaatgatggcgcgatgtaacacgagaaagcacataccaaggccaccacacaccacctgtccaaaaaggccttcgatacgggataatcctatttattacctcagaagtttttttcttcgcaggatttttctgagccttttaccactccagcctagcccctaccccccaattaggagggcactggcccccaacaggcatcaccccgctaaatcccctagaagtcccactcctaaacacatccgtattactcgcatcaggagtatcaatcacctgagctcaccatagtctaatagaaaacaaccgaaaccaaataattcaagcactgcttattacaattttactgggtctctattttaccctcctacaagcctcagagtacttcgagtctcccttcaccatttccgacggcatctacggctcaacattttttgtagccacaggcttccacggacttcacgtcattattggctcaactttcctcactatctgcttcatccgccaactaatatttcactttacatccaaacatcactttggcttcgaagccgccgcctgatactggcattttgtagatgtggtttgactatttctgtatgtctccatctattgatgagggtcttactcttttagtataaatagtaccgttaacttccaattaactagttttgacaacattcaaaaaagagtaataaacttcgccttaattttaataatcaacaccctcctagccttactactaataattattacattttgactaccacaactcaacggctacatagaaaaatccaccccttacgagtgcggcttcgaccctatatcccccgcccgcgtccctttctccataaaattcttcttagtagctattaccttcttattatttgatctagaaattgccctccttttacccctaccatgagccctacaaacaactaacctgccactaatagttatgtcatccctcttattaatcatcatcctagccctaagtctggcctatgagtgactacaaaaaggattagactgaaccgaattggtatatagtttaaacaaaacgaatgatttcgactcattaaattatgataatcatatttaccaaatgcccctcatttacataaatattatactagcatttaccatctcacttctaggaatactagtatatcgctcacacctcatatcctccctactatgcctagaaggaataatactatcgctgttcattatagctactctcataaccctcaacacccactccctcttagccaatattgtgcctattgccatactagtctttgccgcctgcgaagcagcggtgggcctagccctactagtctcaatctccaacacatatggcctagactacgtacataacctaaacctcctccaatgctaaaactaatcgtcccaacaattatattactaccactgacatgactttccaaaaaacacataatttgaatcaacacaaccacccacagcctaattattagcatcatccctctactattttttaaccaaatcaacaacaacctatttagctgttccccaaccttttcctccgaccccctaacaacccccctcctaatactaactacctgactcctacccctcacaatcatggcaagccaacgccacttatccagtgaaccactatcacgaaaaaaactctacctctctatactaatctccctacaaatctccttaattataacattcacagccacagaactaatcatattttatatcttcttcgaaaccacacttatccccaccttggctatcatcacccgatgaggcaaccagccagaacgcctgaacgcaggcacatacttcctattctacaccctagtaggctcccttcccctactcatcgcactaatttacactcacaacaccctaggctcactaaacattctactactcactctcactgcccaagaactatcaaactcctgagccaacaacttaatatgactagcttacacaatagcttttatagtaaagatacctctttacggactccacttatgactccctaaagcccatgtcgaagcccccatcgctgggtcaatagtacttgccgcagtactcttaaaactaggcggctatggtataatacgcctcacactcattctcaaccccctgacaaaacacatagcctaccccttccttgtactatccctatgaggcataattataacaagctccatctgcctacgacaaacagacctaaaatcgctcattgcatactcttcaatcagccacatagccctcgtagtaacagccattctcatccaaaccccctgaagcttcaccggcgcagtcattctcataatcgcccacgggcttacatcctcattactattctgcctagcaaactcaaactacgaacgcactcacagtcgcatcataatcctctctcaaggacttcaaactctactcccactaatagctttttgatgacttctagcaagcctcgctaacctcgccttaccccccactattaacctactgggagaactctctgtgctagtaaccacgttctcctgatcaaatatcactctcctacttacaggactcaacatactagtcacagccctatactccctctacatatttaccacaacacaatggggctcactcacccaccacattaacaacataaaaccctcattcacacgagaaaacaccctcatgttcatacacctatcccccattctcctcctatccctcaaccccgacatcattaccgggttttcctcttgtaaatatagtttaaccaaaacatcagattgtgaatctgacaacagaggcttacgaccccttatttaccgagaaagctcacaagaactgctaactcatgcccccatgtctaacaacatggctttctcaacttttaaaggataacagctatccattggtcttaggccccaaaaattttggtgcaactccaaataaaagtaataaccatgcacactactataaccaccctaaccctgacttccctaattccccccatccttaccaccctcgttaaccctaacaaaaaaaactcatacccccattatgtaaaatccattgtcgcatccacctttattatcagtctcttccccacaacaatattcatgtgcctagaccaagaagttattatctcgaactgacactgagccacaacccaaacaacccagctctccctaagcttcaaactagactacttctccataatattcatccctgtagcattgttcgttacatggtccatcatagaattctcactgtgatatataaactcagacccaaacattaatcagttcttcaaatatctactcatcttcctaattaccatactaatcttagttaccgctaacaacctattccaactgttcatcggctgagagggcgtaggaattatatccttcttgctcatcagttgatgatacgcccgagcagatgccaacacagcagccattcaagcaatcctatacaaccgtatcggcgatatcggtttcatcctcgccttagcatgatttatcctacactccaactcatgagacccacaacaaatagcccttctaaacgctaatccaagcctcaccccactactaggcctcctcctagcagcagcaggcaaatcagcccaattaggtctccacccctgactcccctcagccatagaaggccccaccccagtctcagccctactccactcaagcactatagttgtagcaggaatcttcttactcatccgcttccaccccctagcagaaaatagcccactaatccaaactctaacactatgcttaggcgctatcaccactctgttcgcagcagtctgcgcccttacacaaaatgacatcaaaaaaatcgtagccttctccacttcaagtcaactaggactcataatagttacaatcggcatcaaccaaccacacctagcattcctgcacatctgtacccacgccttcttcaaagccatactatttatgtgctccgggtccatcatccacaaccttaacaatgaacaagatattcgaaaaataggaggactactcaaaaccatacctctcacttcaacctccctcaccattggcagcctagcattagcaggaatacctttcctcacaggtttctactccaaagaccacatcatcgaaaccgcaaacatatcatacacaaacgcctgagccctatctattactctcatcgctacctccctgacaagcgcctatagcactcgaataattcttctcaccctaacaggtcaacctcgcttccccacccttactaacattaacgaaaataaccccaccctactaaaccccattaaacgcctggcagccggaagcctattcgcaggatttctcattactaacaacatttcccccgcatcccccttccaaacaacaatccccctctacctaaaactcacagccctcgctgtcactttcctaggacttctaacagccctagacctcaactacctaaccaacaaacttaaaataaaatccccactatgcacattttatttctccaacatactcggattctaccctagcatcacacaccgcacaatcccctatctaggccttcttacgagccaaaacctgcccctactcctcctagacctaacctgactagaaaagctattacctaaaacaatttcacagcaccaaatctccacctccatcatcacctcaacccaaaaaggcataattaaactttacttcctctctttcttcttcccactcatcctaaccctactcctaatcacataacctattcccccgagcaatctcaattacaatatatacaccaacaaacaatgttcaaccagtaactactactaatcaacgcccataatcatacaaagcccccgcaccaataggatcctcccgaatcaaccctgacccctctccttcataaattattcagcttcctacactattaaagtttaccacaaccaccaccccatcatactctttcacccacagcaccaatcctacctccatcgctaaccccactaaaacactcaccaagacctcaacccctgacccccatgcctcaggatactcctcaatagccatcgctgtagtatatccaaagacaaccatcattccccctaaataaattaaaaaaactattaaacccatataacctcccccaaaattcagaataataacacacccgaccacaccgctaacaatcaatactaaacccccataaataggagaaggcttagaagaaaaccccacaaaccccattactaaacccacactcaacagaaacaaagcatacatcattattctcgcacggactacaaccacgaccaatgatatgaaaaaccatcgttgtatttcaactacaagaacaccaatgaccccaatacgcaaaactaaccccctaataaaattaattaaccactcattcatcgacctccccaccccatccaacatctccgcatgatgaaacttcggctcactccttggcgcctgcctgatcctccaaatcaccacaggactattcctagccatgcactactcaccagacgcctcaaccgccttttcatcaatcgcccacatcactcgagacgtaaattatggctgaatcatccgctaccttcacgccaatggcgcctcaatattctttatctgcctcttcctacacatcgggcgaggcctatattacggatcatttctctactcagaaacctgaaacatcggcattatcctcctgcttgcaactatagcaacagccttcataggctatgtcctcccgtgaggccaaatatcattctgaggggccacagtaattacaaacttactatccgccatcccatacattgggacagacctagttcaatgaatctgaggaggctactcagtagacagtcccaccctcacacgattctttacctttcacttcatcttgcccttcattattgcagccctagcagcactccacctcctattcttgcacgaaacgggatcaaacaaccccctaggaatcacctcccattccgataaaatcaccttccacccttactacacaatcaaagacgccctcggcttacttctcttccttctctccttaatgacattaacactattctcaccagacctcctaggcgacccagacaattataccctagccaaccccttaaacacccctccccacatcaagcccgaatgatatttcctattcgcctacacaattctccgatccgtccctaacaaactaggaggcgtccttgccctattactatccatcctcatcctagcaataatccccatcctccatatatccaaacaacaaagcataatatttcgcccactaagccaatcactttattgactcctagccgcagacctcctcattctaacctgaatcggaggacaaccagtaagctacccttttaccatcattggacaagtagcatccgtactatacttcacaacaatcctaatcctaataccaactatctccctaattgaaaacaaaatactcaaatgggcctgtccttgtagtataaactaatacaccagtcttgtaaaccggagatgaaaacctttttccaaggacaaatcagagaaaaagtctttaactccaccattagcacccaaagctaagattctaatttaaactattctctgttctttcatggggaagcagatttgggtaccacccaagtattgactcacccatcaacaaccgctatgtatttcgtacattactgccagccaccatgaatattgtacggtaccataaatacttgaccacctgtagtacataaaaacccaatccacatcaaaaccccctccccatgcttacaagcaagtacagcaatcaaccctcaactatcacacatcaactgcaactccaaagccacccctcacccactaggataccaacaaacctacccacccttaacagtacatagtacataaagccatttaccgtacatagcacattacagtcaaatcccttctcgtccccatggatgacccccctcagataggggtcccttgaccaccatcctccgtgaaatcaatatcccgcacaagagtgctactctcctcgctccgggcccataacacttgggggtagctaaagtgaactgtatccgacatctggttcctacttcagggtcataaagcctaaatagcccacacgttccccttaaataagacatcacgatg

SEQ ID NO: 530 - DNA, 16569 bp, Homo sapiens mitochondrial
  3107: "n" refers to a nucleotide at position 3107 of the Cambridge Reference Sequence (CRS, Anderson et al. 1981 Nature 290:457-465), later determined to be absent from the human mtDNA sequence according to the revised CRS (rCRS, Andrews et al. 1999 Nature Genetics 23:147); "n" therefore represents a single nucleotide deletion at a position corresponding to nucleotide 3107 of SEQ ID NO:1 as provided herein.
gatcacaggtctatcaccctattaaccactcacgggagctctccatgcatttggtattttcgtctggggggtatgcacgcgatagcattgcgagacgctggagccggagcaccctatgtcgcagtatctgtctttgattcctgcctcatcctattatttatcgcacctacgttcaatattacaggcgaacatacttactaaagtgtgttaattaattaatgcttgtaggacataataataacaattgaatgtctgcacagccactttccacacagacatcataacaaaaaatttccaccaaaccccccctcccccgcttctggccacagcacttaaacacatctctgccaaaccccaaaaacaaagaaccctaacaccagcctaaccagatttcaaattttatcttttggcggtatgcacttttaacagtcaccccccaactaacacattattttcccctcccactcccatactactaatctcatcaatacaacccccgcccatcctacccagcacacacacaccgctgctaaccccataccccgaaccaaccaaaccccaaagacaccccccacagtttatgtagcttacctcctcaaagcaatacactgaaaatgtttagacgggctcacatcaccccataaacaaataggtttggtcctagcctttctattagctcttagtaagattacacatgcaagcatccccgttccagtgagttcaccctctaaatcaccacgatcaaaagggacaagcatcaagcacgcagcaatgcagctcaaaacgcttagcctagccacacccccacgggaaacagcagtgattaacctttagcaataaacgaaagtttaactaagctatactaaccccagggttggtcaatttcgtgccagccaccgcggtcacacgattaacccaagtcaatagaagccggcgtaaagagtgttttagatcaccccctccccaataaagctaaaactcacctgagttgtaaaaaactccagttgacacaaaatagactacgaaagtggctttaacatatctgaacacacaatagctaagacccaaactgggattagataccccactatgcttagccctaaacctcaacagttaaatcaacaaaactgctcgccagaacactacgagccacagcttaaaactcaaaggacctggcggtgcttcatatccctctagaggagcctgttctgtaatcgataaaccccgatcaacctcaccacctcttgctcagcctatataccgccatcttcagcaaaccctgatgaaggctacaaagtaagcgcaagtacccacgtaaagacgttaggtcaaggtgtagcccatgaggtggcaagaaatgggctacattttctaccccagaaaactacgatagcccttatgaaacttaagggtcgaaggtggatttagcagtaaactgagagtagagtgcttagttgaacagggccctgaagcgcgtacacaccgcccgtcaccctcctcaagtatacttcaaaggacatttaactaaaacccctacgcatttatatagaggagacaagtcgtaacatggtaagtgtactggaaagtgcacttggacgaaccagagtgtagcttaacacaaagcacccaacttacacttaggagatttcaacttaacttgaccgctctgagctaaacctagccccaaacccactccaccttactaccagacaaccttagccaaaccatttacccaaataaagtataggcgatagaaattgaaacctggcgcaatagatatagtaccgcaagggaaagatgaaaaattataaccaagcataatatagcaaggactaacccctataccttctgcataatgaattaactagaaataactttgcaaggagagccaaagctaagacccccgaaaccagacgagctacctaagaacagctaaaagagcacacccgtctatgtagcaaaatagtgggaagatttataggtagaggcgacaaacctaccgagcctggtgatagctggttgtccaagatagaatcttagttcaactttaaatttgcccacagaaccctctaaatccccttgtaaatttaactgttagtccaaagaggaacagctctttggacactaggaaaaaaccttgtagagagagtaaaaaatttaacacccatagtaggcctaaaagcagccaccaattaagaaagcgttcaagctcaacacccactacctaaaaaatcccaaacatataactgaactcctcacacccaattggaccaatctatcaccctatagaagaactaatgttagtataagtaacatgaaaacattctcctccgcataagcctgcgtcagattaaaacactaaactgacaattaacagcccaatatctacaatcaaccaacaagtcattattaccctcactgtcaacccaacacaggcatgctcataaggaaaggttaaaaaaagtaaaaggaactcggcaaatcttaccccgcctgtttaccaaaaacatcacctctagcatcaccagtattagaggcaccgcctgcccagtgacacatgtttaacggccgcggtaccctaaccgtgcaaaggtagcataatcacttgttccttaaatagggacctgtatgaatggctccacgagggttcagctgtctcttacttttaaccagtgaaattgacctgcccgtgaagaggcgggcataacacagcaagacgagaagaccctatggagctttaatttattaatgcaaacagtacctaacaaacccacaggtcctaaactaccaaacctgcattaaaaatttcggttggggcgacctcggagcagaacccaacctccgagcagtacatgctaagacttcaccagtcaaagcgaactactatactcaattgatccaataacttgaccaacggaacaagttaccctagggataacagcgcaatcctattctagagtccatatcaacaatagggtttacgacctcgatgttggatcaggacatcccgatggtgcagccgctattaaaggttcgtttgttcaacgattaaagtcctacgtgatctgagttcagaccggagtaatccaggtcggtttctatctacnttcaaattcctccctgtacgaaaggacaagagaaataaggcctacttcacaaagcgccttcccccgtaaatgatatcatctcaacttagtattatacccacacccacccaagaacagggtttgttaagatggcagagcccggtaatcgcataaaacttaaaactttacagtcagaggttcaattcctcttcttaacaacatacccatggccaacctcctactcctcattgtacccattctaatcgcaatggcattcctaatgcttaccgaacgaaaaattctaggctatatacaactacgcaaaggccccaacgttgtaggcccctacgggctactacaacccttcgctgacgccataaaactcttcaccaaagagcccctaaaacccgccacatctaccatcaccctctacatcaccgccccgaccttagctctcaccatcgctcttctactatgaacccccctccccatacccaaccccctggtcaacctcaacctaggcctcctatttattctagccacctctagcctagccgtttactcaatcctctgatcagggtgagcatcaaactcaaactacgccctgatcggcgcactgcgagcagtagcccaaacaatctcatatgaagtcaccctagccatcattctactatcaacattactaataagtggctcctttaacctctccacccttatcacaacacaagaacacctctgattactcctgccatcatgacccttggccataatatgatttatctccacactagcagagaccaaccgaacccccttcgaccttgccgaaggggagtccgaactagtctcaggcttcaacatcgaatacgccgcaggccccttcgccctattcttcatagccgaatacacaaacattattataataaacaccctcaccactacaatcttcctaggaacaacatatgacgcactctcccctgaactctacacaacatattttgtcaccaagaccctacttctaacctccctgttcttatgaattcgaacagcatacccccgattccgctacgaccaactcatacacctcctatgaaaaaacttcctaccactcaccctagcattacttatatgatatgtctccatacccattacaatctccagcattccccctcaaacctaagaaatatgtctgataaaagagttactttgatagagtaaataataggagcttaaacccccttatttctaggactatgagaatcgaacccatccctgagaatccaaaattctccgtgccacctatcacaccccatcctaaagtaaggtcagctaaataagctatcgggcccataccccgaaaatgttggttatacccttcccgtactaattaatcccctggcccaacccgtcatctactctaccatctttgcaggcacactcatcacagcgctaagctcgcactgattttttacctgagtaggcctagaaataaacatgctagcttttattccagttctaaccaaaaaaataaaccctcgttccacagaagctgccatcaagtatttcctcacgcaagcaaccgcatccataatccttctaatagctatcctcttcaacaatatactctccggacaatgaaccataaccaatactaccaatcaatactcatcattaataatcataatggctatagcaataaaactaggaatagccccctttcacttctgagtcccagaggttacccaaggcacccctctgacatccggcctgcttcttctcacatgacaaaaactagcccccatctcaatcatataccaaatctctccctcactaaacgtaagccttctcctcactctctcaatcttatccatcatagcaggcagttgaggtggattaaaccaaacccagctacgcaaaatcttagcatactcctcaattacccacataggatgaataatagcagttctaccgtacaaccctaacataaccattcttaatttaactatttatattatcctaactactaccgcattcctactactcaacttaaactccagcaccacgaccctactactatctcgcacctgaaacaagctaacatgactaacacccttaattccatccaccctcctctccctaggaggcctgcccccgctaaccggctttttgcccaaatgggccattatcgaagaattcacaaaaaacaatagcctcatcatccccaccatcatagccaccatcaccctccttaacctctacttctacctacgcctaatctactccacctcaatcacactactccccatatctaacaacgtaaaaataaaatgacagtttgaacatacaaaacccaccccattcctccccacactcatcgcccttaccacgctactcctacctatctccccttttatactaataatcttatagaaatttaggttaaatacagaccaagagccttcaaagccctcagtaagttgcaatacttaatttctgtaacagctaaggactgcaaaaccccactctgcatcaactgaacgcaaatcagccactttaattaagctaagcccttactagaccaatgggacttaaacccacaaacacttagttaacagctaagcaccctaatcaactggcttcaatctacttctcccgccgccgggaaaaaaggcgggagaagccccggcaggtttgaagctgcttcttcgaatttgcaattcaatatgaaaatcacctcggagctggtaaaaagaggcctaacccctgtctttagatttacagtccaatgcttcactcagccattttacctcacccccactgatgttcgccgaccgttgactattctctacaaaccacaaagacattggaacactatacctattattcggcgcatgagctggagtcctaggcacagctctaagcctccttattcgagccgagctgggccagccaggcaaccttctaggtaacgaccacatctacaacgttatcgtcacagcccatgcatttgtaataatcttcttcatagtaatacccatcataatcggaggctttggcaactgactagttcccctaataatcggtgcccccgatatggcgtttccccgcataaacaacataagcttctgactcttacctccctctctcctactcctgctcgcatctgctatagtggaggccggagcaggaacaggttgaacagtctaccctcccttagcagggaactactcccaccctggagcctccgtagacctaaccatcttctccttacacctagcaggtgtctcctctatcttaggggccatcaatttcatcacaacaattatcaatataaaaccccctgccataacccaataccaaacgcccctcttcgtctgatccgtcctaatcacagcagtcctacttctcctatctctcccagtcctagctgctggcatcactatactactaacagaccgcaacctcaacaccaccttcttcgaccccgccggaggaggagaccccattctataccaacacctattctgatttttcggtcaccctgaagtttatattcttatcctaccaggcttcggaataatctcccatattgtaacttactactccggaaaaaaagaaccatttggatacataggtatggtctgagctatgatatcaattggcttcctagggtttatcgtgtgagcacaccatatatttacagtaggaatagacgtagacacacgagcatatttcacctccgctaccataatcatcgctatccccaccggcgtcaaagtatttagctgactcgccacactccacggaagcaatatgaaatgatctgctgcagtgctctgagccctaggattcatctttcttttcaccgtaggtggcctgactggcattgtattagcaaactcatcactagacatcgtactacacgacacgtactacgttgtagcccacttccactatgtcctatcaataggagctgtatttgccatcataggaggcttcattcactgatttcccctattctcaggctacaccctagaccaaacctacgccaaaatccatttcactatcatattcatcggcgtaaatctaactttcttcccacaacactttctcggcctatccggaatgccccgacgttactcggactaccccgatgcatacaccacatgaaacatcctatcatctgtaggctcattcatttctctaacagcagtaatattaataattttcatgatttgagaagccttcgcttcgaagcgaaaagtcctaatagtagaagaaccctccataaacctggagtgactatatggatgccccccaccctaccacacattcgaagaacccgtatacataaaatctagacaaaaaaggaaggaatcgaaccccccaaagctggtttcaagccaaccccatggcctccatgactttttcaaaaaggtattagaaaaaccatttcataactttgtcaaagttaaattataggctaaatcctatatatcttaatggcacatgcagcgcaagtaggtctacaagacgctacttcccctatcatagaagagcttatcacctttcatgatcacgccctcataatcattttccttatctgcttcctagtcctgtatgcccttttcctaacactcacaacaaaactaactaatactaacatctcagacgctcaggaaatagaaaccgtctgaactatcctgcccgccatcatcctagtcctcatcgccctcccatccctacgcatcctttacataacagacgaggtcaacgatccctcccttaccatcaaatcaattggccaccaatggtactgaacctacgagtacaccgactacggcggactaatcttcaactcctacatacttcccccattattcctagaaccaggcgacctgcgactccttgacgttgacaatcgagtagtactcccgattgaagcccccattcgtataataattacatcacaagacgtcttgcactcatgagctgtccccacattaggcttaaaaacagatgcaattcccggacgtctaaaccaaaccactttcaccgctacacgaccgggggtatactacggtcaatgctctgaaatctgtggagcaaaccacagtttcatgcccatcgtcctagaattaattcccctaaaaatctttgaaatagggcccgtatttaccctatagcaccccctctaccccctctagagcccactgtaaagctaacttagcattaaccttttaagttaaagattaagagaaccaacacctctttacagtgaaatgccccaactaaatactaccgtatggcccaccataattacccccatactccttacactattcctcatcacccaactaaaaatattaaacacaaactaccacctacctccctcaccaaagcccataaaaataaaaaattataacaaaccctgagaaccaaaatgaacgaaaatctgttcgcttcattcattgcccccacaatcctaggcctacccgccgcagtactgatcattctatttccccctctattgatccccacctccaaatatctcatcaacaaccgactaatcaccacccaacaatgactaatcaaactaacctcaaaacaaatgataaccatacacaacactaaaggacgaacctgatctcttatactagtatccttaatcatttttattgccacaactaacctcctcggactcctgcctcactcatttacaccaaccacccaactatctataaacctagccatggccatccccttatgagcgggcgcagtgattataggctttcgctctaagattaaaaatgccctagcccacttcttaccacaaggcacacctacaccccttatccccatactagttattatcgaaaccatcagcctactcattcaaccaatagccctggccgtacgcctaaccgctaacattactgcaggccacctactcatgcacctaattggaagcgccaccctagcaatatcaaccattaaccttccctctacacttatcatcttcacaattctaattctactgactatcctagaaatcgctgtcgccttaatccaagcctacgttttcacacttctagtaagcctctacctgcacgacaacacataatgacccaccaatcacatgcctatcatatagtaaaacccagcccatgacccctaacaggggccctctcagccctcctaatgacctccggcctagccatgtgatttcacttccactccataacgctcctcatactaggcctactaaccaacacactaaccatataccaatgatggcgcgatgtaacacgagaaagcacataccaaggccaccacacaccacctgtccaaaaaggccttcgatacgggataatcctatttattacctcagaagtttttttcttcgcaggatttttctgagccttttaccactccagcctagcccctaccccccaattaggagggcactggcccccaacaggcatcaccccgctaaatcccctagaagtcccactcctaaacacatccgtattactcgcatcaggagtatcaatcacctgagctcaccatagtctaatagaaaacaaccgaaaccaaataattcaagcactgcttattacaattttactgggtctctattttaccctcctacaagcctcagagtacttcgagtctcccttcaccatttccgacggcatctacggctcaacattttttgtagccacaggcttccacggacttcacgtcattattggctcaactttcctcactatctgcttcatccgccaactaatatttcactttacatccaaacatcactttggcttcgaagccgccgcctgatactggcattttgtagatgtggtttgactatttctgtatgtctccatctattgatgagggtcttactcttttagtataaatagtaccgttaacttccaattaactagttttgacaacattcaaaaaagagtaataaacttcgccttaattttaataatcaacaccctcctagccttactactaataattattacattttgactaccacaactcaacggctacatagaaaaatccaccccttacgagtgcggcttcgaccctatatcccccgcccgcgtccctttctccataaaattcttcttagtagctattaccttcttattatttgatctagaaattgccctccttttacccctaccatgagccctacaaacaactaacctgccactaatagttatgtcatccctcttattaatcatcatcctagccctaagtctggcctatgagtgactacaaaaaggattagactgaaccgaattggtatatagtttaaacaaaacgaatgatttcgactcattaaattatgataatcatatttaccaaatgcccctcatttacataaatattatactagcatttaccatctcacttctaggaatactagtatatcgctcacacctcatatcctccctactatgcctagaaggaataatactatcgctgttcattatagctactctcataaccctcaacacccactccctcttagccaatattgtgcctattgccatactagtctttgccgcctgcgaagcagcggtgggcctagccctactagtctcaatctccaacacatatggcctagactacgtacataacctaaacctactccaatgctaaaactaatcgtcccaacaattatattactaccactgacatgactttccaaaaaacacataatttgaatcaacacaaccacccacagcctaattattagcatcatccctctactattttttaaccaaatcaacaacaacctatttagctgttccccaaccttttcctccgaccccctaacaacccccctcctaatactaactacctgactcctacccctcacaatcatggcaagccaacgccacttatccagtgaaccactatcacgaaaaaaactctacctctctatactaatctccctacaaatctccttaattataacattcacagccacagaactaatcatattttatatcttcttcgaaaccacacttatccccaccttggctatcatcacccgatgaggcaaccagccagaacgcctgaacgcaggcacatacttcctattctacaccctagtaggctcccttcccctactcatcgcactaatttacactcacaacaccctaggctcactaaacattctactactcactctcactgcccaagaactatcaaactcctgagccaacaacttaatatgactagcttacacaatagcttttatagtaaagatacctctttacggactccacttatgactccctaaagcccatgtcgaagcccccatcgctgggtcaatagtacttgccgcagtactcttaaaactaggcggctatggtataatacgcctcacactcattctcaaccccctgacaaaacacatagcctaccccttccttgtactatccctatgaggcataattataacaagctccatctgcctacgacaaacagacctaaaatcgctcattgcatactcttcaatcagccacatagccctcgtagtaacagccattctcatccaaaccccctgaagcttcaccggcgcagtcattctcataatcgcccacgggcttacatcctcattactattctgcctagcaaactcaaactacgaacgcactcacagtcgcatcataatcctctctcaaggacttcaaactctactcccactaatagctttttgatgacttctagcaagcctcgctaacctcgccttaccccccactattaacctactgggagaactctctgtgctagtaaccacgttctcctgatcaaatatcactctcctacttacaggactcaacatactagtcacagccctatactccctctacatatttaccacaacacaatggggctcactcacccaccacattaacaacataaaaccctcattcacacgagaaaacaccctcatgttcatacacctatcccccattctcctcctatccctcaaccccgacatcattaccgggttttcctcttgtaaatatagtttaaccaaaacatcagattgtgaatctgacaacagaggcttacgaccccttatttaccgagaaagctcacaagaactgctaactcatgcccccatgtctaacaacatggctttctcaacttttaaaggataacagctatccattggtcttaggccccaaaaattttggtgcaactccaaataaaagtaataaccatgcacactactataaccaccctaaccctgacttccctaattccccccatccttaccaccctcgttaaccctaacaaaaaaaactcatacccccattatgtaaaatccattgtcgcatccacctttattatcagtctcttccccacaacaatattcatgtgcctagaccaagaagttattatctcgaactgacactgagccacaacccaaacaacccagctctccctaagcttcaaactagactacttctccataatattcatccctgtagcattgttcgttacatggtccatcatagaattctcactgtgatatataaactcagacccaaacattaatcagttcttcaaatatctactcatcttcctaattaccatactaatcttagttaccgctaacaacctattccaactgttcatcggctgagagggcgtaggaattatatccttcttgctcatcagttgatgatacgcccgagcagatgccaacacagcagccattcaagcaatcctatacaaccgtatcggcgatatcggtttcatcctcgccttagcatgatttatcctacactccaactcatgagacccacaacaaatagcccttctaaacgctaatccaagcctcaccccactactaggcctcctcctagcagcagcaggcaaatcagcccaattaggtctccacccctgactcccctcagccatagaaggccccaccccagtctcagccctactccactcaagcactatagttgtagcaggaatcttcttactcatccgcttccaccccctagcagaaaatagcccactaatccaaactctaacactatgcttaggcgctatcaccactctgttcgcagcagtctgcgcccttacacaaaatgacatcaaaaaaatcgtagccttctccacttcaagtcaactaggactcataatagttacaatcggcatcaaccaaccacacctagcattcctgcacatctgtacccacgccttcttcaaagccatactatttatgtgctccgggtccatcatccacaaccttaacaatgaacaagatattcgaaaaataggaggactactcaaaaccatacctctcacttcaacctccctcaccattggcagcctagcattagcaggaatacctttcctcacaggtttctactccaaagaccacatcatcgaaaccgcaaacatatcatacacaaacgcctgagccctatctattactctcatcgctacctccctgacaagcgcctatagcactcgaataattcttctcaccctaacaggtcaacctcgcttccccacccttactaacattaacgaaaataaccccaccctactaaaccccattaaacgcctggcagccggaagcctattcgcaggatttctcattactaacaacatttcccccgcatcccccttccaaacaacaatccccctgtacctaaaactcacagccctcgctgtcactttcctaggacttctaacagccctagacctcaactacctaaccaacaaacttaaaataaaatccccactatgcacattttatttctccaacatactcggattctaccctagcatcacacaccgcacaatcccctatctaggccttcttacgagccaaaacctgcccctactcctcctagacctaacctgactagaaaagctattacctaaaacaatttcacagcaccaaatctccacctccatcatcacctcaacccaaaaaggcataattaaactttacttcctctctttcttcttcccactcatcctaaccctactcctaatcacataacctattcccccgagcaatctcaattacaatatatacaccaacaaacaatgttcaaccagtaactactactaatcaacgcccataatcatacaaagcccccgcaccaataggatcctcccgaatcaaccctgacccctctccttcataaattattcagcttcctacactattaaagtttaccacaaccaccaccccatcatactctttcacccacagcaccaatcctacctccatcgctaaccccactaaaacactcaccaagacctcaacccctgacccccatgcctcaggatactcctcaatagccatcgctgtagtatatccaaagacaaccatcattccccctaaataaattaaaaaaactattaaacccatataacctcccccaaaattcagaataataacacacccgaccacaccgctaacaatcaatactaaacccccataaataggagaaggcttagaagaaaaccccacaaaccccattactaaacccacactcaacagaaacaaagcatacatcattattctcgcacggactacaaccacgaccaatgatatgaaaaaccatcgttgtatttcaactacaagaacaccaatgaccccaatacgcaaaactaaccccctaataaaattaattaaccactcattcatcgacctccccaccccatccaacatctccgcatgatgaaacttcggctcactccttggcgcctgcctgatcctccaaatcaccacaggactattcctagccatgcactactcaccagacgcctcaaccgccttttcatcaatcgcccacatcactcgagacgtaaattatggctgaatcatccgctaccttcacgccaatggcgcctcaatattctttatctgcctcttcctacacatcgggcgaggcctatattacggatcatttctctactcagaaacctgaaacatcggcattatcctcctgcttgcaactatagcaacagccttcataggctatgtcctcccgtgaggccaaatatcattctgaggggccacagtaattacaaacttactatccgccatcccatacattgggacagacctagttcaatgaatctgaggaggctactcagtagacagtcccaccctcacacgattctttacctttcacttcatcttgcccttcattattgcagccctagcagcactccacctcctattcttgcacgaaacgggatcaaacaaccccctaggaatcacctcccattccgataaaatcaccttccacccttactacacaatcaaagacgccctcggcttacttctcttccttctctccttaatgacattaacactattctcaccagacctcctaggcgacccagacaattataccctagccaaccccttaaacacccctccccacatcaagcccgaatgatatttcctattcgcctacacaattctccgatccgtccctaacaaactaggaggcgtccttgccctattactatccatcctcatcctagcaataatccccatcctccatatatccaaacaacaaagcataatatttcgcccactaagccaatcactttattgactcctagccgcagacctcctcattctaacctgaatcggaggacaaccagtaagctacccttttaccatcattggacaagtagcatccgtactatacttcacaacaatcctaatcctaataccaactatctccctaattgaaaacaaaatactcaaatgggcctgtccttgtagtataaactaatacaccagtcttgtaaaccggagatgaaaacctttttccaaggacaaatcagagaaaaagtctttaactccaccattagcacccaaagctaagattctaatttaaactattctctgttctttcatggggaagcagatttgggtaccacccaagtattgactcacccatcaacaaccgctatgtatttcgtacattactgccagccaccatgaatattgtacggtaccataaatacttgaccacctgtagtacataaaaacccaatccacatcaaaaccccctccccatgcttacaagcaagtacagcaatcaaccctcaactatcacacatcaactgcaactccaaagccacccctcacccactaggataccaacaaacctacccacccttaacagtacatagtacataaagccatttaccgtacatagcacattacagtcaaatcccttctcgtccccatggatgacccccctcagataggggtcccttgaccaccatcctccgtgaaatcaatatcccgcacaagagtgctactctcctcgctccgggcccataacacttgggggtagctaaagtgaactgtatccgacatctggttcctacttcagggtcataaagcctaaatagcccacacgttccccttaaataagacatcacgatg

SEQ ID NO: 531 - DNA, 16569 bp, Homo sapiens mitochondrial
  3107: "n" refers to a nucleotide at position 3107 of the Cambridge Reference Sequence (CRS, Anderson et al. 1981 Nature 290:457-465), later determined to be absent from the human mtDNA sequence according to the revised CRS (rCRS, Andrews et al. 1999 Nature Genetics 23:147); "n" therefore represents a single nucleotide deletion at a position corresponding to nucleotide 3107 of SEQ ID NO:1 as provided herein.
gatcacaggtctatcaccctattaaccactcacgggagctctccatgcatttggtattttcgtctggggggtatgcacgcgatagcattgcgagacgctggagccggagcaccctatgtcgcagtatctgtctttgattcctgcctcatcctattatttatcgcacctacgttcaatattacaggcgaacatacttactaaagtgtgttaattaattaatgcttgtaggacataataataacaattgaatgtctgcacagccactttccacacagacatcataacaaaaaatttccaccaaaccccccctcccccgcttctggccacagcacttaaacacatctctgccaaaccccaaaaacaaagaaccctaacaccagcctaaccagatttcaaattttatcttttggcggtatgcacttttaacagtcaccccccaactaacacattattttcccctcccactcccatactactaatctcatcaatacaacccccgcccatcctacccagcacacacacaccgctgctaaccccataccccgaaccaaccaaaccccaaagacaccccccacagtttatgtagcttacctcctcaaagcaatacactgaaaatgtttagacgggctcacatcaccccataaacaaataggtttggtcctagcctttctattagctcttagtaagattacacatgcaagcatccccgttccagtgagttcaccctctaaatcaccacgatcaaaagggacaagcatcaagcacgcagcaatgcagctcaaaacgcttagcctagccacacccccacgggaaacagcagtgattaacctttagcaataaacgaaagtttaactaagctatactaaccccagggttggtcaatttcgtgccagccaccgcggtcacacgattaacccaagtcaatagaagccggcgtaaagagtgttttagatcaccccctccccaataaagctaaaactcacctgagttgtaaaaaactccagttgacacaaaatagactacgaaagtggctttaacatatctgaacacacaatagctaagacccaaactgggattagataccccactatgcttagccctaaacctcaacagttaaatcaacaaaactgctcgccagaacactacgagccacagcttaaaactcaaaggacctggcggtgcttcatatccctctagaggagcctgttctgtaatcgataaaccccgatcaacctcaccacctcttgctcagcctatataccgccatcttcagcaaaccctgatgaaggctacaaagtaagcgcaagtacccacgtaaagacgttaggtcaaggtgtagcccatgaggtggcaagaaatgggctacattttctaccccagaaaactacgatagcccttatgaaacttaagggtcgaaggtggatttagcagtaaactgagagtagagtgcttagttgaacagggccctgaagcgcgtacacaccgcccgtcaccctcctcaagtatacttcaaaggacatttaactaaaacccctacgcatttatatagaggagacaagtcgtaacatggtaagtgtactggaaagtgcacttggacgaaccagagtgtagcttaacacaaagcacccaacttacacttaggagatttcaacttaacttgaccgctctgagctaaacctagccccaaacccactccaccttactaccagacaaccttagccaaaccatttacccaaataaagtataggcgatagaaattgaaacctggcgcaatagatatagtaccgcaagggaaagatgaaaaattataaccaagcataatatagcaaggactaacccctataccttctgcataatgaattaactagaaataactttgcaaggagagccaaagctaagacccccgaaaccagacgagctacctaagaacagctaaaagagcacacccgtctatgtagcaaaatagtgggaagatttataggtagaggcgacaaacctaccgagcctggtgatagctggttgtccaagatagaatcttagttcaactttaaatttgcccacagaaccctctaaatccccttgtaaatttaactgttagtccaaagaggaacagctctttggacactaggaaaaaaccttgtagagagagtaaaaaatttaacacccatagtaggcctaaaagcagccaccaattaagaaagcgttcaagctcaacacccactacctaaaaaatcccaaacatataactgaactcctcacacccaattggaccaatctatcaccctatagaagaactaatgttagtataagtaacatgaaaacattctcctccgcataagcctgcgtcagattaaaacactgaactgacaattaacagcccaatatctacaatcaaccaacaagtcattattaccctcactgtcaacccaacacaggcatgctcataaggaaaggttaaaaaaagtaaaaggaactcggcaaatcttaccccgcctgtttaccaaaaacatcacctctagcatcaccagtattagaggcaccgcctgcccagtgacacatgtttaacggccgcggtaccctaaccgtgcaaaggtagcataatcacttgttccttaaatagggacctgtatgaatggctccacgagggttcagctgtctcttacttttaaccagtgaaattgacctgcccgtgaagaggcgggcatgacacagcaagacgagaagaccctatggagctttaatttattaatgcaaacagtacctaacaaacccacaggtcctaaactaccaaacctgcattaaaaatttcggttggggcgacctcggagcagaacccaacctccgagcagtacatgctaagacttcaccagtcaaagcgaactactatactcaattgatccaataacttgaccaacggaacaagttaccctagggataacagcgcaatcctattctagagtccatatcaacaatagggtttacgacctcgatgttggatcaggacatcccaatggtgcagccgctattaaaggttcgtttgttcaacgattaaagtcctacgtgatctgagttcagaccggagtaatccaggtcggtttctatctacnttcaaattcctccctgtacgaaaggacaagagaaataaggcctacttcacaaagcgccttcccccgtaaatgatatcatctcaacttagtattatacccacacccacccaagaacagggtttgttaagatggcagagcccggtaatcgcataaaacttaaaactttacagtcagaggttcaattcctcttcttaacaacatacccatggccaacctcctactcctcattgtacccattctaatcgcaatggcattcctaatgcttaccgaacgaaaaattctaggctatatacaactacgcaaaggccccaacgttgtaggcccctacgggctactacaacccttcgctgacgccataaaactcttcaccaaagagcccctaaaacccgccacatctaccatcaccctctacatcaccgccccgaccttagctctcaccatcgctcttctactatgaacccccctccccatacccaaccccctggtcaacctcaacctaggcctcctatttattctagccacctctagcctagccgtttactcaatcctctgatcagggtgagcatcaaactcaaactacgccctgatcggcgcactgcgagcagtagcccaaacaatctcatatgaagtcaccctagccatcattctactatcaacattactaataagtggctcctttaacctctccacccttatcacaacacaagaacacctctgattactcctgccatcatgacccttggccataatatgatttatctccacactagcagagaccaaccgaacccccttcgaccttgccgaaggggagtccgaactagtctcaggcttcaacatcgaatacgccgcaggccccttcgccctattcttcatagccgaatacacaaacattattataataaacaccctcaccactacaatcttcctaggaacaacatatgacgcactctcccctgaactctacacaacatattttgtcaccaagaccctacttctaacctccctgttcttatgaattcgaacagcatacccccgattccgctacgaccaactcatacacctcctatgaaaaaacttcctaccactcaccctagcattacttatatgacatgtctccatacccattacaatctccagcattccccctcaaacctaagaaatatgtctgataaaagagttactttgatagagtaaataataggagcttaaacccccttatttctaggactatgagaatcgaacccatccctgagaatccaaaattctccgtgccacctatcacaccccatcctaaagtaaggtcagctaaataagctatcgggcccataccccgaaaatgttggttatacccttcccgtactaattaatcccctggcccaacccgtcatctactctaccatctttgcaggcacactcatcacagcgctaagctcgcactgattttttacctgagtaggcctagaaataaacatgctagcttttattccagttctaaccaaaaaaataaaccctcgttccacagaagctgccatcaagtatttcctcacgcaagcaaccgcatccataatccttctaatagctatcctcttcaacaatatactctccggacaatgaaccataaccaatactaccaatcaatactcatcattaataatcataatggctatagcaataaaactaggaatagccccctttcacttctgagtcccagaggttacccaaggcacccctctgacatccggcctgcttcttctcacatgacaaaaactagcccccatctcaatcatataccaaatctctccctcactaaacgtaagccttctcctcactctctcaatcttatccatcatagcaggcagttgaggtggattaaaccaaacccagctacgcaaaatcttagcatactcctcaattacccacataggatgaataatagcagttctaccgtacaaccctaacataaccattcttaatttaactatttatattatcctaactactaccgcattcctactactcaacttaaactccagcaccacgaccctactactatctcgcacctgaaacaagctaacatgactaacacccttgattccatccaccctcctctccctaggaggcctgcccccgctaaccggctttttgcccaaatgggccattatcgaagaattcacaaaaaacaatagcctcatcatccccaccatcatagccaccatcaccctccttaacctctacttctacctacgcctaatctactccacctcaatcacactactccccatatctaacaacgtaaaaataaaatgacagtttgaacatacaaaacccaccccattcctccccacactcatcgcccttaccacgctactcctacctatctccccttttatactaataatcttatagaaatttaggttaaatacagaccaagagccttcaaagccctcagtaagttgcaatacttaatttctgtaacagctaaggactgcaaaaccccactctgcatcaactgaacgcaaatcagccactttaattaagctaagcccttactagaccaatgggacttaaacccacaaacacttagttaacagctaagcaccctaatcaactggcttcaatctacttctcccgccgccgggaaaaaaggcgggagaagccccggcaggtttgaagctgcttcttcgaatttgcaattcaatatgaaaatcacctcggagctggtaaaaagaggcctaacccctgtctttagatttacagtccaatgcttcactcagccattttacctcacccccactgatgttcgccgaccgttgactattctctacaaaccacaaagacattggaacactatacctattattcggcgcatgagctggagtcctaggcacagctctaagcctccttattcgagccgagctgggccagccaggcaaccttctaggtaacgaccacatctacaacgttatcgtcacagcccatgcatttgtaataatcttcttcatagtaatacccatcataatcggaggctttggcaactgactagttcccctaataatcggtgcccccgatatggcgtttccccgcataaacaacataagcttctgactcttacctccctctctcctactcctgctcgcatctgctatagtggaggccggagcaggaacaggttgaacagtctaccctcccttagcagggaactactcccaccctggagcctccgtagacctaaccatcttctccttacacctagcaggtgtctcctctatcttaggggccatcaatttcatcacaacaattatcaatataaaaccccctgccataacccaataccaaacgcccctcttcgtctgatccgtcctaatcacagcagtcctacttctcctatctctcccagtcctagctgctggcatcactatactactaacagaccgcaacctcaacaccaccttcttcgaccccgccggaggaggagaccccattctataccaacacctattctgatttttcggtcaccctgaagtttatattcttatcctaccaggcttcggaataatctcccatattgtaactcactactccggaaaaaaagaaccatttggatacataggtatggtctgagctatgatatcaattggcttcctagggtttatcgtgtgagcacaccatatatttacagtaggaatagacgtagacacacgagcatatttcacctccgctaccataatcatcgctatccccaccggcgtcaaagtatttagctgactcgccacactccacggaagcaatatgaaatgatctgctgcagtgctctgagccctaggattcatctttcttttcaccgtaggtggcctgactggcattgtattagcaaactcatcactagacatcgtactacacgacacgtactacgttgtagctcacttccactatgtcctatcaataggagctgtatttgccatcataggaggcttcattcactgatttcccctattctcaggctacaccctagaccaaacctacgccaaaatccatttcactatcatattcatcggcgtaaatctaactttcttcccacaacactttctcggcctatccggaatgccccgacgttactcggactaccccgatgcatacaccacatgaaacatcctatcatctgtaggctcattcatttctctaacagcagtaatattaataattttcatgatttgagaagccttcgcttcgaagcgaaaagtcctaatagtagaagaaccctccataaacctggagtgactatatggatgccccccaccctaccacacattcgaagaacccgtatacataaaatctagacaaaaaaggaaggaatcgaaccccccaaagctggtttcaagccaaccccatggcctccatgactttttcaaaaaggtattagaaaaaccatttcataactttgtcaaagttaaattataggctaaatcctatatatcttaatggcacatgcagcgcaagtaggtctacaagacgctacttcccctatcatagaagagcttatcacctttcatgatcacgccctcataatcattttccttatctgcttcctagtcctgtatgcccttttcctaacactcacaacaaaactaactaatactaacatctcagacgctcaggaaatagaaaccgtctgaactatcctgcccgccatcatcctagtcctcatcgccctcccatccctacgcatcctttacataacagacgaggtcaacgatccctcccttaccatcaaatcaattggccaccaatggtactgaacctacgagtacaccgactacggcggactaatcttcaactcctacatacttcccccattattcctagaaccaggcgacctgcgactccttgacgttgacaatcgagtagtactcccgattgaagcccccattcgtataataattacatcacaagacgtcttgcactcatgagctgtccccacattaggcttaaaaacagatgcaattcccggacgtctaaaccaaaccactttcaccgctacacgaccgggggtatactacggtcaatgctctgaaatctgtggagcaaaccacagtttcatgcccatcgtcctagaattaattcccctaaaaatctttgaaatagggcccgtatttaccctatagcaccccctctaccccctctagagcccactgtaaagctaacttagcattaaccttttaagttaaagattaagagaaccaacacctctttacagtgaaatgccccaactaaatactaccgtatggcccaccataattacccccatactccttacactattcctcatcacccaactaaaaatattaaacacaaactaccacctacctccctcaccaaagcccataaaaataaaaaattataacaaaccctgagaaccaaaatgaacgaaaatctgttcgcttcattcattgcccccacaatcctaggcctacccgccgcagtactgatcattctatttccccctctattgatccccacctccaaatatctcatcaacaaccgactaatcaccacccaacaatgactaatcaaactaacctcaaaacaaatgataaccatacacaacactaaaggacgaacctgatctcttatactagtatccttaatcatttttattgccacaactaacctcctcggactcctgcctcactcatttacaccaaccacccaactatctataaacctagccatggccatccccttatgagcgggcgcagtgattataggctttcgctctaagattaaaaatgccctagcccacttcttaccacaaggcacacctacaccccttatccccatactagttattatcgaaaccatcagcctactcattcaaccaatagccctggccgtacgcctaaccgctaacattactgcaggccacctactcatgcacctaattggaagcgccaccctagcaatatcaaccattaaccttccctctacacttatcatcttcacaattctaattctactgactatcctagaaatcgctgtcgccttaatccaagcctacgttttcacacttctagtaagcctctacctgcacgacaacacataatgacccaccaatcacatgcctatcatatagtaaaacccagcccatgacccctaacaggggccctctcagccctcctaatgacctccggcctagccatgtgatttcacttccactccataacgctcctcatactaggcctactaaccaacacactaaccatataccaatgatggcgcgatgtaacacgagaaagcacataccaaggccaccacacaccacctgtccaaaaaggccttcgatacgggataatcctatttattacctcagaagtttttttcttcgcaggatttttctgagccttttaccactccagcctagcccctaccccccaattaggagggcactggcccccaacaggcatcaccccgctaaatcccctagaagtcccactcctaaacacatccgtattactcgcatcaggagtatcaatcacctgagctcaccatagtctaatagaaaacaaccgaaaccaaataattcaagcactgcttattacaattttactgggtctctattttaccctcctacaagcctcagagtacttcgagtctcccttcaccatttccgacggcatctacggctcaacattttttgtagccacaggcttccacggacttcacgtcattattggctcaactttcctcactatctgcttcatccgccaactaatatttcactttacatccaaacatcactttggcttcgaagccgccgcctgatactggcattttgtagatgtggtttgactatttctgtatgtctccatctattgatgagggtcttactcttttagtataaatagtaccgttaacttccaattaactagttttgacaacattcaaaaaagagtaataaacttcgccttaattttaataatcaacaccctcctagccttactactaataattattacattttgactaccacaactcaacggctacatagaaaaatccaccccttacgagtgcggcttcgaccctatatcccccgcccgcgtccctttctccataaaattcttcttagtagctattaccttcttattatttgatctagaaattgccctccttttacccctaccatgagccctacaaacaactaacctgccactaatagttatgtcatccctcttattaatcatcatcctagccctaagtctggcctatgagtgactacaaaaaggattagactgagccgaattggtatatagtttaaacaaaacgaatgatttcgactcattaaattatgataatcatatttaccaaatgcccctcatttacataaatattatactagcatttaccatctcacttctaggaatactagtatatcgctcacacctcatatcctccctactatgcctagaaggaataatactatcgctgttcattatagctactctcataaccctcaacacccactccctcttagccaatattgtgcctattgccatactagtctttgccgcctgcgaagcagcggtgggcctagccctactagtctcaatctccaacacatatggcctagactacgtacataacctaaacctactccaatgctaaaactaatcgtcccaacaattatattactaccactgacatgactttccaaaaaacacataatttgaatcaacacaaccacccacagcctaattattagcatcatccctctactattttttaaccaaatcaacaacaacctatttagctgttccccaaccttttcctccgaccccctaacaacccccctcctaatactaactacctgactcctacccctcacaatcatggcaagccaacgccacttatccagtgaaccactatcacgaaaaaaactctacctctctatactaatctccctacaaatctccttaattataacactcacagccacagaactaatcatattttatatcttcttcgaaaccacacttatccccaccttggctatcatcacccgatgaggcaaccagccagaacgcctgaacgcaggcacatactttctattctacaccctagtaggctcccttcccctactcatcgcactgatttacactcacaacaccctaggctcactaaacattctactactcactctcactgcccaagaactatcaaactcctgagccaacaacttaatatgactagcttacacaatagcttttatagtaaagatacctctttacggactccacttatgactccctaaagcccatgtcgaagcccccatcgctgggtcaatagtacttgccgcagtactcttaaaactaggcggctatggtataatacgcctcacactcattctcaaccccctgacaaaacacatagcctaccccttccttgtactatccctatgaggcataattataacaagctccatctgcctacgacaaacagacctaaaatcgctcattgcatactcttcaatcagccacatagccctcgtagtaacagccattctcatccaaaccccctgaagcttcaccggcgcagtcattctcataatcgcccacggacttacatcctcattactattctgcctagcaaactcaaactacgaacgcactcacagtcgcatcataatcctctctcaaggacttcaaactctactcccactaatagctttttgatgacttctagcaagcctcgctaacctcgccttaccccccactattaacctactgggagaactctctgtgctagtaaccacgttctcctgatcaaatatcactctcctacttacaggactcaacatactagtcacagccctatactccctctacatatttaccacaacacaatggggctcactcacccaccacattaacaacataaaaccctcattcacacgagaaaacaccctcatgttcatacacctatcccccattctcctcctatccctcaaccccgacatcattaccgggttttcctcttgtaaatatagtttaaccaaaacatcagattgtgaatctgacaacagaggcttacgaccccttatttaccgagaaagctcacaagaactgctaactcatgcctccatgtctaacaacatggctttctcaacttttaaaggataacagctatccattggtcttaggccccaaaaattttggtgcaactccaaataaaagtaataaccatgcacactactataaccaccctaaccctgacttccctaattccccccatccttaccaccctcgttaaccctaacaaaaaaaactcatacccccattatgtaaaatccattgtcgcatccacctttattatcagtctcttccccacaacaatattcatgtgcctagaccaagaagttattatctcgaactgacactgagccacaacccaaacaacccagctctccctaagcttcaaactagactacttctccataatattcatccctgtggcattgttcgttacatggtccatcatagaattctcactgtgatatataaactcagacccaaacattaatcagttcttcaaatatctactcatcttcctaattaccatactaatcttagttaccgctaacaacctattccaactgttcatcggctgagagggcgtaggaattatatccttcttgctcatcagttgatgatacgcccgagcagatgccaacacagcagccattcaagcaatcctatacaaccgtatcggcgatatcggtttcatcctcgccttagcatgatttatcctacactccaactcatgagacccacaacaaatagcccttctaaacgctaatccaagcctcaccccactactaggcctcctcctagcagcagcaggcaaatcagcccaattaggtctccacccctgactcccctcagccatagaaggccccaccccagtctcagccctactccactcaagcactatagttgtagcaggaatcttcttactcatccgcttccaccccctagcagaaaatagcccactaatccaaactctaacactatgcttaggcgctatcaccactctgttcgcagcagtctgcgcccttacacaaaatgacatcaaaaaaatcgtagccttctccacttcaagtcaactaggactcataatagttacaatcggcatcaaccaaccacacctagcattcctgcacatctgtacccacgccttcttcaaagccatactatttatgtgctccgggtccatcatccacaaccttaacaatgaacaagatattcgaaaaataggaggactactcaaaaccatacctctcacttcaacctccctcaccattggcagcctagcattagcaggaatacctttcctcacaggtttctactccaaagaccacatcatcgaaaccgcaaacatatcatacacaaacgcctgagccctatctattactctcatcgctacctccctgacaagcgcctatagcactcgaataattcttctcaccctaacaggtcaacctcgcttccccacccttactaacattaacgaaaataaccccaccctactaaaccccattaaacgcctgacagccggaagcctattcgcaggatttctcattactaacaacatttcccccgcatcccccttccaaacaacaatccccctctacctaaaactcacagccctcgctgtcactttcctaggacttctaacagccctagacctcaactacctaaccaacaaacttaaaataaaatccccactatgcacattttatttctccaacatactcggattctaccctagcatcacacaccgcacaatcccctatctaggccttcttacgagccaaaacctgcccctactcctcctagacctaacctgactagaaaagctattacctaaaacaatttcacagcaccaaatctccacctccatcatcacctcaacccaaaaaggcataattaaactttacttcctctctttcttcttcccactcatcctaaccctactcctaatcacataacctattcccccgagcaatctcaattacaatatatacaccaacaaacaatgttcaaccagtaactactactaatcaacgcccataatcatacaaagcccccgcaccaataggatcctcccgaatcaaccctgacccctctccttcataaattattcagcttcctacactattaaagtttaccacaaccaccaccccatcatactctttcacccacagcaccaatcctacctccatcgctaaccccactaaaacactcaccaagacctcaacccctgacccccatgcctcaggatactcctcaatagccatcgctgtagtatatccaaagacaaccatcattccccctaaataaattaaaaaaactattaaacccatataacctcccccaaaattcagaataataacacacccgaccacaccgctaacaatcaatactaaacccccataaataggagaaggcttagaagaaaaccccacaaaccccattactaaacccacactcaacagaaacaaagcatacatcattattctcgcacggactacaaccacgaccaatgatatgaaaaaccatcgttgtatttcaactacaagaacaccaatgaccccaatacgcaaaattaaccccctaataaaattaattaaccactcactcatcgacctccccaccccatccaacatctccgcatgatgaaacttcggctcactccttggcgcctgcctgatcctccaaatcaccacaggactattcctagccatgcactactcaccagacgcctcaaccgccttttcatcaatcgcccacatcactcgagacgtaaattatggctgaatcatccgctaccttcacgccaatggcgcctcaatattctttatctgcctcttcctacacatcgggcgaggcctatattacggatcatttctctactcagaaacctgaaacatcggcattatcctcctgcttgcaactatagcaacagccttcataggctatgtcctcccgtgaggccaaatatcattctgaggggccacagtaattacaaacttactatccgccatcccatacattgggacagacctagttcaatgaatctgaggaggctactcagtagacagtcccaccctcacacgattctttacctttcacttcatcttgcccttcattattgcagccctagcagcactccacctcctattcttgcacgaaacgggatcaaacaaccccctaggaatcacctcccattccgataaaatcaccttccacccttactacacaatcaaagacgccctcggcttacttctcttcattctctccttaatgacattaacactattctcaccagacctcctaggcgacccagacaattataccctagccaaccccttaaacacccctccccacatcaagcccgaatgatatttcctattcgcctacacaattctccgatccgtccctaacaaactaggaggcgtccttgccctattactatccatcctcatcctagcaataatccccatcctccatatatccaaacaacaaagcataatatttcgcccactaagccaatcactttattgactcctagccgcagacctcctcattctaacctgaatcggaggacaaccagtaagctacccttttaccatcattggacaagtagcatccgtactatacttcacaacaatcctaatcctaataccaactatctccctaattgaaaacaaaatactcaaatgggcctgtccttgtagtataaactaatacaccagtcttgtaagccggagatgaaaacctttttccaaggacaaatcagagaaaaagtctttaactccaccattagcacccaaagctaagattctaatttaaactattctctgttctttcatggggaagcagatttgggtaccacccaagtattgactcacccatcaacaaccgctatgtatttcgtacattactgccagccaccatgaatattgtacggtaccataaatacttgaccacctgtagtacataaaaacccaatccacatcaaaaccccctccccatgcttacaagcaagtacagcaatcaaccctcaactatcacacatcaactgcaactccaaagccacccctcacccactaggataccaacaaacctacccacccttaacagtacatagtacataaagccatttaccgtacatagcacattacagtcaaatcccttctcgtccccatggatgacccccctcagataggggtcccttgaccaccatcctccgtgaaatcaatatcccgcacaagagtgctactctcctcgctccgggcccataacacttgggggtagctaaagtgaactgtatccgacatctggttcctacttcagggtcataaagcctaaatagcccacacgttccccttaaataagacatcacgatg

SEQ ID NO: 532 - DNA, 16569 bp, Homo sapiens mitochondrial
  3107: "n" refers to a nucleotide at position 3107 of the Cambridge Reference Sequence (CRS, Anderson et al. 1981 Nature 290:457-465), later determined to be absent from the human mtDNA sequence according to the revised CRS (rCRS, Andrews et al. 1999 Nature Genetics 23:147); "n" therefore represents a single nucleotide deletion at a position corresponding to nucleotide 3107 of SEQ ID NO:1 as provided herein.
gatcacaggtctatcaccctattaaccactcacgggagctctccatgcatttggtattttcgtctggggggtatgcacgcgatagcattgcgagacgctggagccggagcaccctatgtcgcagtatctgtctttgattcctgcctcatcctattatttatcgcacctacgttcaatattacaggcgaacatacttactaaagtgtgttaattaattaatgcttgtaggacataataataacaattgaatgtctgcacagccactttccacacagacatcataacaaaaaatttccaccaaaccccccctcccccgcttctggccacagcacttaaacacatctctgccaaaccccaaaaacaaagaaccctaacaccagcctaaccagatttcaaattttatcttttggcggtatgcacttttaacagtcaccccccaactaacacattattttcccctcccactcccatactactaatctcatcaatacaacccccgcccatcctacccagcacacacacaccgctgctaaccccataccccgaaccaaccaaaccccaaagacaccccccacagtttatgtagcttacctcctcaaagcaatacactgaaaatgtttagacgggctcacatcaccccataaacaaataggtttggtcctagcctttctattagctcttagtaagattacacatgcaagcatccccgttccagtgagttcaccctctaaatcaccacgatcaaaagggacaagcatcaagcacgcagcaatgcagctcaaaacgcttagcctagccacacccccacgggaaacagcagtgattaacctttagcaataaacgaaagtttaactaagctatactaaccccagggttggtcaatttcgtgccagccaccgcggtcacacgattaacccaagtcaatagaagccggcgtaaagagtgttttagatcaccccctccccaataaagctaaaactcacctgagttgtaaaaaactccagttgacacaaaatagactacgaaagtggctttaacatatctgaacacacaatagctaagacccaaactgggattagataccccactatgcttagccctaaacctcaacagttaaatcaacaaaactgctcgccagaacactacgagccacagcttaaaactcaaaggacctggcggtgcttcatatccctctagaggagcctgttctgtaatcgataaaccccgatcaacctcaccacctcttgctcagcctatataccgccatcttcagcaaaccctgatgaaggctacaaagtaagcgcaagtacccacgtaaagacgttaggtcaaggtgtagcccatgaggtggcaagaaatgggctacattttctaccccagaaaactacgatagcccttatgaaacttaagggtcgaaggtggatttagcagtaaactgagagtagagtgcttagttgaacagggccctgaagcgcgtacacaccgcccgtcaccctcctcaagtatacttcaaaggacatttaactaaaacccctacgcatttatatagaggagacaagtcgtaacatggtaagtgtactggaaagtgcacttggacgaaccagagtgtagcttaacacaaagcacccaacttacacttaggagatttcaacttaacttgaccgctctgagctaaacctagccccaaacccactccaccttactaccagacaaccttagccaaaccatttacccaaataaagtataggcgatagaaattgaaacctggcgcaatagatatagtaccgcaagggaaagatgaaaaattataaccaagcataatatagcaaggactaacccctataccttctgcataatgaattaactagaaataactttgcaaggagagccaaagctaagacccccgaaaccagacgagctacctaagaacagctaaaagagcacacccgtctatgtagcaaaatagtgggaagatttataggtagaggcgacaaacctaccgagcctggtgatagctggttgtccaagatagaatcttagttcaactttaaatttgcccacagaaccctctaaatccccttgtaaatttaactgttagtccaaagaggaacagctctttggacactaggaaaaaaccttgtagagagagtaaaaaatttaacacccatagtaggcctaaaagcagccaccaattaagaaagcgttcaagctcaacacccactacctaaaaaatcccaaacatataactgaactcctcacacccaattggaccaatctatcaccctatagaagaactaatgttagtataagtaacatgaaaacattctcctccgcataagcctgcgtcagattaaaacactgaactgacaattaacagcccaatatctacaatcaaccaacaagtcattattaccctcactgtcaacccaacacaggcatgctcataaggaaaggttaaaaaaagtaaaaggaactcggcaaatcttaccccgcctgtttaccaaaaacatcacctctagcatcaccagtattagaggcaccgcctgcccagtgacacatgtttaacggccgcggtaccctaaccgtgcaaaggtagcataatcacttgttccttaaatagggacctgtatgaatggctccacgagggttcagctgtctcttacttttaaccagtgaaattgacctgcccgtgaagaggcgggcataacacagcaagacgagaagaccctatggagctttaatttattaatgcaaacagtacctaacaaacccacaggtcctaaactaccaaacctgcattaaaaatttcggttggggcgacctcggagcagaacccaacctccgagcagtacatgctaagacttcaccagtcaaagcgaactactatactcaattgatccaataacttgaccaacggaacaagttaccctagggataacagcgcaatcctattctagagtccatatcaacaatagggtttacgacctcgatgttggatcaggacatcccaatggtgcagccgctattaaaggttcgtttgttcaacgattaaagtcctacgtgatctgagttcagaccggagtaatccaggtcggtttctatctacnttcaaattcctccctgtacgaaaggacaagagaaataaggcctacttcacaaagcgccttcccccgtaaatgatatcatctcaacttagtattatacccacacccacccaagaacagggtttgttaagatggcagagcccggtaatcgcataaaacttaaaactttacagtcagaggttcaattcctcttcttaacaacatacccatggccaacctcctactcctcattgtacccattctaatcgcaatggcattcctaatgcttaccgaacgaaaaattctaggctatatacaactacgcaaaggccccaacgttgtaggcccctacgggctactacaacccttcgctgacgccataaaactcttcaccaaagagcccctaaaacccgccacatctaccatcaccctctacatcaccgccccgaccttagctctcaccatcgctcttctactatgaacccccctccccatacccaaccccctggtcaacctcaacctaggcctcctatttattctagccacctctagcctagccgtttactcaatcctctgatcagggtgagcatcaaactcaaactacgccctgatcggcgcactgcgagcagtagcccaaacaatctcatatgaagtcaccctagccatcattctactatcaacattactaataagtggctcctttaacctctccacccttatcacaacacaagaacacctctgattactcctgccatcatgacccttggccataatatgatttatctccacactagcagagaccaaccgaacccccttcgaccttgccgaaggggagtccgaactagtctcaggcttcaacatcgaatacgccgcaggccccttcgccctattcttcatagccgaatacacaaacattattataataaacaccctcaccactacaatcttcctaggaacaacatatgacgcactctcccctgaactctacacaacatattttgtcaccaagaccctacttctaacctccctgttcttatgaattcgaacagcatacccccgattccgctacgaccaactcatacacctcctatgaaaaaacttcctaccactcaccctagcattacttatatgatatgtctccatacccattacaatctccagcattccccctcaaacctaagaaatatgtctgataaaagagttactttgatagagtaaataataggagcttaaacccccttatttctaggactatgagaatcgaacccatccctgagaatccaaaattctccgtgccacctatcacaccccatcctaaagtaaggtcagctaaataagctatcgggcccataccccgaaaatgttggttatacccttcccgtactaattaatcccctggcccaacccgtcatctactctaccatctttgcaggcacactcatcacagcgctaagctcgcactgattttttacctgagtaggcctagaaataaacatgctagcttttattccagttctaaccaaaaaaataaaccctcgttccacagaagctgccatcaagtatttcctcacgcaagcaaccgcatccataatccttctaatagctatcctcttcaacaatatactctccggacaatgaaccataaccaatactaccaatcaatactcatcattaataatcataatggctatagcaataaaactaggaatagccccctttcacttctgagtcccagaggttacccaaggcacccctctgacatccggcctgcttcttctcacatgacaaaaactagcccccatctcaatcatataccaaatctctccctcactaaacgtaagccttctcctcactctctcaatcttatccatcatagcaggcagttgaggtggattaaaccaaacccagctacgcaaaatcttagcatactcctcaattacccacataggatgaataatagcagttctaccgtacaaccctaacataaccattcttaatttaactatttatattatcctaactactaccgcattcctactactcaacttaaactccagcaccacgaccctactactatctcgcacctgaaacaagctaacatgactaacacccttaattccatccaccctcctctccctaggaggcctgcccccgctaaccggctttttgcccaaatgggccattatcgaagaattcacaaaaaacaatagcctcatcatccccaccatcatagccaccatcaccctccttaacctctacttctacctacgcctaatctactccacctcaatcacactactccccatatctaacaacgtaaaaataaaatgacagtttgaacatacaaaacccaccccattcctccccacactcatcgcccttaccacgctactcctacctatctccccttttatactaataatcttatagaaatttaggttaaatacagaccaagagccttcaaagccctcagtaagttgcaatacttaatttctgtaacagctaaggactgcaaaaccccactctgcatcaactgaacgcaaatcagccactttaattaagctaagcccttactagaccaatgggacttaaacccacaaacacttagttaacagctaagcaccctaatcaactggcttcaatctacttctcccgccgccgggaaaaaaggcgggagaagccccggcaggtttgaagctgcttcttcgaatttgcaattcaatatgaaaatcacctcggagctggtaaaaagaggcctaacccctgtctttagatttacagtccaatgcttcactcagccattttacctcacccccactgatgttcgccgaccgttgactattctctacaaaccacaaagacattggaacactatacctattattcggcgcatgagctggagtcctaggcacagctctaagcctccttattcgagccgagctgggccagccaggcaaccttctaggtaacgaccacatctacaacgttatcgtcacagcccatgcatttgtaataatcttcttcatagtaatacccatcataatcggaggctttggcaactgactagttcccctaataatcggtgcccccgatatggcgtttccccgcataaacaacataagcttctgactcttacctccctctctcctactcctgctcgcatctgctatagtggaggccggagcaggaacaggttgaacagtctaccctcccttagcagggaactactcccaccctggagcctccgtagacctaaccatcttctccttacacctagcaggtgtctcctctatcttaggggccatcaatttcatcacaacaattatcaatataaaaccccctgccataacccaataccaaacgcccctcttcgtctgatccgtcctaatcacagcagtcctacttctcctatctctcccagtcctagctgctggcatcactatactactaacagaccgcaacctcaacaccaccttcttcgaccccgccggaggaggagaccccattctataccaacacctattctgatttttcggtcaccctgaagtttatattcttatcctaccaggcttcggaataatctcccatattgtaacttactactccggaaaaaaagaaccatttggatacataggtatggtctgagctatgatatcaattggcttcctagggtttatcgtgtgagcacaccatatatttacagtaggaatagacgtagacacacgagcatatttcacctccgctaccataatcatcgctatccccaccggcgtcaaagtatttagctgactcgccacactccacggaagcaatatgaaatgatctgctgcagtgctctgagccctaggattcatctttcttttcaccgtaggtggcctgactggcattgtattagcaaactcatcactagacatcgtactacacgacacatactacgttgtagcccacttccactatgtcctatcaataggagctgtatttgccatcataggaggcttcattcactgatttcccctattctcaggctacaccctagaccaaacctacgccaaaatccatttcactatcatattcatcggcgtaaatctaactttcttcccacaacactttctcggcctatccggaatgccccgacgttactcggactaccccgatgcatacaccacatgaaacatcctatcatctgtaggctcattcatttctctaacagcagtaatattaataattttcatgatttgagaagccttcgcttcgaagcgaaaagtcctaatagtagaagaaccctccataaacctggagtgactatatggatgccccccaccctaccacacattcgaagaacccgtatacataaaatctagacaaaaaaggaaggaatcgaaccccccaaagctggtttcaagccaaccccatggcctccatgactttttcaaaaaggtattagaaaaaccatttcataactttgtcaaagttaaattataggctaaatcctatatatcttaatggcacatgcagcgcaagtaggtctacaagacgctacttcccctatcatagaagagcttatcacctttcatgatcacgccctcataatcattttccttatctgcttcctagtcctgtatgcccttttcctaacactcacaacaaaactaactaatactaacatctcagacgctcaggaaatagaaaccgtctgaactatcctgcccgccatcatcctagtcctcatcgccctcccatccctacgcatcctttacataacagacgaggtcaacgatccctcccttaccatcaaatcaattggccaccaatggtactgaacctacgagtacaccgactacggcggactaatcttcaactcctacatacttcccccattattcctagaaccaggcgacctgcgactccttgacgttgacaatcgagtagtactcccgattgaagcccccattcgtataataattacatcacaagacgtcttgcactcatgagctgtccccacattaggcttaaaaacagatgcaattcccggacgtctaaaccaaaccactttcaccgctacacgaccgggggtatactacggtcaatgctctgaaatctgtggagcaaaccacagtttcatgcccatcgtcctagaattaattcccctaaaaatctttgaaatagggcccgtatttaccctatagcaccccctctaccccctctagagcccactgtaaagctaacttagcattaaccttttaagttaaagattaagagaaccaacacctctttacagtgaaatgccccaactaaatactaccgtatggcccaccataattacccccatactccttacactattcctcatcacccaactaaaaatattaaacacaaactaccacctacctccctcaccaaagcccataaaaataaaaaattataacaaaccctgagaaccaaaatgaacgaaaatctgttcgcttcattcattgcccccacaatcctaggcctacccgccgcagtactgatcattctatttccccctctattgatccccacctccaaatatctcatcaacaaccgactaatcaccacccaacaatgactaatcaaactaacctcaaaacaaatgataaccatacacaacactaaaggacgaacctgatctcttatactagtatccttaatcatttttattgccacaactaacctcctcggactcctgcctcactcatttacaccaaccacccaactatctataaacctagccatggccatccccttatgagcgggcgcagtgattataggctttcgctctaagattaaaaatgccctagcccacttcttaccacaaggcacacctacaccccttatccccatactagttattatcgaaaccatcagcctactcattcaaccaatagccctggccgtacgcctaaccgctaacattactgcaggccacctactcatgcacctaattggaagcgccaccctagcaatatcaaccattaaccttccctctacacttatcatcttcacaattctaattctactgactatcctagaaatcgctgtcgccttaatccaagcctacgttttcacacttctagtaagcctctacctgcacgacaacacataatgacccaccaatcacatgcctatcatatagtaaaacccagcccatgacccctaacaggggccctctcagccctcctaatgacctccggcctagccatgtgatttcacttccactccataacgctcctcatactaggcctactaaccaacacactaaccatataccaatgatggcgcgatgtaacacgagaaagcacataccaaggccaccacacaccacctgtccaaaaaggccttcgatacgggataatcctatttattacctcagaagtttttttcttcgcaggatttttctgagccttttaccactccagcctagcccctaccccccaattaggagggcactggcccccaacaggcatcaccccgctaaatcccctagaagtcccactcctaaacacatccgtattactcgcatcaggagtatcaatcacctgagctcaccatagtctaatagaaaacaaccgaaaccaaataattcaagcactgcttattacaattttactgggtctctattttaccctcctacaagcctcagagtacttcgagtctcccttcaccatttccgacggcatctacggctcaacattttttgtagccacaggcttccacggacttcacgtcattattggctcaactttcctcactatctgcttcatccgccaactaatatttcactttacatccaaacatcactttggcttcgaagccgccgcctgatactggcattttgtagatgtggtttgactatttctgtatgtctccatctattgatgagggtcttactcttttagtataaatagtaccgttaacttccaattaactagttttgacaacattcaaaaaagagtaataaacttcgccttaattttaataatcaacaccctcctagccttactactaataattattacattttgactaccacaactcaacggctacatagaaaaatccaccccttacgagtgcggcttcgaccctatatcccccgcccgcgtccctttctccataaaattcttcttagtagctattaccttcttattatttgatctagaaattgccctccttttacccctaccatgagccctacaaacaactaacctgccactaatagttatgtcatccctcttattaatcatcatcctagccctaagtctggcctatgagtgactacaaaaaggattagactgaaccgaattggtatatagtttaaacaaaacgaatgatttcgactcattaaattatgataatcatatttaccaaatgcccctcatttacataaatattatactagcatttaccatctcacttctaggaatactagtatatcgctcacacctcatatcctccctactatgcctagaaggaataatactatcgctgttcattatagctactctcataaccctcaacacccactccctcttagccaatattgtgcctattgccatactagtctttgccgcctgcgaagcagcggtgggcctagccctactagtctcaatctccaacacatatggcctagactacgtacataacctaaacctactccaatgctaaaactaatcgtcccaacaattatattactaccactgacatgactttccaaaaaacacataatttgaatcaacacaaccacccacagcctaattattagcatcatccctctactattttttaaccaaatcaacaacaacctatttagctgttccccaaccttttcctccgaccccctaacaacccccctcctaatactaactacctgactcctacccctcacaatcatggcaagccaacgccacttatccagtgaaccactatcacgaaaaaaactctacctctctatactaatctccctacaaatctccttaattataacattcacagccacagaactaatcatattttatatcttcttcgaaaccacacttatccccaccttggctatcatcacccgatgaggcaaccagccagaacgcctgaacgcaggcacatacttcctattctacaccctagtaggctcccttcccctactcatcgcactaatttacactcacaacaccctaggctcactaaacattctactactcactctcactgcccaagaactatcaaactcctgagccaacaacttaatatgactagcttacacaatagcttttatagtaaagatacctctttacggactccacttatgactccctaaagcccatgtcgaagcccccatcgctgggtcaatagtacttgccgcagtactcttaaaactaggcggctatggtataatacgcctcacactcattctcaaccccctgacaaaacacatagcctaccccttccttgtactatccctatgaggcataattataacaagctccatctgcctacgacaaacagacctaaaatcgctcattgcatactcttcaatcagccacatagccctcgtagtaacagccattctcatccaaaccccctgaagcttcaccggcgcagtcattctcataatcgcccacgggcttacatcctcattactattctgcctagcaaactcaaactacgaacgcactcacagtcgcatcataatcctctctcaaggacttcaaactctactcccactaatagctttttgatgacttctagcaagcctcgctaacctcgccttaccccccactattaacctactgggagaactctctgtgctagtaaccacattctcctgatcaaatatcactctcctacttacaggactcaacatactagtcacagccctatactccctctacatatttaccacaacacaatggggctcactcacccaccacattaacaacataaaaccctcattcacacgagaaaacaccctcatgttcatacacctatcccccattctcctcctatccctcaaccccgacatcattaccgggttttcctcttgtaaatatagtttaaccaaaacatcagattgtgaatctgacaacagaggcttacgaccccttatttaccgagaaagctcacaagaactgctaactcatgcccccatgtctaacaacatggctttctcaacttttaaaggataacagctatccattggtcttaggccccaaaaattttggtgcaactccaaataaaagtaataaccatgcacactactataaccaccctaaccctgacttccctaattccccccatccttaccaccctcgttaaccctaacaaaaaaaactcatacccccattatgtaaaatccattgtcgcatccacctttattatcagtctcttccccacaacaatattcatgtgcctagaccaagaagttattatctcgaactgacactgagccacaacccaaacaacccagctctccctaagcttcaaactagactacttctccataatattcatccctgtagcattgttcgttacatggtccatcatagaattctcactgtgatatataaactcagacccaaacattaatcagttcttcaaatatctactcatcttcctaattaccatactaatcttagttaccgctaacaacctattccaactgttcatcggctgagagggcgtaggaattatatccttcttgctcatcagttgatgatacgcccgagcagatgccaacacagcagccattcaagcaatcctatacaaccgtatcggcgatatcggtttcatcctcgccttagcatgatttatcctacactccaactcatgagacccacaacaaatagcccttctaaacgctaatccaagcctcaccccactactaggcctcctcctagcagcagcaggcaaatcagcccaattaggtctccacccctgactcccctcagccatagaaggccccaccccagtctcagccctactccactcaagcactatagttgtagcaggaatcttcttactcatccgcttccaccccctagcagaaaatagcccactaatccaaactctaacactatgcttaggcgctatcaccactctgttcgcagcagtctgcgcccttacacaaaatgacatcaaaaaaatcgtagccttctccacttcaagtcaactaggactcataatagttacaatcggcatcaaccaaccacacctagcattcctgcacatctgtacccacgccttcttcaaagccatactatttatgtgctccgggtccatcatccacaaccttaacaatgaacaagatattcgaaaaataggaggactactcaaaaccatacctctcacttcaacctccctcaccattggcagcctagcattagcaggaatacctttcctcacaggtttctactccaaagaccacatcatcgaaaccgcaaacatatcatacacaaacgcctgagccctatctattactctcatcgctacctccctgacaagcgcctatagcactcgaataattcttctcaccctaacaggtcaacctcgcttccccacccttactaacattaacgaaaataaccccaccctactaaaccccattaaacgcctggcagccggaagcctattcgcaggatttctcattactaacaacatttcccccgcatcccccttccaaacaacaatccccctctacctaaaactcacagccctcgctgtcactttcctaggacttctaacagccctagacctcaactacctaaccaacaaacttaaaataaaatccccactatgcacattttatttctccaacatactcggattctaccctagcatcacacaccgcacaatcccctatctaggccttcttacgagccaaaacctgcccctactcctcctagacctaacctgactagaaaagctattacctaaaacaatttcacagcaccaaatctccacctccatcatcacctcaacccaaaaaggcataattaaactttacttcctctctttcttcttcccactcatcctaaccctactcctaatcacataacctattcccccgagcaatctcaattacaatatatacaccaacaaacaatgttcaaccagtaactactactaatcaacgcccataatcatacaaagcccccgcaccaataggatcctcccgaatcaaccctgacccctctccttcataaattattcagcttcctacactattaaagtttaccacaaccaccaccccatcatactctttcacccacagcaccaatcctacctccatcgctaaccccactaaaacactcaccaagacctcaacccctgacccccatgcctcaggatactcctcaatagccatcgctgtagtatatccaaagacaaccatcattccccctaaataaattaaaaaaactattaaacccatataacctcccccaaaattcagaataataacacacccgaccacaccgctaacaatcaatactaaacccccataaataggagaaggcttagaagaaaaccccacaaaccccattactaaacccacactcaacagaaacaaagcatacatcattattctcgcacggactacaaccacgaccaatgatatgaaaaaccatcgttgtatttcaactacaagaacaccaatgaccccaatacgcaaaactaaccccctaataaaattaattaaccactcattcatcgacctccccaccccatccaacatctccgcatgatgaaacttcggctcactccttggcgcctgcctgatcctccaaatcaccacaggactattcctagccatgcactactcaccagacgcctcaaccgccttttcatcaatcgcccacatcactcgagacgtaaattatggctgaatcatccgctaccttcacgccaatggcgcctcaatattctttatctgcctcttcctacacatcgggcgaggcctatattacggatcatttctctactcagaaacctgaaacatcggcattatcctcctgcttgcaactatagcaacagccttcataggctatgtcctcccgtgaggccaaatatcattctgaggggccacagtaattacaaacttactatccgccatcccatacattgggacagacctagttcaatgaatctgaggaggctactcagtagacagtcccaccctcacacgattctttacctttcacttcatcttgcccttcattattgcagccctagcagcactccacctcctattcttgcacgaaacgggatcaaacaaccccctaggaatcacctcccattccgataaaatcaccttccacccttactacacaatcaaagacgccctcggcttacttctcttccttctctccttaatgacattaacactattctcaccagacctcctaggcgacccagacaattataccctagccaaccccttaaacacccctccccacatcaagcccgaatgatatttcctattcgcctacacaattctccgatccgtccctaacaaactaggaggcgtccttgccctattactatccatcctcatcctagcaataatccccatcctccatatatccaaacaacaaagcataatatttcgcccactaagccaatcactttattgactcctagccgcagacctcctcattctaacctgaatcggaggacaaccagtaagctacccttttaccatcattggacaagtagcatccgtactatacttcacaacaatcctaatcctaataccaactatctccctaattgaaaacaaaatactcaaatgggcctgtccttgtagtataaactaatacaccagtcttgtaaaccggagatgaaaacctttttccaaggacaaatcagagaaaaagtctttaactccaccattagcacccaaagctaagattctaatttaaactattctctgttctttcatggggaagcagatttgggtaccacccaagtattgactcacccatcaacaaccgctatgtatttcgtacattactgccagccaccatgaatattgtacggtaccataaatacttgaccacctgtagtacataaaaacccaatccacatcaaaaccccctccccatgcttacaagcaagtacagcaatcaaccctcaactatcacacatcaactgcaactccaaagccacccctcacccactaggataccaacaaacctacccacccttaacagtacatagtacataaagccatttaccgtacatagcacattacagtcaaatcccttctcgtccccatggatgacccccctcagataggggtcccttgaccaccatcctccgtgaaatcaatatcccgcacaagagtgctactctcctcgctccgggcccataacacttgggggtagctaaagtgaactgtatccgacatctggttcctacttcagggtcataaagcctaaatagcccacacgttccccttaaataagacatcacgatg

SEQ ID NO: 533 - DNA, 16569 bp, Homo sapiens mitochondrial
  3107: "n" refers to a nucleotide at position 3107 of the Cambridge Reference Sequence (CRS, Anderson et al. 1981 Nature 290:457-465), later determined to be absent from the human mtDNA sequence according to the revised CRS (rCRS, Andrews et al. 1999 Nature Genetics 23:147); "n" therefore represents a single nucleotide deletion at a position corresponding to nucleotide 3107 of SEQ ID NO:1 as provided herein.
gatcacaggtctatcaccctattaaccactcacgggagctctccatgcatttggtattttcgtttggggggtgtgcacgcgatagcattgcgagacgctggaaccggagcaccctatgtcgcagtatctgtctttgattcctgccccatcctattatttatcgcacctacgttcaatattacaggcgaacatacttactaaagtgtgttaattaattaatgcttgtaggacataataataacaattgaatgtctgcacagccgctttccacacagacatcataacaaaaaatttccaccaaaccccccctcccccccgcttctggccacagcacttaaacacatctctgccaaaccccaaaaacaaagaaccctaacaccagcctaaccagatttcaaattttatcttttggcggtatgcacttttaacagtcaccccccaactaacacattattttcccctcccactcccatactactaatctcatcaatacaacccccgcccatcctacccagcacacacaccgctgctaaccccataccccgaaccaaccaaaccccaaagacaccccccacagtttatgtagcttacctcctcaaagcaatacactgaaaatgtttagacgggctcacatcaccccataaacaaataggtttggtcctggcctttctattagctcttagtaagattacacatgcaagcatccccgttccagtgagttcaccctctaaatcaccacgatcaaaagggacaagcatcaagcacgcagcaatgcagctcaaaacgcttagcctagccacacccccacgggaaacagcagtgattaacctttagcaataaacgaaagtttaactaagctatactaaccccagggttggtcaatttcgtgccagccaccgcggtcacacgattaacccaagtcaatagaagccggcgtaaagagtgttttagatcaccccctccccaataaagctaaaactcacctgagttgtaaaaaactccagttgacacaaaatagactacgaaagtggctttaacatatctgaacacacaatagctaagacccaaactgggattagataccccactatgcttagccctaaacctcaacagttaaatcaacaaaactgctcgccagaacactacgagccacagcttaaaactcaaaggacctggcggtgcttcatatccctctagaggagcctgttctgtaatcgataaaccccgatcaacctcaccacctcttgctcagcctatataccgccatcttcagcaaaccctgatgaaggctacaaagtaagcgcaagtacccacgtaaagacgttaggtcaaggtgtagcccatgaggtggcaagaaatgggctacattttctaccccagaaaactacgatagcccttatgaaacttaagggtcgaaggtggatttagcagtaaactgagagtagagtgcttagttgaacagggccctgaagcgcgtacacaccgcccgtcaccctcctcaagtatacttcaaaggacatttaactaaaacccctacgcatttatatagaggagacaagtcgtaacatggtaagtgtactggaaagtgcacttggacgaaccagagtgtagcttaacacaaagcacccaacttacacttaggagatttcaacttaacttgaccgctctgagctaaacctagccccaaacccactccaccttactaccagacaaccttagccaaaccatttacccagataaagtataggcgatagaaattgaaacctggcgcaatagatatagtaccgcaagggaaagatgaaaaattataaccaagcataatatagcaaggactaacccctataccttctgcataatgaattaactagaaataactttgcaaggagagccaaagctaagacccccgaaaccagacgagctacctaagaacagctaaaagagcacacccgtctatgtagcaaaatagtgggaagatttataggtagaggcgacaaacctaccgagcctggtgatagctggttgtccaagatagaatcttagttcaactttaaatttgcccacagaaccctctaaatccccttgtaaatttaactgttagtccaaagaggaacagctctttggacactaggaaaaaaccttgtagagagagtaaaaaatttaacacccatagtaggcctaaaagcagccaccaattaagaaagcgttcaagctcaacacccactacctaaaaaatcccaaacatataactgaactcctcacacccaattggaccaatctatcaccctatagaagaactaatgttagtataagtaacatgaaaacattctcctccgcataagcctgcgtcagattaaaacactgaactgacaattaacagcccaatatctacaatcaaccaacaagtcattattaccctcactgtcaacccaacacaggcatgctcataaggaaaggttaaaaaaagtaaaaggaactcggcaaatcttaccccgcctgtttaccaaaaacatcacctctagcatcaccagtattagaggcaccgcctgcccagtgacacatgtttaacggccgcggtaccctaaccgtgcaaaggtagcataatcacttgttccttaaatagggacctgtatgaatggctccacgagggttcagctgtctcttacttttaaccagtgaaattgacctgcccgtgaagaggcgggcatgacacagcaagacgagaagaccctatggagctttaatttattaatgcaaacagtacctaacaaacccacaggtcctaaactaccaaacctgcattaaaaatttcggttggggcgacctcggagcagaacccaacctccgagcagtacatgctaagacttcaccagtcaaagcgaactactatactcaattgatccaataacttgaccaacggaacaagttaccctagggataacagcgcaatcctattctagagtccatatcaacaatagggtttacgacctcgatgttggatcaggacatcccgatggtgcagccgctattaaaggttcgtttgttcaacgattaaagtcctacgtgatctgagttcagaccggagtaatccaggtcggtttctatctacnttcaaattcctccctgtacgaaaggacaagagaaataaggcctacttcacaaagcgccttcccccgtaaatgatatcatctcaacttagtattatacccacacccacccaagaacagggtttgttaagatggcagagcccggtaatcgcataaaacttaaaactttacagtcagaggttcaattcctcttcttaacaacatacccatgaccaacctcctactcctcattgtacccattctaatcgcaatggcattcctaatgcttaccgaacgaaaaattctaggctatatacaactacgcaaaggccccaacgttgtaggcccctacgggctactacaacccttcgctgacgccataaaactcttcaccaaagagcccctaaaacccgccacatctaccatcaccctctacatcaccgccccgaccttagctctcaccatcgctcttctactatgaacccccctccccatacccaaccccctggtcaacctcaacctaggcctcctatttattctagccacctctagcctagccgtttactcaatcctctgatcagggtgagcatcaaactcaaactacgccctgatcggcgcactgcgagcagtagcccaaacaatctcatatgaagtcaccctagccatcattctactatcaacattactaataagtggctcctttaacctctccacccttatcacaacacaagaacacctctgattactcctgccatcatgacccttggccataatatgatttatctccacactagcagagaccaaccgaacccccttcgaccttgccgaaggggagtccgaactagtctcaggcttcaacatcgaatacgccgcaggccccttcgccctattcttcatagccgaatacacaaacattattataataaacaccctcaccactacaatcttcctaggaacaacatatgacgcactctcccctgaactctacacaacatattttgtcaccaagaccctacttctaacctccctgttcttatgaattcgaacagcatacccccgattccgctacgaccaactcatacacctcctatgaaaaaacttcctaccactcaccctagcattacttatatgatatgtctccatacccattacaatctccagcatcccccctcaaacctaagaaatatgtctgataaaagagttactttgatagagtaaataataggagcttaaacccccttatttctaggactatgagaatcgaacccatccctgagaatccaaaattctccgtgccacctatcacaccccatcctaaagtaaggtcagctaaataagctatcgggcccataccccgaaaatgttggttatacccttcccgtactaattaatcccctggcccaacccgtcatctactctaccatctttgcaggcacactcatcacagcgctaagctcgcactgattttttacctgagtaggcctagaaataaacatgctagcttttattccagttctaaccaaaaaaataaaccctcgttccacagaagctgccatcaagtatttcctcacgcaagcaaccgcatccataatccttctaatagctatcctcttcaacaatatactctccggacaatgaaccataaccaatactaccaatcaatactcatcattaataatcataatggctatagcaataaaactaggaatagccccctttcacttctgagtcccagaggttgcccaaggcacccctctgacatccggcctgcttcttctcacatgacaaaaactagcccccatctcaatcatataccaaatctctccctcactaaacgtaagccttctcctcactctctcaatcttatccatcatagcaggcagttgaggtggattaaaccaaacccagctacgcaaaatcttagcatactcctcaattacccacataggatgaataatagcagttctaccgtacaaccctaacataaccattcttaatttaactatttatattatcctaactactaccgcattcctactactcaacttaaactccagcaccacgaccctactactatctcgcacctgaaacaagctaacatgactaacacccttaattccatccaccctcctctccctaggaggcctgcccccgctaaccggctttttgcccaaatgggccattatcgaagaattcacaaaaaacaatagcctcatcatccccaccatcatagccaccatcaccctccttaacctctacttctacctacgcctaatctactccacctcaatcacactactccccatatctaacaacgtaaaaataaaatgacagtttgaacatacaaaacccaccccattcctccccacactcatcgcccttaccacgctactcctacctatctccccttttatactaataatcttatagaaatttaggttaaatacagaccaagagccttcaaagccctcagtaagttgcaatacttaatttctgtaacagctaaggactgcaaaaccccactctgcatcaactgaacgcaaatcagccactttaattaagctaagcccttactagaccaatgggacttaaacccacaaacacttagttaacagctaagcaccctaatcaactggcttcaatctacttctcccgccgccgggaaaaaaggcgggagaagccccggcaggtttgaagctgcttcttcgaatttgcaattcaatatgaaaatcacctcggagctggtaaaaagaggcctaacccctgtctttagatttacagtccaatgcttcactcagccattttacctcacccccactgatgttcgccgaccgttgactattctctacaaaccacaaagacattggaacactatacctattattcggcgcatgagctggagtcctaggcacagctctaagcctccttattcgagccgagctgggccagccaggcaaccttctaggtaacgaccacatctacaacgttatcgtcacagcccatgcatttgtaataatcttcttcatagtaatacccatcataatcggaggctttggcaactgactagttcccctaataatcggtgcccccgatatggcgtttccccgcataaacaacataagcttctgactcttacctccctctctcctactcctgctcgcatctgctatagtggaggccggagcaggaacaggttgaacagtctaccctcccttagcagggaactactcccaccctggagcctccgtagacctaaccatcttctccttacacctagcaggtgtctcctctatcttaggggccatcaatttcatcacaacaattatcaatataaaaccccctgccataacccaataccaaacgcccctcttcgtctgatccgtcctaatcacagcagtcctacttctcctatctctcccagtcctagctgctggcatcactatactactaacagaccgcaacctcaacaccaccttcttcgaccccgccggaggaggagaccccattctataccaacacctattctgatttttcggtcaccctgaagtttatattcttatcctaccaggcttcggaataatctcccatattgtaacttactactccggaaaaaaagaaccatttggatacataggtatggtctgagctatgatatcaattggcttcctagggtttatcgtgtgagcacaccatatatttacagtaggaatagacgtagacacacgagcatatttcacctccgctaccataatcatcgctatccccaccggcgtcaaagtatttagctgactcgccacactccacggaagcaatatgaaatgatctgctgcagtgctctgagccctaggattcatctttcttttcaccgtaggtggcctgactggcattgtattagcaaactcatcactagacatcgtactacacgacacgtactacgttgtagctcacttccactatgtcctatcaataggagctgtatttgccatcataggaggcttcattcactgatttcccctattctcaggctacaccctagaccaaacctacgccaaaatccatttcactatcatattcatcggcgtaaatctaactttcttcccacaacactttctcggcctatccggaatgccccgacgttactcggactaccccgatgcatacaccacatgaaacatcctatcatctgtaggctcattcatttctctaacagcagtaatattaataattttcatgatttgagaagccttcgcttcgaagcgaaaagtcctaatagtagaagaaccctccataaacctggagtgactatatggatgccccccaccctaccacacattcgaagaacccgtatacataaaatctagacaaaaaaggaaggaatcgaaccccccaaagctggtttcaagccaaccccatggcctccatgactttttcaaaaaggtattagaaaaaccatttcataactttgtcaaagttaaattataggctaaatcctatatatcttaatggcacatgcagcgcaagtaggtctacaagacgctacttcccctatcatagaagagcttatcacctttcatgatcacgccctcataatcattttccttatctgcttcctagtcctgtatgcccttttcctaacactcacaacaaaactaactaatactaacatctcagacgctcaggaaatagaaaccgtctgaactatcctgcccgccatcatcctagtcctcatcgccctcccatccctacgcatcctttacataacagacgaggtcaacgatccctcccttaccatcaaatcaattggccaccaatggtactgaacctacgagtacaccgactacggcggactaatcttcaactcctacatacttcccccattattcctagaaccaggcgacctgcgactccttgacgttgacaatcgagtagtactcccgattgaaacccccattcgtataataattacatcacaagacgtcttgcactcatgagctgtccccacattaggcttaaaaacagatgcaattcccggacgtctaaaccaaaccactttcaccgctacacgaccgggggtatactacggtcaatgctctgaaatctgtggagcaaaccacagtttcatgcccatcgtcctagaattaattcccctaaaaatctttgaaatagggcccgtatttaccctatagcaccccctctaccccctctagagcccactgtaaagctaacttagcattaaccttttaagttaaagattaagagaaccaacacctctttacagtgaaatgccccaactaaatactaccgtatggcccaccataattacccccatactccttacactattcctcatcacccaactaaaaatattaaacacaaactaccacctacctccctcaccaaagcccataaaaataaaaaattataacaaaccctgagaaccaaaatgaacgaaaatctgttcgcttcattcattgcccccacaatcctaggcctacccgccgcagtactgatcattctatttccccctctattgatccccacctccaaatatctcatcaacaaccgactaatcaccacccaacaatgactaatcaaaccaacctcaaaacaaatgataaccatacacaacactaaaggacgaacctgatctcttatactagtatccttaatcatttttattgccacaactaacctcctcggactcctgccttactcatttacaccaaccacccaactatctataaacctagccatggccatccccttatgagcgggcgcagtgattataggctttcgctctaagattaaaaatgccctagcccacttcttaccacaaggcacacctacaccccttatccccatactagttattatcgaaaccatcagcctactcattcaaccaatagccctggccgtacgcctaaccgctaacattactgcaggccacctactcatgcacctaattggaagcgccaccctagcaatatcaaccattaaccttccctctacacttatcatcttcacaattctaattctactgactatcctagaaatcgctgtcgccttaatccaagcctacgttttcacacttctagtaagcctctacctgcacgacaacacataatgacccaccaatcacatgcctatcatatagtaaaacccagcccatgacccctaacaggggccctctcagccctcctaatgacctccggcctagccatgtgatttcacttccactccataacgctcctcatactaggcctactaaccaacacactaaccatataccaatgatggcgcgatgtaacacgagaaagcacataccaaggccaccacacaccacctgtccaaaaaggccttcgatacgggataatcctatttattacctcagaagtttttttcttcgcaggatttttctgagccttttaccactccagcctagcccctaccccccaattaggagggcactggcccccaacaggcatcaccccgctaaatcccctagaagtcccactcctaaacacatccgtattactcgcatcaggagtatcaatcacctgagctcaccatagtctaatagaaaacaaccgaaaccaaataattcaagcactgcttattacaattttactgggtctctattttaccctcctacaagcctcagagtacttcgagtctcccttcaccatttccgacggcatctacggctcaacattttttgtagccacaggcttccacggacttcacgtcattattggctcaactttcctcactatctgcttcatccgccaactaatatttcactttacatccaaacatcactttggcttcgaagccgccgcctgatactggcattttgtagatgtggtttgactatttctgtatgtctccatctattgatgagggtcttactcttttagtataaatagtaccgttaacttccaattaactagttttgacaacattcaaaaaagagtaataaacttcgccttaattttaataatcaacaccctcctagccttactactaataattattacattttgactaccacaactcaacggctacatagaaaaatccaccccttacgagtgcggcttcgaccctatatcccccgcccgcgtccctttctccataaaattcttcttagtagctattaccttcttattatttgatctagaaattgccctccttttacccctaccatgagccctacaaacaactaacctgccactaatagttatgtcatccctcttattaatcatcatcctagccctaagtctggcctacgagtgactacaaaaaggattagactgaaccgaattggtatatagtttaaacaaaacgaatgatttcgactcattaaattatgataatcatatttaccaaatgcccctcatttacataaatattatactagcatttaccatctcacttctaggaatactagtatatcgctcacacctcatatcctccctactatgcctagaaggaataatactatcgctgttcattatagctactctcataaccctcaacacccactccctcttagccaatattgtgcctattgccatactagtctttgccgcctgcgaagcagcggtgggcctagccctactagtctcaatctccaacacatatggcctagactacgtacataacctaaacctactccaatgctaaaactaatcgtcccaacaattatattactaccactgacatgactttccaaaaaacacataatttgaatcaacacaaccacccacagcctaattattagcatcatccctctactattttttaaccaaatcaacaacaacctatttagctgttccccaaccttttcctccgaccccctaacaacccccctcctaatactaactacctgactcctacccctcacaatcatggcaagccaacgccacttatccagtgaaccactatcacgaaaaaaactctacctctctatactaatctccctacaaatctccttaattatagcattcacagccacagaactaatcatattttatatcttcttcgaaaccacacttatccccaccttggctatcatcacccgatgaggcaaccagccagaacgcctgaacgcaggcacatacttcctattctacaccctagtaggctcccttcccctactcatcgcactaatttacactcacaacaccctaggctcactaaacattctactactcactctcactgcccaagaactatcaaactcctgagccaacaacttaatatgactagcttacacaatagcttttatagtaaagatacctctttacggactccacttatgactccctaaagcccatgtcgaagcccccatcgctgggtcaatagtacttgccgcagtactcttaaaactaggcggctatggtataatacgcctcacactcattctcaaccccctgacaaaacacatagcctaccccttccttgtactatccctatgaggcataattataacaagctccatctgcctacgacaaacagacctaaaatcgctcattgcatactcttcaatcagccacatagccctcgtagtaacagccattctcatccaaaccccctgaagcttcaccggcgcagtcattctcataatcgcccacggacttacatcctcattactattctgcctagcaaactcaaactacgaacgcactcacagtcgcatcataatcctctctcaaggacttcaaactctactcccactaatagctttttgatgacttctagcaagcctcgctaacctcgccttaccccccactattaacctactgggagaactctctgtgctagtaaccacgttctcctgatcaaatatcactctcctacttacaggactcaacatactagtcacagccctatactccctctacatatttaccacaacacaatgaggctcactcacccaccacattaacaacataaaaccctcattcacacgagaaaacaccctcatgttcatacacctatcccccattctcctcctatccctcaaccccgacatcattaccgggttttcctcttgtaaatatagtttaaccaaaacatcagattgtgaatctgacaacagaggcttacgaccccttatttaccgagaaagctcacaagaactgctaactcatgcccccatgtctaacaacatggctttctcaacttttaaaggataacagctatccattggtcttaggccccaaaaattttggtgcaactccaaataaaagtaataaccatgcacactactataaccaccctaaccctgacttccctaattccccccatccttaccaccctcgttaaccctaacaaaaaaaactcatacccccattatgtaaaatccattgtcgcatccacctttattatcagtctcttccccacaacaatattcatgtgcctagaccaagaagttattatctcgaactgacactgagccacaacccaaacaacccagctctccctaagcttcaaactagactacttctccataatattcatccctgtagcattgttcgttacatggtccatcatagaattctcactgtgatatataaactcagacccaaacattaatcagttcttcaaatatctactcattttcctaattaccatactaatcttagttaccgctaacaacctattccaactgttcatcggctgagagggcgtaggaattatatccttcttgctcatcagttgatgatacgcccgagcagatgccaacacagcagccattcaagcaatcctatacaaccgtatcggcgatatcggtttcatcctcgccttagcatgatttatcctacactccaactcatgagacccacaacaaatagcccttctaaacgctaatccaagcctcaccccactactaggcctcctcctagcagcagcaggcaaatcagcccaattaggtctccacccctgactcccctcagccatagaaggccccaccccagtctcagccctactccactcaagcactatagttgtagcaggaatcttcttactcatccgcttccaccccctagcagaaaatagcccactaatccaaactctaacactatgcttaggcgctatcaccactctgttcgcagcagtctgcgcccttacacaaaatgacatcaaaaaaatcgtagccttctccacttcaagtcaactaggactcataatagttacaatcggcatcaaccaaccacacctagcattcctgcacatctgtacccacgccttcttcaaagccatactatttatgtgctccgggtccatcatccacaaccttaacaatgaacaagatattcgaaaaataggaggactactcaaaaccatacctctcacttcaacctccctcaccattggcagcctagcattagcaggaatacctttcctcacaggtttctactccaaagaccacatcatcgaaaccgcaaacatatcatacacaaacgcctgagccctatctattactctcatcgctacctccctgacaagcgcctatagcactcgaataattcttctcaccctaacaggtcaacctcgcttccccacccttactaacattaacgaaaataaccccaccctactaaaccccattaaacgcctggcagccggaagcctattcgcaggatttctcattactaacaacatttcccccgcatcccccttccaaacaacaatccccctctacctaaaactcacagccctcgctgtcactttcctaggacttctaacagccctagacctcaactacctaaccaacaaacttaaaataaaatccccactatgcacattttatttctccaacatactcggattctaccctagcatcacacaccgcacaatcccctatctaggccttcttacgagccaaaacctgcccctactcctcctagacctaacctgactagaaaagctattacctaaaacaatttcacagcaccaaatctccacctccatcatcacctcaacccaaaaaggcataattaaactttacttcctctctttcttcttcccactcatcctaaccctactcctaatcacataacctattcccccgagcaatctcaattacaatatatacaccaacaaacaatgttcaaccagtaactactactaatcaacgcccataatcatacaaagcccccgcaccaataggatcctcccgaatcaaccctgacccctctccttcataaattattcagcttcctacactattaaagtttaccacaaccaccaccccatcatactctttcacccacagcaccaatcctacctccatcgctaaccccactaaaacactcaccaagacctcaacccctgacccccatgcctcaggatactcctcaatagccatcgctgtagtatatccaaagacaaccatcattccccctaaataaattaaaaaaactattaaacccatataacctcccccaaaattcagaataataacacacccgaccacaccgctaacaatcaatactaaacccccataaataggagaaggcttagaagaaaaccccacaaaccccattactaaacccacactcaacagaaacaaagcatacatcattattctcgcacggactacaaccacgaccaatgatatgaaaaaccatcgttgtatttcaactacaagaacaccaatgaccccaatacgcaaaattaaccccctaataaaattaattaaccactcattcatcgacctccccaccccatccaacatctccgcatgatgaaacttcggctcactccttggcgcctgcctgatcctccaaatcaccacaggactattcctagccatgcactactcaccagacgcctcaaccgccttttcatcaatcgcccacatcactcgagacgtaaattatggctgaatcatccgctaccttcacgccaatggcgcctcaatattctttatctgcctcttcctacacatcgggcgaggcctatattacggatcatttctctactcagaaacctgaaacatcggcattatcctcctgcttgcaactatagcaacagccttcataggctatgtcctcccgtgaggccaaatatcattctgaggggccacagtaattacaaacttactatccgccatcccatacattgggacagacctagttcaatgaatctgaggaggctactcagtagacagtcccaccctcacacgattctttacctttcacttcatcttgcccttcattattgcagccctagcagcactccacctcctattcttgcacgaaacgggatcaaacaaccccctaggaatcacctcccattccgataaaatcaccttccacccttactacacaatcaaagacgccctcggcttacttctcttccttctctccttaatgacattaacactattctcaccagacctcctaggcgacccagacaattataccctagccaaccccttaaacacccctccccacatcaagcccgaatgatatttcctattcgcctacacaattctccgatccgtccctaacaaactaggaggcgtccttgccctattactatccatcctcatcctagcaataatccccatcctccatatatccaaacaacaaagcataatatttcgcccactaagccaatcactttattgactcctagccgcagacctcctcattctaacctgaatcggaggacaaccagtaagctacccttttaccatcattggacaagtagcatccgtactatacttcacaacaatcctaatcctaataccaactatctccctaattgaaaacaaagtactcaaatgggcctgtccttgtagtataaactaatacaccagtcttgtaaaccggagatgaaaacctttttccaaggacaaatcagagaaaaagtctttaactccaccattagcacccaaagctaagattctaatttaaactattctctgttctttcatggggaagcagatttgggtaccacccaagtattgactcacccatcaacaaccgctatgtatttcgtacattactgccagtcaccatgaatattgtacggtaccataaatacttgaccacctgtagtacataaaaacccaatccacatcaaaaccccctccccatgcttacaagcaagtacagcaatcaaccttcaactatcacacatcaactgcaactccaaagccacccctcacccactaggataccaacaaacctacccacccttaacagtacatagtacataaaaccatttaccgtacatagcacattacagtcaaatcccttctcgcccccatggatgacccccctcagataggggtcccttgaccaccatcctccgtgaaatcaatatcccgcacaagagtgctactctcctcgctccgggcccataacacttgggggtagctaaagtgaactgtatccgacatctggttcctacttcagggtcataaagcctaaatagcccacacgttccccttaaataagacatcacgatg

SEQ ID NO: 534 - DNA, 16571 bp, Homo sapiens mitochondrial
  3109: "n" refers to a nucleotide at position 3107 of the Cambridge Reference Sequence (CRS, Anderson et al. 1981 Nature 290:457-465), later determined to be absent from the human mtDNA sequence according to the revised CRS (rCRS, Andrews et al. 1999 Nature Genetics 23:147); "n" therefore represents a single nucleotide deletion at a position corresponding to nucleotide 3107 of SEQ ID NO:1 as provided herein.
gatcacaggtctatcaccctattaaccactcacgggagctctccatgcatttggtattttcgtctggggggtatgcacgcgatagcattgcgagacgctggagccggagcaccctatgtcgcagtatctgtctttgattcctgcctcatcctattatttatcgcacctacgttcaatattacaggcgaacatacttactaaagtgtgttaattaattaatgcttgtaggacataataataacaattgaatgtctgcacagccgctttccacacagacatcataacaaaaaatttccaccaaaccccccctcccccccgcttctggccacagcacttaaacacatctctgccaaaccccaaaaacaaagaaccctaacaccagcctaaccagatttcaaattttatcttttggcggtatgcacttttaacagtcaccccccaactaacacattattttcccctcccactcccatactactaatctcatcaatacaacccccgcccatcctacccagcacacacacaccgctgctaaccccataccccgaaccaaccaaaccccaaagacaccccccacagtttatgtagcttacctcctcaaagcaatacactgaaaatgtttagacgggctcacatcaccccataaacaaataggtttggtcctagcctttctattagctcttagtaagattacacatgcaagcatccccgttccagtgagttcaccctctaaatcaccacgatcaaaagggacaagcatcaagcacgcagcaatgcagctcaaaacgcttagcctagccacacccccacgggaaacagcagtgattaacctttagcaataaacgaaagtttaactaagctatactaaccccagggttggtcaatttcgtgccagccaccgcggtcacacgattaacccaagtcaatagaagccggcgtaaagagtgttttagatcaccccctccccaataaagctaaaactcacctgagttgtaaaaaactccagttgacacaaaatagactacgaaagtggctttaacatatctgaacacacaatagctaagacccaaactgggattagataccccactatgcttagccctaaacctcaacagttaaatcaacaaaactgctcgccagaacactacgagccacagcttaaaactcaaaggacctggcggtgcttcatatccctctagaggagcctgttctgtaatcgataaaccccgatcaacctcaccacctcttgctcagcctatataccgccatcttcagcaaaccctgatgaaggctacaaagtaagcgcaagtacccacgtaaagacgttaggtcaaggtgtagcccatgaggtggcaagaaatgggctacattttctaccccagaaaactacgatagcccttatgaaacttaagggtcgaaggtggatttagcagtaaactgagagtagagtgcttagttgaacagggccctgaagcgcgtacacaccgcccgtcaccctcctcaagtatacttcaaaggacatttaactaaaacccctacgcatttatatagaggagacaagtcgtaacatggtaagtgtactggaaagtgcacttggacgaaccagagtgtagcttaacacaaagcacccaacttacacttaggagatttcaacttaacttgaccgctctgagctaaacctagccccaaacccactccaccttactaccagacaaccttagccaaaccatttacccaaataaagtataggcgatagaaattgaaacctggcgcaatagatatagtaccgcaagggaaagatgaaaaattataaccaagcataatatagcaaggactaacccctataccttctgcataatgaattaactagaaataactttgcaaggagagccaaagctaagacccccgaaaccagacgagctacctaagaacagctaaaagagcacacccgtctatgtagcaaaatagtgggaagatttataggtagaggcgacaaacctaccgagcctggtgatagctggttgtccaagatagaatcttagttcaactttaaatttgcccacagaaccctctaaatccccttgtaaatttaactgttagtccaaagaggaacagctctttggacactaggaaaaaaccttgtagagagagtaaaaaatttaacacccatagtaggcctaaaagcagccaccaattaagaaagcgttcaagctcaacacccactacctaaaaaatcccaaacatataactgaactcctcacacccaattggaccaatctatcaccctatagaagaactaatgttagtataagtaacatgaaaacattctcctccgcataagcctgcgtcagattaaaacactgaactgacaattaacagcccaatatctacaatcaaccaacaagtcattattaccctcactgtcaacccaacacaggcatgctcataaggaaaggttaaaaaaagtaaaaggaactcggcaaatcttaccccgcctgtttaccaaaaacatcacctctagcatcaccagtattagaggcaccgcctgcccagtgacacatgtttaacggccgcggtaccctaaccgtgcaaaggtagcataatcacttgttccttaaatagggacctgtatgaatggctccacgagggttcagctgtctcttacttttaaccagtgaaattgacctgcccgtgaagaggcgggcataacacagcaagacgagaagaccctatggagctttaatttattaatgcaaacagtacctaacaaacccacaggtcctaaactaccaaacctgcattaaaaatttcggttggggcgacctcggagcagaacccaacctccgagcagtacatgctaagacttcaccagtcaaagcgaactactatactcaattgatccaataacttgaccaacggaacaagttaccctagggataacagcgcaatcctattctagagtccatatcaacaatagggtttacgacctcgatgttggatcaggacatcccaatggtgcagccgctattaaaggttcgtttgttcaacgattaaagtcctacgtgatctgagttcagaccggagtaatccaggtcggtttctatctacnttcaaattcctccctgtacgaaaggacaagagaaataaggcctacttcacaaagcgccttcccccgtaaatgatatcatctcaacttagtattatacccacacccacccaagaacagggtttgttaagatggcagagcccggtaatcgcataaaacttaaaactttacagtcagaggttcaattcctcttcttaacaacatacccatggccaacctcctactcctcattgtacccattctaatcgcaatggcattcctaatgcttaccgaacgaaaaattctaggctatatacaactacgcaaaggccccaacgttgtaggcccctacgggctactacaacccttcgctgacgccataaaactcttcaccaaagagcccctaaaacccgccacatctaccatcaccctctacatcaccgccccgaccttagctctcaccatcgctcttctactatgaacccccctccccatacccaaccccctggtcaacctcaacctaggcctcctatttattctagccacctctagcctagccgtttactcaatcctctgatcagggtgagcatcaaactcaaactacgccctgatcggcgcactgcgagcagtagcccaaacaatctcatatgaagtcaccctagccatcattctactatcaacattactaataagtggctcctttaacctctccacccttatcacaacacaagaacacctctgattactcctgccatcatgacccttggccataatatgatttatctccacactagcagagaccaaccgaacccccttcgaccttgccgaaggggagtccgaactagtctcaggcttcaacatcgaatacgccgcaggccccttcgccctattcttcatagccgaatacacaaacattattataataaacaccctcaccactacaatcttcctaggaacaacatatgacgcactctcccctgaactctacacaacatattttgtcaccaagaccctacttctaacctccctgttcttatgaattcgaacagcatacccccgattccgctacgaccaactcatacacctcctatgaaaaaacttcctaccactcaccctagcattacttatatgatatgtctccatacccattacaatctccagcattccccctcaaacctaagaaatatgtctgataaaagagttactttgatagagtaaataataggagcttaaacccccttatttctaggactatgagaatcgaacccatccctgagaatccaaaattctccgtgccacctatcacaccccatcctaaagtaaggtcagctaaataagctatcgggcccataccccgaaaatgttggttatacccttcccgtactaattaatcccctggcccaacccgtcatctactctaccatctttgcaggcacactcatcacagcgctaagctcgcactgattttttacctgagtaggcctagaaataaacatgctagcttttattccagttctaaccaaaaaaataaaccctcgttccacagaagctgccatcaagtatttcctcacgcaagcaaccgcatccataatccttctaatagctatcctcttcaacaatatactctccggacaatgaaccataaccaatactaccaatcaatactcatcattaataatcataatggctatagcaataaaactaggaatagccccctttcacttctgagtcccagaggttacccaaggcacccctctgacatccggcctgcttcttctcacatgacaaaaactagcccccatctcaatcatataccaaatctctccctcactaaacgtaagccttctcctcactctctcaatcttatccatcatagcaggcagttgaggtggattaaaccaaacccagctacgcaaaatcttagcatactcctcaattacccacataggatgaataatagcagttctaccgtacaaccctaacataaccattcttaatttaactatttatattatcctaactactaccgcattcctactactcaacttaaactccagcaccacgaccctactactatctcgcacctgaaacaagctaacatgactaacacccttaattccatccaccctcctctccctaggaggcctgcccccgctaaccggctttttgcccaaatgggccattatcgaagaattcacaaaaaacaatagcctcatcatccccaccatcatagccaccatcaccctccttaacctctacttctacctacgcctaatctactccacctcaatcacactactccccatatctaacaacgtaaaaataaaatgacagtttgaacatacaaaacccaccccattcctccccacactcatcgcccttaccacgctactcctacctatctccccttttatactaataatcttatagaaatttaggttaaatacagaccaagagccttcaaagccctcagtaagttacaatacttaatttctgtaacagctaaggactgcaaaaccccactctgcatcaactgaacgcaaatcagccactttaattaagctaagcccttactagaccaatgggacttaaacccacaaacacttagttaacagctaagcaccctaatcaactggcttcaatctacttctcccgccgccgggaaaaaaggcgggagaagccccggcaggtttgaagctgcttcttcgaatttgcaattcaatatgaaaatcacctcggagctggtaaaaagaggcctaacccctgtctttagatttacagtccaatgcttcactcagccattttacctcacccccactgatgttcgccgaccgttgactattctctacaaaccacaaagacattggaacactatacctattattcggcgcatgagctggagtcctaggcacagctctaagcctccttattcgagccgagctgggccagccaggcaaccttctaggtaacgaccacatctacaacgttatcgtcacagcccatgcatttgtaataatcttcttcatagtaatacccatcataatcggaggctttggcaactgactagttcccctaataatcggtgcccccgatatggcgtttccccgcataaacaacataagcttctgactcttacctccctctctcctactcctgctcgcatctgctatagtggaggccggagcaggaacaggttgaacagtctaccctcccttagcagggaactactcccaccctggagcctccgtagacctaaccatcttctccttacacctagcaggtgtctcctctatcttaggggccatcaatttcatcacaacaattatcaatataaaaccccctgccataacccaataccaaacgcccctcttcgtctgatccgtcctaatcacagcagtcctacttctcctatctctcccagtcctagctgctggcatcactatactactaacagaccgcaacctcaacaccaccttcttcgaccccgccggaggaggagaccccattctataccaacacctattctgatttttcggtcaccctgaagtttatattcttatcctaccaggcttcggaataatctcccatattgtaacttactactccggaaaaaaagaaccatttggatacataggtatggtctgagctatgatatcaattggcttcctagggtttatcgtgtgagcacaccatatatttacagtaggaatagacgtagacacacgagcatatttcacctccgctaccataatcatcgctatccccaccggcgtcaaagtatttagctgactcgccacactccacggaagcaatatgaaatgatctgctgcagtgctctgagccctaggattcatctttcttttcaccgtaggtggcctgactggcattgtattagcaaactcatcactagacatcgtactacacgacacgtactacgttgtagcccacttccactatgtcctatcaataggagctgtatttgccatcataggaggcttcattcactgatttcccctattctcaggctacaccctagaccaaacctacgccaaaatccatttcactatcatattcatcggcgtaaatctaactttcttcccacaacactttctcggcctatccggaatgccccgacgttactcggactaccccgatgcatacaccacatgaaacatcctatcatctgtaggctcattcatttctctaacagcagtaatattaataattttcatgatttgagaagccttcgcttcgaagcgaaaagtcctaatagtagaagaaccctccataaacctggagtgactatatggatgccccccaccctaccacacattcgaagaacccgtatacataaaatctagacaaaaaaggaaggaatcgaaccccccaaagctggtttcaagccaaccccatggcctccatgactttttcaaaaaggtattagaaaaaccatttcataactttgtcaaagttaaattataggctaaatcctatatatcttaatggcacatgcagcgcaagtaggtctacaagacgctacttcccctatcatagaagagcttatcacctttcatgatcacgccctcataatcattttccttatctgcttcctagtcctgtatgcccttttcctaacactcacaacaaaactaactaatactaacatctcagacgctcaggaaatagaaaccgtctgaactatcctgcccgccatcatcctagtcctcatcgccctcccatccctacgcatcctttacataacagacgaggtcaacgatccctcccttaccatcaaatcaattggccaccaatggtactgaacctacgagtacaccgactacggcggactaatcttcaactcctacatacttcccccattattcctagaaccaggcgacctgcgactccttgacgttgacaatcgagtagtactcccgattgaagcccccattcgtataataattacatcacaagacgtcttgcactcatgagctgtccccacattaggcttaaaaacagatgcaattcccggacgtctaaaccaaaccactttcaccgctacacgaccgggggtatactacggtcaatgctctgaaatctgtggagcaaaccacagtttcatgcccatcgtcctagaattaattcccctaaaaatctttgaaatagggcccgtatttaccctatagcaccccctctaccccctctagagcccactgtaaagctaacttagcattaaccttttaagttaaagattaagagaaccaacacctctttacagtgaaatgccccaactaaatactaccgtatggcccaccataattacccccatactccttacactattcctcatcacccaactaaaaatattaaacacaaactaccacctacctccctcaccaaagcccataaaaataaaaaattataacaaaccctgagaaccaaaatgaacgaaaatctgttcgcttcattcattgcccccacaatcctaagtctacccgccgcagtactgatcattctatttccccctctattgatccccacctccaaatatctcatcaacaaccgactaatcaccacccaacaatgactaatcaaactaacctcaaaacaaatgataaccatacacaacactaaaggacgaacctgatctcttatactagtatccttaatcatttttattgccacaactaacctcctcggactcctgcctcactcatttacaccaaccacccaactatctataaacctagccatggccatccccttatgagcgggcgcagtgattataggctttcgctctaagattaaaaatgccctagcccacttcttaccacaaggcacacctacaccccttatccccatactagttattatcgaaaccatcagcctactcattcaaccaatagccctggccgtacgcctaaccgctaacattactgcaggccacctactcatgcacctaattggaagcgccaccctagcaatatcaaccattaaccttccctctacacttatcatcttcacaattctaattctactgactatcctagaaatcgctgtcgccttaatccaagcctacgttttcacacttctagtaagcctctacctgcacgacaacacataatgacccaccaatcacatgcctatcatatagtaaaacccagcccatgacccctaacaggggccctctcagccctcctaatgacctccggcctagccatgtgatttcacttccactccataacgctcctcatactaggcctactaaccaacacactaaccatataccaatgatggcgcgatgtaacacgagaaagcacataccaaggccaccacacaccacctgtccaaaaaggccttcgatacgggataatcctatttattacctcagaagtttttttcttcgcaggatttttctgagccttttaccactccagcctagcccctaccccccaattaggagggcactggcccccaacaggcatcaccccgctaaatcccctagaagtcccactcctaaacacatccgtattactcgcatcaggagtatcaatcacctgagctcaccatagtctaatagaaaacaaccgaaaccaaataattcaagcactgcttattacaattttactgggtctctattttaccctcctacaagcctcagagtacttcgagtctcccttcaccatttccgacggcatctacggctcaacattttttgtagccacaggcttccacggacttcacgtcattattggctcaactttcctcactatctgcttcatccgccaactaatatttcactttacatccaaacatcactttggcttcgaagccgccgcctgatactggcattttgtagatgtggtttgactatttctgtatgtctccatctattgatgagggtcttactcttttagtataaatagtaccgttaacttccaattaactagttttgacaacattcaaaaaagagtaataaacttcgccttaattttaataatcaacaccctcctagccttactactaataattattacattttgactaccacaactcaacggctacatagaaaaatccaccccttacgagtgcggcttcgaccctatatcccccgcccgcgtccctttctccataaaattcttcttagtagctattaccttcttattatttgatctagaaattgccctccttttacccctaccatgagccctacaaacaactaacctgccactaatagttatgtcatccctcttattaatcatcatcctagccctaagtctggcctatgagtgactacaaaaaggattagactgaaccgaattggtatatagtttaaacaaaacgaatgatttcgactcattaaattatgataatcatatttaccaaatgcccctcatttacataaatattatactagcatttaccatctcacttctaggaatactagtatatcgctcacacctcatatcctccctactatgcctagaaggaataatactatcgctgttcattatagctactctcataaccctcaacacccactccctcttagccaatattgtgcctattgccatactagtctttgccgcctgcgaagcagcggtgggcctagccctactagtctcaatctccaacacatatggcctagactacgtacataacctaaacctactccaatgctaaaactaatcgtcccaacaattatattactaccactgacatgactttccaaaaaacacataatttgaatcaacacaaccacccacagcctaattattagcatcatccctctactattttttaaccaaatcaacaacaacctatttagctgttccccaaccttttcctccgaccccctaacaacccccctcctaatactaactacctgactcctacccctcacaatcatggcaagccaacgccacttatccagtgaaccactatcacgaaaaaaactctacctctctatactaatctccctacaaatctccttaattataacattcacagccacagaactaatcatattttatatcttcttcgaaaccacacttatccccaccttggctatcatcacccgatgaggcaaccagccagaacgcctgaacgcaggcacatacttcctattctacaccctagtaggctcccttcccctactcatcgcactaatttacactcacaacaccctaggctcactaaacattctactactcactctcactgcccaagaactatcaaactcctgagccaacaacttaatatgactagcttacacaatagcttttatagtaaagatacctctttacggactccacttatgactccctaaagcccatgtcgaagcccccatcgctgggtcaatagtacttgccgcagtactcttaaaactaggcggctatggtataatacgcctcacactcattctcaaccccctgacaaaacacatagcctaccccttccttgtactatccctatgaggcataattataacaagctccatctgcctacgacaaacagacctaaaatcgctcattgcatactcttcaatcagccacatagccctcgtagtaacagccattctcatccaaaccccctgaagcttcaccggcgcagtcattctcataatcgcccacgggcttacatcctcattactattctgcctagcaaactcaaactacgaacgcactcacagtcgcatcataatcctctctcaaggacttcaaactctactcccactaatagctttttgatgacttctagcaagcctcgctaacctcgccttaccccccactattaacctactgggagaactctctgtgctagtaaccacgttctcctgatcaaatatcactctcctacttacaggactcaacatactagtcacagccctatactccctctacatatttaccacaacacaatggggctcactcacccaccacattaacaacataaaaccctcattcacacgagaaaacaccctcatgttcatacacctatcccccattctcctcctatccctcaaccccgacatcattaccgggttttcctcttgtaaatatagtttaaccaaaacatcagattgtgagtctgacaacagaggcttacgaccccttatttaccgagaaagctcacaagaactgctaactcatgcccccatgtctaacaacatggctttctcaacttttaaaggataacagctatccattggtcttaggccccaaaaattttggtgcaactccaaataaaagtaataaccatgcacactactataaccaccctaaccctgacttccctaattccccccatccttaccaccctcgttaaccctaacaaaaaaaactcatacccccattatgtaaaatccattgtcgcatccacctttattatcagtctcttccccacaacaatattcatgtgcctagaccaagaagttattatctcgaactgacactgagccacaacccaaacaacccagctctccctaagcttcaaactagactacttctccataatattcatccctgtagcattgttcgttacatggtccatcatagaattctcactgtgatatataaactcagacccaaacattaatcagttcttcaaatatctactcatcttcctaattaccatactaatcttagttaccgctaacaacctattccaactgttcatcggctgagagggcgtaggaattatatccttcttgctcatcagttgatgatacgcccgagcagatgccaacacagcagccattcaagcaatcctatacaaccgtatcggcgatatcggtttcatcctcgccttagcatgatttatcctacactccaactcatgagacccacaacaaatagcccttctaaacgctaatccaagcctcaccccactactaggcctcctcctagcagcagcaggcaaatcagcccaattaggtctccacccctgactcccctcagccatagaaggccccaccccagtctcagccctactccactcaagcactatagttgtagcaggaatcttcttactcatccgcttccaccccctagcagaaaatagcccactaatccaaactctaacactatgcttaggcgctatcaccactctgttcgcagcagtctgcgcccttacacaaaatgacatcaaaaaaatcgtagccttctccacttcaagtcaactaggactcataatagttacaatcggcatcaaccaaccacacctagcattcctgcacatctgtacccacgccttcttcaaagccatactatttatgtgctccgggtccatcatccacaaccttaacaatgaacaagatattcgaaaaataggaggactactcaaaaccatacctctcacttcaacctccctcaccattggcagcctagcattagcaggaatacctttcctcacaggtttctactccaaagaccacatcatcgaaaccgcaaacatatcatacacaaacgcctgagccctatctattactctcatcgctacctccctgacaagcgcctatagcactcgaataattcttctcaccctaacaggtcaacctcgcttccccacccttactaacattaacgaaaataaccccaccctactaaaccccattaaacgcctggcagccggaagcctattcgcaggatttctcattactaacaacatttcccccgcatcccccttccaaacaacaatccccctctacctaaaactcacagccctcgctgtcactttcctaggacttctaacagccctagacctcaactacctaaccaacaaacttaaaataaaatccccactatgcacattttatttctccaacatactcggattctaccctagcatcacacaccgcacaatcccctatctaggccttcttacgagccaaaacctgcccctactcctcctagacctaacctgactagaaaagctattacctaaaacaatttcacagcaccaaatctccacctccatcatcacctcaacccaaaaaggcataattaaactttacttcctctctttcttcttcccactcatcctaaccctactcctaatcacataacctattcccccgagcaatctcaattacaatatatacaccaacaaacaatgttcaaccagtaactactactaatcaacgcccataatcatacaaagcccccgcaccaataggatcctcccgaatcaaccctgacccctctccttcataaattattcagcttcctacactattaaagtttaccacaaccaccaccccatcatactctttcacccacagcaccaatcctacctccatcgctaaccccactaaaacactcaccaagacctcaacccctgacccccatgcctcaggatactcctcaatagccatcgctgtagtatatccaaagacaaccatcattccccctaaataaattaaaaaaactattaaacccatataacctcccccaaaattcagaataataacacacccgaccacaccgctaacaatcaatactaaacccccataaataggagaaggcttagaagaaaaccccacaaaccccattactaaacccacactcaacagaaacaaagcatacatcattattctcgcacggactacaaccacgaccaatgatatgaaaaaccatcgttgtatttcaactacaagaacaccaatgaccccaatacgcaaaactaaccccctaataaaattaattaaccactcattcatcgacctccccaccccatccaacatctccgcatgatgaaacttcggctcactccttggcgcctgcctgatcctccaaatcaccacaggactattcctagccatgcactactcaccagacgcctcaaccgccttttcatcaatcgcccacatcactcgagacgtaaattatggctgaatcatccgctaccttcacgccaatggcgcctcaatattctttatctgcctcttcctacacatcgggcgaggcctatattacggatcatttctctactcagaaacctgaaacatcggcattatcctcctgcttgcaactatagcaacagccttcataggctatgtcctcccgtgaggccaaatatcattctgaggggccacagtaattacaaacttactatccgccatcccatacattgggacagacctagttcaatgaatctgaggaggctactcagtagacagtcccaccctcacacgattctttacctttcacttcatcttgcccttcattattgcagccctagcagcactccacctcctattcttgcacgaaacgggatcaaacaaccccctaggaatcacctcccattccgataaaatcaccttccacccttactacacaatcaaagacgccctcggcttacttctcttccttctctccttaatgacattaacactattctcaccagacctcctaggcgacccagacaattataccctagccaaccccttaaacacccctccccacatcaagcccgaatgatatttcctattcgcctacacaattctccgatccgtccctaacaaactaggaggcgtccttgccctattactatccatcctcatcctagcaataatccccatcctccatatatccaaacaacaaagcataatatttcgcccactaagccaatcactttattgactcctagccgcagacctcctcattctaacctgaatcggaggacaaccagtaagctacccttttaccatcattggacaagtagcatccgtactatacttcacaacaatcctaatcctaataccaactatctccctaattgaaaacaaaatactcaaatgggcctgtccttgtagtataaactaatacaccagtcttgtaaaccggagatgaaaacctttttccaaggacaaatcagagaaaaagtctttaactccaccattagcacccaaagctaagattctaatttaaactattctctgttctttcatggggaagcagatttgggtaccacccaagtattgactcacccatcaacaaccgctatgtatttcgtacattactgccagccaccatgaatattgtacggtaccataaatacttgaccacctgtagtacataaaaacccaatccacatcaaaaccccctccccatgcttacaagcaagtacagcaatcaaccctcaactatcacacatcaactgcaactccaaagccacccctcacccactaggataccaacaaacctacccacccttaacagtacatagtacataaagccatttaccgtacatagcacattacagtcaaatcccttctcgtccccatggatgacccccctcagataggggtcccttgaccaccatcctccgtgaaatcaatatcccgcacaagagtgctactctcctcgctccgggcccataacacttgggggtagctaaagtgaactgtatccgacatctggttcctacttcagggccataaagcctaaatagcccacacgttccccttaaataagacatcacgatg

SEQ ID NO: 535 - DNA, 16572 bp, Homo sapiens mitochondrial
  3110: "n" refers to a nucleotide at position 3107 of the Cambridge Reference Sequence (CRS, Anderson et al. 1981 Nature 290:457-465), later determined to be absent from the human mtDNA sequence according to the revised CRS (rCRS, Andrews et al. 1999 Nature Genetics 23:147); "n" therefore represents a single nucleotide deletion at a position corresponding to nucleotide 3107 of SEQ ID NO:1 as provided herein.
gatcacaggtctatcaccctattaaccactcacgggagctctccatgcatttggtattttcgtctggggggtatgcacgcgatagcattgcgagacgctggagccggagcaccctatgtcgcagtatctgtctttgattcctgcctcatcctattatttatcgcacctacgttcaatattacaggcgaacatacttactaaagtgtgttaattaattaatgcttgtaggacataataataacaattgaatgtctgcacagccgctttccacacagacatcataacaaaaaatttccaccaaaccccccctccccccccgcttctggccacagcacttaaacacatctctgccaaaccccaaaaacaaagaaccctaacaccagcctaaccagatttcaaattttatcttttggcggtatgcacttttaacagtcaccccccaactaacacattattttcccctcccactcccatactactaatctcatcaatacaacccccgcccatcctacccagcacacacacaccgctgctaaccccataccccgaaccaaccaaaccccaaagacaccccccacagtttatgtagcttacctcctcaaagcaatacactgaaaatgtttagacgggctcacatcaccccataaacaaataggtttggtcctagcctttctattagctcttagtaagattacacatgcaagcatccccgttccagtgagttcaccctctaaatcaccacgatcaaaagggacaagcatcaagcacgcagcaatgcagctcaaaacgcttagcctagccacacccccacgggaaacagcagtgattaacctttagcaataaacgaaagtttaactaagctatactaaccccagggttggtcaatttcgtgccagccaccgcggtcacacgattaacccaagtcaatagaagccggcgtaaagagtgttttagatcaccccctccccaataaagctaaaactcacctgagttgtaaaaaactccagttgacacaaaatagactacgaaagtggctttaacatatctgaacacacaatagctaagacccaaactgggattagataccccactatgcttagccctaaacctcaacagttaaatcaacaaaactgctcgccagaacactacgagccacagcttaaaactcaaaggacctggcggtgcttcatatccctctagaggagcctgttctgtaatcgataaaccccgatcaacctcaccacctcttgctcagcctatataccgccatcttcagcaaaccctgatgaaggctacaaagtaagcgcaagtacccacgtaaagacgttaggtcaaggtgtagcccatgaggtggcaagaaatgggctacattttctaccccagaaaactacgatagcccttatgaaacttaagggtcgaaggtggatttagcagtaaactgagagtagagtgcttagttgaacagggccctgaagcgcgtacacaccgcccgtcaccctcctcaagtatacttcaaaggacatttaactaaaacccctacgcatttatatagaggagacaagtcgtaacatggtaagtgtactggaaagtgcacttggacgaaccagagtgtagcttaacgcaaagcacccaacttacacttaggagatttcaacttaacttgaccgctctgagctaaacctagccccaaacccactccaccttactaccagacaaccttagccaaaccatttacccaaataaagtataggcgatagaaattgaaacctggcgcaatagatatagtaccgcaagggaaagatgaaaaattataaccaagcataatatagcaaggactaacccctataccttctgcataatgaattaactagaaataactttgcaaggagagccaaagctaagacccccgaaaccagacgagctacctaagaacagctaaaagagcacacccgtctatgtagcaaaatagtgggaagatttataggtagaggcgacaaacctaccgagcctggtgatagctggttgtccaagatagaatcttagttcaactttaaatttgcccacagaaccctctaaatccccttgtaaatttaactgttagtccaaagaggaacagctctttggacactaggaaaaaaccttgtagagagagtaaaaaatttaacacccatagtaggcctaaaagcagccaccaattaagaaagcgttcaagctcaacacccactacctaaaaaatcccaaacatataactgaactcctcacacccaattggaccaatctatcaccctatagaagaactaatgttagtataagtaacatgaaaacattctcctccgcataagcctgcgtcagattaaaacactgaactgacaattaacagcccaatatctacaatcaaccaacaagtcattattaccctcactgtcaacccaacacaggcatgctcataaggaaaggttaaaaaaagtaaaaggaactcggcaaatcttaccccgcctgtttaccaaaaacatcacctctagcatcaccagtattagaggcaccgcctgcccagtgacacatgtttaacggccgcggtaccctaaccgtgcaaaggtagcataatcacttgttccttaaatagggacctgtatgaatggctccacgagggttcagctgtctcttacttttaaccagtgaaattgacctgcccgtgaagaggcgggcataacacagcaagacgagaagaccctatggagctttaatttattaatgcaaacagtacctaacaaacccacaggtcctaaactaccaaacctgcattaaaaatttcggttggggcgacctcggagcagaacccaacctccgagcagtacatgctaagacttcaccagtcaaagcgaactactatactcaattgatccaataacttgaccaacggaacaagttaccctagggataacagcgcaatcctattctagagtccatatcaacaatagggtttacgacctcgatgttggatcaggacatcccgatggtgcagccgctattaaaggttcgtttgttcaacgattaaagtcctacgtgatctgagttcagaccggagtaatccaggtcggtttctatctacnttcaaattcctccctgtacgaaaggacaagagaaataaggcctacttcacaaagcgccttcccccgtaaatgatatcatctcaacttagtattatacccacacccacccaagaacagggtttgttaagatggcagagcccggtaatcgcataaaacttaaaactttacagtcagaggttcaattcctcttcttaacaacatacccatggccaacctcctactcctcattgtacccattctaatcgcaatggcattcctaatgcttaccgaacgaaaaattctaggctatatacaactacgcaaaggccccaacgttgtaggcccctacgggctactacaacccttcgctgacgccataaaactcttcaccaaagagcccctaaaacccgccacatctaccatcaccctctacatcaccgccccgaccttagctctcaccatcgctcttctactatgaacccccctccccatacccaaccccctggtcaacctcaacctaggcctcctatttattctagccacctctagcctagccgtttactcaatcctctgatcagggtgagcatcaaactcaaactacgccctgatcggcgcactgcgagcagtagcccaaacaatctcatatgaagtcaccctagccatcattctactatcaacattactaataagtggctcctttaacctctccacccttatcacaacacaagaacacctctgattactcctgccatcatgacccttggccataatatgatttatctccacactagcagagaccaaccgaacccccttcgaccttgccgaaggggagtccgaactagtctcaggcttcaacatcgaatacgccgcaggccccttcgccctattcttcatagccgaatacacaaacattattataataaacaccctcaccactacaatcttcctaggaacaacatatgacgcactctcccctgaactctacacaacatattttgtcaccaagaccctacttctaacctccctgttcttatgaattcgaacagcatacccccgattccgctacgaccaactcatacacctcctatgaaaaaacttcctaccactcaccctagcattacttatatgatatgtctccatacccattacaatctccagcattccccctcaaacctaagaaatatgtctgataaaagagttactttgatagagtaaataataggagcttaaacccccttatttctaggactatgagaatcgaacccatccctgagaatccaaaattctccgtgccacctatcacaccccatcctaaagtaaggtcagctaaataagctatcgggcccataccccgaaaatgttggttatacccttcccgtactaattaatcccctggcccaacccgtcatctactctaccatctttgcaggcacactcatcacagcgctaagctcgcactgattttttacctgagtaggcctagaaataaacatgctagcttttattccagttctaaccaaaaaaataaaccctcgttccacagaagctgccatcaagtatttcctcacgcaagcaaccgcatccataatccttctaatagctatcctcttcaacaatatactctccggacaatgaaccataaccaatactaccaatcaatactcatcattaataatcataatggctatagcaataaaactaggaatagccccctttcacttctgagtcccagaggttacccaaggcacccctctgacatccggcctgcttcttctcacatgacaaaaactagcccccatctcaatcatataccaaatctctccctcactaaacgtaagccttctcctcactctctcaatcttatccatcatagcaggcagttgaggtggattaaaccaaacccagctacgcaaaatcttagcatactcctcaattacccacataggatgaataatagcagttctaccgtacaaccctaacataaccattcttaatttaactatttatattatcctaactactaccgcattcctactactcaacttaaactccagcaccacgaccctactactatctcgcacctgaaacaagctaacatgactaacacccttaattccatccaccctcctctccctaggaggcctgcccccgctaaccggctttttgcccaaatgggccattatcgaagaattcacaaaaaacaatagcctcatcatccccaccatcatagccaccatcaccctccttaacctctacttctacctacgcctaatctactccacctcaatcacactactccccatatctaacaacgtaaaaataaaatgacagtttgaacatacaaaacccaccccattcctccccacactcatcgcccttaccacgctactcctacctatctccccttttatactaataatcttatagaaatttaggttaaatacagaccaagagccttcaaagccctcagtaagttgcaatacttaatttctgtaacagctaaggactgcaaaaccccactctgcatcaactgaacgcaaatcagccactttaattaagctaagcccttactagaccaatgggacttaaacccacaaacacttagttaacagctaagcaccctaatcaactggcttcaatctacttctcccgccgccgggaaaaaaggcgggagaagccccggcaggtttgaagctgcttcttcgaatttgcaattcaatatgaaaatcacctcggagctggtaaaaagaggcctaacccctgtctttagatttacagtccaatgcttcactcagccattttacctcacccccactgatgttcgccgaccgttgactattctctacaaaccacaaagacattggaacactatacctattattcggcgcatgagctggagtcctaggcacagctctaagcctccttattcgagccgagctgggccagccaggcaaccttctaggtaacgaccacatctacaacgttatcgtcacagcccatgcatttgtaataatcttcttcatagtaatacccatcataatcggaggctttggcaactgactagttcccctaataatcggtgcccccgatatggcgtttccccgcataaacaacataagcttctgactcttacctccctctctcctactcctgctcgcatctgctatagtggaggccggagcaggaacaggttgaacagtctaccctcccttagcagggaactactcccaccctggagcctccgtagacctaaccatcttctccttacacctagcaggtgtctcctctatcttaggggccatcaatttcatcacaacaattatcaatataaaaccccctgccataacccaataccaaacgcccctcttcgtctgatccgtcctaatcacagcagtcctacttctcctatctctcccagtcctagctgctggcatcactatactactaacagaccgcaacctcaacaccaccttcttcgaccccgccggaggaggagaccccattctataccaacacctattctgatttttcggtcaccctgaagtttatattcttatcctaccaggcttcggaataatctcccatattgtaacttactactccggaaaaaaagaaccatttggatacataggtatggtctgagctatgatatcaattggcttcctagggtttatcgtgtgagcacaccacatatttacagtaggaatagacgtagacacacgagcatatttcacctccgctaccataatcatcgctatccccaccggcgtcaaagtatttagctgactcgccacactccacggaagcaatatgaaatgatctgctgcagtgctctgagccctaggattcatctttcttttcaccgtaggtggcctgactggcattgtattagcaaactcatcactagacatcgtactacacgacacgtactacgttgtagcccacttccactatgtcctatcaataggagctgtatttgccatcataggaggcttcattcactgatttcccctattctcaggctacaccctagaccaaacctacgccaaaatccatttcactatcatattcatcggcgtaaatctaactttcttcccacaacactttctcggcctatccggaatgccccgacgttactcggactaccccgatgcatacaccacatgaaacatcctatcatctgtaggctcattcatttctctaacagcagtaatattaataattttcatgatttgagaagccttcgcttcgaagcgaaaagtcctaatagtagaagaaccctccataaacctggagtgactatatggatgccccccaccctaccacacattcgaagaacccgtatacataaaatctagacaaaaaaggaaggaatcgaaccccccaaagctggtttcaagccaaccccatggcctccatgactttttcaaaaaggtattagaaaaaccatttcataactttgtcaaagttaaattataggctaaatcctatatatcttaatggcacatgcagcgcaagtaggtctacaagacgctacttcccctatcatagaagagcttatcacctttcatgatcacgccctcataatcattttccttatctgcttcctagtcctgtatgcccttttcctaacactcacaacaaaactaactaatactaacatctcagacgctcaggaaatagaaaccgtctgaactatcctgcccgccatcatcctagtcctcatcgccctcccatccctacgcatcctttacataacagacgaggtcaacgatccctcccttaccatcaaatcaattggccaccaatggtactgaacctacgagtacaccgactacggcggactaatcttcaactcctacatacttcccccattattcctagaaccaggcgacctgcgactccttgacgttgacaatcgagtagtactcccgattgaagcccccattcgtataataattacatcacaagacgtcttgcactcatgagctgtccccacattaggcttaaaaacagatgcaattcccggacgtctaaaccaaaccactttcaccgctacacgaccgggggtatactacggtcaatgctctgaaatctgtggagcaaaccacagtttcatgcccatcgtcctagaattaattcccctaaaaatctttgaaatagggcccgtatttaccctatagcaccccctctaccccctctagagcccactgtaaagctaacttagcattaaccttttaagttaaagattaagagaaccaacacctctttacagtgaaatgccccaactaaatactaccgtatggcccaccataattacccccatactccttacactattcctcatcacccaactaaaaatattaaacacaaactaccacctacctccctcaccaaagcccataaaaataaaaaattataacaaaccctgagaaccaaaatgaacgaaaatctgttcgcttcattcattgcccccacaatcctaggcctacccgccgcagtactgatcattctatttccccctctattgatccccacctccaaatatctcatcaacaaccgactaatcaccacccaacaatgactaatcaaactaacctcaaaacaaatgataaccatacacaacactaaaggacgaacctgatctcttatactagtatccttaatcatttttattgccacaactaacctcctcggactcctgcctcactcatttacaccaaccacccaactatctataaacctagccatggccatccccttatgagcgggcgcagtgattataggctttcgctctaagattaaaaatgccctagcccacttcttaccacaaggcacacctacaccccttatccccatactagttattatcgaaaccatcagcctactcattcaaccaatagccctggccgtacgcctaaccgctaacattactgcaggccacctactcatgcacctaattggaagcgccaccctagcaatatcaaccattaaccttccctctacacttatcatcttcacaattctaattctactgactatcctagaaatcgctgtcgccttaatccaagcctacgttttcacacttctagtaagcctctacctgcacgacaacacataatgacccaccaatcacatgcctatcatatagtaaaacccagcccatgacccctaacaggggccctctcagccctcctaatgacctccggcctagccatgtgatttcacttccactccataacgctcctcatactaggcctactaaccaacacactaaccatataccaatgatggcgcgatgtaacacgagaaagcacataccaaggccaccacacaccacctgtccaaaaaggccttcgatacgggataatcctatttattacctcagaagtttttttcttcgcaggatttttctgagccttttaccactccagcctagcccctaccccccaattaggagggcactggcccccaacaggcatcaccccgctaaatcccctagaagtcccactcctaaacacatccgtattactcgcatcaggagtatcaatcacctgagctcaccatagtctaatagaaaacaaccgaaaccaaataattcaagcactgcttattacaattttactgggtctctattttaccctcctacaagcctcagagtacttcgagtctcccttcaccatttccgacggcatctacggctcaacattttttgtagccacaggcttccacggacttcacgtcattattggctcaactttcctcactatctgcttcatccgccaactaatatttcactttacatccaaacatcactttggcttcgaagccgccgcctgatactggcattttgtagatgtggtttgactatttctgtatgtctccatctattgatgagggtcttactcttttagtataaatagtaccgttaacttccaattaactagttttgacaacattcaaaaaagagtaataaacttcgccttaattttaataatcaacaccctcctagccttactactaataattattacattttgactaccacaactcaacggctacatagaaaaatccaccccttacgagtgcggcttcgaccctatatcccccgcccgcgtccctttctccataaaattcttcttagtagctattaccttcttattatttgatctagaaattgccctccttttacccctaccatgagccctacaaacaactaacctgccactaatagttatgtcatccctcttattaatcatcatcctagccctaagtctggcctatgagtgactacaaaaaggattagactgaaccgaattggtatatagtttaaacaaaacgaatgatttcgactcattaaattatgataatcatatttaccaaatgcccctcatttacataaatattatactagcatttaccatctcacttctaggaatactagtatatcgctcacacctcatatcctccctactatgcctagaaggaataatactatcgctgttcattatagctactctcataaccctcaacacccactccctcttagccaatattgtgcctattgccatactagtctttgccgcctgcgaagcagcggtgggcctagccctactagtctcaatctccaacacatatggcctagactacgtacataacctaaacctactccaatgctaaaactaatcgtcccaacaattatattactaccactgacatgactttccaaaaaacacataatttgaatcaacacaaccacccacagcctaattattagcatcatccctctactattttttaaccaaatcaacaacaacctatttagctgttccccaaccttttcctccgaccccctaacaacccccctcctaatactaactacctgactcctacccctcacaatcatggcaagccaacgccacttatccagtgaaccactatcacgaaaaaaactctacctctctatactaatctccctacaaatctccttaattataacattcacagccacagaactaatcatattttatatcttcttcgaaaccacacttatccccaccttggctatcatcacccgatgaggcaaccagccagaacgcctgaacgcaggcacatacttcctattctacaccctagtaggctcccttcccctactcatcgcactaatttacactcacaacaccctaggctcactaaacattctactactcactctcactgcccaagaactatcaaactcctgagccaacaacttaatatgactagcttacacaatagcttttatagtaaagatacctctttacggactccacttatgactccctaaagcccatgtcgaagcccccatcgctgggtcaatagtacttgccgcagtactcttaaaactaggcggctatggtataatacgcctcacactcattctcaaccccctgacaaaacacatagcctaccccttccttgtactatccctatgaggcataattataacaagctccatctgcctacgacaaacagacctaaaatcgctcattgcatactcttcaatcagccacatagccctcgtagtaacagccattctcatccaaaccccctgaagcttcaccggcgcagtcattctcataatcgcccacgggcttacatcctcattactattctgcctagcaaactcaaactacgaacgcactcacagtcgcatcataatcctctctcaaggacttcaaactctactcccactaatagctttttgatgacttctagcaagcctcgctaacctcgccttaccccccactattaacctactgggagaactctctgtgctagtaaccacgttctcctgatcaaatatcactctcctacttacaggactcaacatactagtcacagccctatactccctctacatatttaccacaacacaatggggctcactcacccaccacattaacaacataaaaccctcattcacacgagaaaacaccctcatgttcatacacctatcccccattctcctcctatccctcaaccccgacatcattaccgggttttcctcttgtaaatatagtttaaccaaaacatcagattgtgaatctgacaacagaggcttacgaccccttatttaccgagaaagctcacaagaactgctaactcatgcccccatgtctaacaacatggctttctcaacttttaaaggataacagctatccattggtcttaggccccaaaaattttggtgcaactccaaataaaagtaataaccatgcacactactataaccaccctaaccctgacttccctaattccccccatccttaccaccctcgttaaccctaacaaaaaaaactcatacccccattatgtaaaatccattgtcgcatccacctttattatcagtctcttccccacaacaatattcatgtgcctagaccaagaagttattatctcgaactgacactgagccacaacccaaacaacccagctctccctaagcttcaaactagactacttctccataatattcatccctgtagcattgttcgttacatggtccatcatagaattctcactgtgatatataaactcagacccaaacattaatcagttcttcaaatatctactcatcttcctaattaccatactaatcttagttaccgctaacaacctattccaactgttcatcggctgagagggcgtaggaattatatccttcttgctcatcagttgatgatacgcccgagcagatgccaacacagcagccattcaagcaatcctatacaaccgtatcggcgatatcggtttcatcctcgccttagcatgatttatcctacactccaactcatgagacccacaacaaatagcccttctaaacgctaatccaagcctcaccccactactaggcctcctcctagcagcagcaggcaaatcagcccaattaggtctccacccctgactcccctcagccatagaaggccccaccccagtctcagccctactccactcaagcactatagttgtagcaggaatcttcttactcatccgcttccaccccctagcagaaaatagcccactaatccaaactctaacactatgcttaggcgctatcaccactctgttcgcagcagtctgcgcccttacacaaaatgacatcaaaaaaatcgtagccttctccacttcaagtcaactaggactcataatagttacaatcggcatcaaccaaccacacctagcattcctgcacatctgtacccacgccttcttcaaagccatactatttatgtgctccgggtccatcatccacaaccttaacaatgaacaagatattcgaaaaataggaggactactcaaaaccatacctctcacttcaacctccctcaccattggcagcctagcattagcaggaatacctttcctcacaggtttctactccaaagaccacatcatcgaaaccgcaaacatatcatacacaaacgcctgagccctatctattactctcatcgctacctccctgacaagcgcctatagcactcgaataattcttctcaccctaacaggtcaacctcgcttccccacccttactaacattaacgaaaataaccccaccctactaaaccccattaaacgcctggcagccggaagcctattcgcaggatttctcattactaacaacatttcccccgcatcccccttccaaacaacaatccccctctacctaaaactcacagccctcgctgtcactttcctaggacttctaacagccctagacctcaactacctaaccaacaaacttaaaataaaatccccactatgcacattttatttctccaacatactcggattctaccctagcatcacacaccgcacaatcccctatctaggccttcttacgagccaaaacctgcccctactcctcctagacctaacctgactagaaaagctattacctaaaacaatttcacagcaccaaatctccacctccatcatcacctcaacccaaaaaggcataattaaactttacttcctctctttcttcttcccactcatcctaaccctactcctaatcacataacctattcccccgagcaatctcaattacaatatatacaccaacaaacaatgttcaaccagtaactactactaatcaacgcccataatcatacaaagcccccgcaccaataggatcctcccgaatcaaccctgacccctctccttcataaattattcagcttcctacactattaaagtttaccacaaccaccaccccatcatactctttcacccacagcaccaatcctacctccatcgctaaccccactaaaacactcaccaagacctcaacccctgacccccatgcctcaggatactcctcaatagccatcgctgtagtatatccaaagacaaccatcattccccctaaataaattaaaaaaactattaaacccatataacctcccccaaaattcagaataataacacacccgaccacaccgctaacaatcaatactaaacccccataaataggagaaggcttagaagaaaaccccacaaaccccattactaaacccacactcaacagaaacaaagcatacatcattattctcgcacggactacaaccacgaccaatgatatgaaaaaccatcgttgtatttcaactacaagaacaccaatgaccccaatacgcaaaactaaccccctaataaaattaattaaccactcattcatcgacctccccaccccatccaacatctccgcatgatgaaacttcggctcactccttggcgcctgcctgatcctccaaatcaccacaggactattcctagccatgcactactcaccagacgcctcaaccgccttttcatcaatcgcccacatcactcgagacgtaaattatggctgaatcatccgctaccttcacgccaatggcgcctcaatattctttatctgcctcttcctacacatcgggcgaggcctatattacggatcatttctctactcagaaacctgaaacatcggcattatcctcctgcttgcaactatagcaacagccttcataggctatgtcctcccgtgaggccaaatatcattctgaggggccacagtaattacaaacttactatccgccatcccatacattgggacagacctagttcaatgaatctgaggaggctactcagtagacagtcccaccctcacacgattctttacctttcacttcatcttgcccttcattattgcagccctagcagcactccacctcctattcttgcacgaaacgggatcaaacaaccccctaggaatcacctcccattccgataaaatcaccttccacccttactacacaatcaaagacgccctcggcttacttctcttccttctctccttaatgacattaacactattctcaccagacctcctaggcgacccagacaattataccctagccaaccccttaaacacccctccccacatcaagcccgaatgatatttcctattcgcctacacaattctccggtccgtccctaacaaactaggaggcgtccttgccctattactatccatcctcatcctagcaataatccccatcctccatatatccaaacaacaaagcataatatttcgcccactaagccaatcactttattgactcctagccgcagacctcctcattctaacctgaatcggaggacaaccagtaagctacccttttaccatcattggacaagtagcatccgtactatacttcacaacaatcctaatcctaataccaactatctccctaattgaaaacaaaatactcaaatgggcctgtccttgtagtataaactaatacaccagtcttgtaaaccggagatgaaaacctttttccaaggacaaatcagagaaaaagtctttaactccaccattagcacccaaagctaagattctaatttaaactattctctgttctttcatggggaagcagatttgggtaccacccaagtattgactcacccatcaacaaccgctatgtatttcgtacattactgccagccaccatgaatattgtacggtaccataaatacttgaccacctgtagtacataaaaacccaatccacatcaaaaccccctccccatgcttacaagcaagtacagcaatcaaccctcaactatcacacatcaactgcaactccaaagccacccctcacccactaggataccaacaaacctacccacccttaacagtacatagtacataaagccatttaccgtacatagcacattacagtcaaatcccttctcgtccccatggatgacccccctcagataggggtcccttgaccaccatcctccgtgaaatcaatatcccgcacaagagtgctactctcctcgctccgggcccataacacttgggggtagctaaagtgaactgtatccgacatctggttcctacttcagggccataaagcctaaatagcccacacgttccccttaaataagacatcacgatg

SEQ ID NO: 536 - DNA, 16570 bp, Homo sapiens mitochondrial
  3108: "n" refers to a nucleotide at position 3107 of the Cambridge Reference Sequence (CRS, Anderson et al. 1981 Nature 290:457-465), later determined to be absent from the human mtDNA sequence according to the revised CRS (rCRS, Andrews et al. 1999 Nature Genetics 23:147); "n" therefore represents a single nucleotide deletion at a position corresponding to nucleotide 3107 of SEQ ID NO:1 as provided herein.
gatcacaggtctatcaccctattaaccactcacgggagctctccatgcatttggtattttcgtctggggggtgtgcacgcgatagcattgcgagacgctggagccggagcaccctatgtcgcagtatctgtctttgattcctgccccatcctattatttatcgcacctacgttcaatattacagacggacatacttactaaagtgtgttaattaattaatgcttgtaggacataataataacaattgaatgtctgcacagccgctttccacacagacatcataacaaaaaattttcaccaaaccccccctcccccgccttctggccacagcacttaaacacatctctgccaaaccccaaaaacaaagaaccctaacaccagcctaaccagatttcaaattttatcttttggcggtatgcacttttaacagtcaccccccaactaacacattattttcccctctcactcccatactactaatctcatcaacacaacccccgcccatcctacccagcacacacacaccgctgctaaccccataccccgaaccaaccaaaccccaaagacaccccccacagtttatgtagcttacctcctcaaagcaatacactgaaaatgtttagacgggctcacatcaccccataaacaaataggtttggtcctagcctttctattagctcttagtaagattacacatgcaagcatccccgttccagtgagttcaccctctaaatcaccacgatcaaaagggacaagcatcaagcacgcagcaatgcagctcaaaacgcttagcctagccacacccccacgggaaacagcagtgattaacctttagcaataaacgaaagtttaactaagctatactaaccccagggttggtcaatttcgtgccagccaccgcggtcacacgattaacccaagtcaatagaagccggcgtaaagagtgttttagatcaccccctccccaataaagctaaaactcacctgagttgtaaaaaactccagttgacacaaaatagactacgaaagtggctttaacatatctgaacacacaatagctaagacccaaactgggattagataccccactatgcttagccctaaacctcaacagttaaatcaacaaaactgctcgccagaacactacgagccacagcttaaaactcaaaggacctggcggtgcttcatatccctctagaggagcctgttctgtaatcgataaaccccgatcaacctcaccacctcttgctcagcctatataccgccatcttcagcaaaccctgatgaaggctacaaagtaagcgcaagtacccacgtaaagacgttaggtcaaggtgtagcccatgaggtggcaagaaatgggctacattttctaccccagaaaactacgatagcccttatgaaacttaagggtcgaaggtggatttagcagtaaactgagagtagagtgcttagttgaacagggccctgaagcgcgtacacaccgcccgtcaccctcctcaagtatacttcaaaggacatttaactaaaacccctacgcatttatatagaggagacaagtcgtaacatggtaagtgtactggaaagtgcacttggacgaaccagagtgtagcttaacacaaagcacccaacttacacttaggagatttcaacttaacttgaccgctctgagctaaacctagccccaaacccactccaccttactaccagacaaccttagccaaaccatttacccaaataaagtataggcgatagaaattgaaacctggcgcaatagatatagtaccgcaagggaaagatgaaaaattataaccaagcataatatagcaaggactaacccctataccttctgcataatgaattaactagaaataactttgcaaggagagccaaagctaagacccccgaaaccagacgagctacctaagaacagctaaaagagcacacccgtctatgtagcaaaatagtgggaagatttataggtagaggcgacaaacctaccgagcctggtgatagctggttgtccaagatagaatcttagttcaactttaaatttgcccacagaaccctctaaatccccttgtaaatttaactgttagtccaaagaggaacagctctttggacactaggaaaaaaccttgtagagagagtaaaaaatttaacacccatagtaggcctaaaagcagccaccaattaagaaagcgttcaagctcaacacccactacctaaaaaatcccaaacatataactgaactcctcacacccaattggaccaatctatcaccctatagaagaactaatgttagtataagtaacatgaaaacattctcctccgcataagcctgcgtcagattaaaacactgaactgacaattaacagcccaatatctacaatcaaccaacaagtcattattaccctcactgtcaacccaacacaggcatgctcataaggaaaggttaaaaaaagtaaaaggaactcggcaaatcttaccccgcctgtttaccaaaaacatcacctctagcatcaccagtattagaggcaccgcctgcccagtgacacatgtttaacggccgcggtaccctaaccgtgcaaaggtagcataatcacttgttccttaaatagggacctgtatgaatggctccacgagggttcagctgtctcttacttttaaccagtgaaattgacctgcccgtgaagaggcgggcatgacacagcaagacgagaagaccctatggagctttaatttattaatgcaaacagtacctaacaaacccacaggtcctaaactaccaaacctgcattaaaaatttcggttggggcgacctcggagcagaacccaacctccgagcagtacatgctaagacttcaccagtcaaagcgaactactatactcaattgatccaataacttgaccaacggaacaagttaccctagggataacagcgcaatcctattctagagtccatatcaacaatagggtttacgacctcgatgttggatcaggacatcccaatggtgcagccgctattaaaggttcgtttgttcaacgattaaagtcctacgtgatctgagttcagaccggagtaatccaggtcggtttctatctacnttcaaattcctccctgtacgaaaggacaagagaaataaggcctacttcacaaagcgccttcccccgtaaatgatatcatctcaacttagtattatacccacacccacccaagaacagggtttgttaagatggcagagcccggtaatcgcataaaacttaaaactttacagtcagaggttcaattcctcttcttaacaacatacccatggccaacctcctactcctcattgtacccattctaatcgcaatggcattcctaatgcttaccgaacgaaaaattctaggctatatacaactacgcaaaggccccaacgttgtaggcccctacgggctactacaacccttcgctgacgccataaaactcttcaccaaagagcccctaaaacccgccacatctaccatcaccctctacatcaccgccccgaccttagctctcaccatcgctcttctactatgaacccccctccccatacccaaccccctggtcaacctcaacctaggcctcctatttattctagccacctctagcctagccgtttactcaatcctctgatcagggtgagcatcaaactcaaactacgccctgatcggcgcactgcgagcagtagcccaaacaatctcatatgaagtcaccctagccatcattctactatcaacattactaataagtggctcctttaacctctccacccttatcacaacacaagaacacctctgattactcctgccatcatgacccttggccataatatgatttatctccacactagcagagaccaaccgaacccccttcgaccttgccgaaggggagtccgaactagtctcaggcttcaacatcgaatacgccgcaggccccttcgccctattcttcatagccgaatacacaaacattattataataaacaccctcaccactacaatcttcctaggaacaacatatgacgcactctcccctgaactctacacaacatattttgtcaccaagaccctacttctaacctccctgttcttatgaattcgaacagcatacccccgattccgctacgaccaactcatacacctcctatgaaaaaacttcctaccactcaccctagcattacttatatgacatgtctccatacccattacaatctccagcattccccctcaaacctaagaaatatgtctgataaaagagttactttgatagagtaaataataggagcttaaacccccttatttctaggactatgagaatcgaacccatccctgagaatccaaaattctccgtgccacctatcacaccccatcctaaagtaaggtcagctaaataagctatcgggcccataccccgaaaatgttggttatacccttcccgtactaattaatcccctggcccaacccgtcatctactctaccatctttgcaggcacactcatcacagcgctaagctcgcactgattttttacctgagtaggcctagaaataaacatgctagcttttattccagttctaaccaaaaaaataaaccctcgttccacagaagctgccatcaagtatttcctcacgcaagcaaccgcatccataatccttctaatagctatcctcttcaacaatatactctccggacaatgaaccataaccaatactaccaatcaatactcatcattaataatcataatggctatagcaataaaactaggaatagccccctttcacttctgagtcccagaggttacccaaggcacccctctgacatccggcctgcttcttctcacatgacaaaaactagcccccatctcaatcatataccaaatctctccctcactaaacgtaagccttctcctcactctctcaatcttatccatcatagcaggcagttgaggtggattaaaccaaacccagctacgcaaaatcttagcatactcctcaattacccacataggatgaataatagcagttctaccgtacaaccctaacataaccattcttaatttaactatttatattatcctaactactaccgcattcctactactcaacttaaactccagcaccacgaccctactactatctcgcacctgaaacaagctaacatgactaacacccttaattccatccaccctcctctccctaggaggcctgcccccgctaaccggctttttgcccaaatgggccattatcgaagaattcacaaaaaacaatagcctcatcatccccaccatcatagccaccatcaccctccttaacctctacttctacctacgcctaatctactccacctcaatcacactactccccatatctaacaacgtaaaaataaaatgacagtttgaacatacaaaacccaccccattcctccccacactcatcgcccttaccacgctactcctacctatctccccttttatactaataatcttatagaaatttaggttaaatacagaccaagagccttcaaagccctcagtaagttgcaatacttaatttctgtaacagctaaggactgcaaaaccccactctgcatcaactgaacgcaaatcagccactttaattaagctaagcccttactagaccaatgggacttaaacccacaaacacttagttaacagctaagcaccctaatcaactggcttcaatctacttctcccgccgccgggaaaaaaggcgggagaagccccggcaggtttgaagctgcttcttcgaatttgcaattcaatatgaaaatcacctcggagctggtaaaaagaggcctaacccctgtctttagatttacagtccaatgcttcactcagccattttacctcacccccactgatgttcgccgaccgttgactattctctacaaaccacaaagacattggaacactatacctattattcggcgcatgagctggagtcctaggcacagctctaagcctccttattcgagccgagctgggccagccaggcaaccttctaggtaacgaccacatctacaacgttatcgtcacagcccatgcatttgtaataatcttcttcatagtaatacccatcataatcggaggctttggcaactgactagttcccctaataatcggtgcccccgatatggcgtttccccgcataaacaacataagcttctgactcttacctccctctctcctactcctgctcgcatctgctatagtggaggccggagcaggaacaggttgaacagtctaccctcccttagcagggaactactcccaccctggagcctccgtagacctaaccatcttctccttacacctagcaggtgtctcctctatcttaggggccatcaatttcatcacaacaattatcaatataaaaccccctgccataacccaataccaaacgcccctcttcgtctgatccgtcctaatcacagcagtcctacttctcctatctctcccagtcctagctgctggcatcactatactactaacagaccgcaacctcaacaccaccttcttcgaccccgccggaggaggagaccccattctataccaacacctattctgatttttcggtcaccctgaagtttatattcttatcctaccaggcttcggaataatctcccatattgtaacttactactccggaaaaaaagaaccatttggatacataggtatggtctgagctatgatatcaattggcttcctagggtttatcgtgtgagcacaccatatatttacagtaggaatagacgtagacacacgagcatatttcacctccgctaccataatcatcgctatccccaccggcgtcaaagtatttagctgactcgccacactccacggaagcaatatgaaatgatctgctgcagtgctctgagccctaggattcatctttcttttcaccgtaggtggcctgactggcattgtattagcaaactcatcactagacatcgtactacacgacacgtactacgttgtagctcacttccactatgtcctatcaataggagctgtatttgccatcataggaggcttcattcactgatttcccctattctcaggctacaccctagaccaaacctacgccaaaatccatttcactatcatattcatcggcgtaaatctaactttcttcccacaacactttctcggcctatccggaatgccccgacgttactcggactaccccgatgcatacaccacatgaaacatcctatcatctgtaggctcattcatttctctaacagcagtaatattaataattttcatgatttgagaagccttcgcttcgaagcgaaaagtcctaatagtagaagaaccctccataaacctggagtgactatatggatgccccccaccctaccacacattcgaagaacccgtatacataaaatctagacaaaaaaggaaggaatcgaaccccccaaagctggtttcaagccaaccccatggcctccatgactttttcaaaaaggtattagaaaaaccatttcataactttgtcaaagttaaattataggctaaatcctatatatcttaatggcacatgcagcgcaagtaggtctacaagacgctacttcccctatcatagaagagcttatcacctttcatgatcacgccctcataatcattttccttatctgcttcctagtcctgtatgcccttttcctaacactcacaacaaaactaactaatactaacatctcagacgctcaggaaatagaaaccgtctgaactatcctgcccgccatcatcctagtcctcatcgccctcccatccctacgcatcctttacataacagacgaggtcaacgatccctcccttaccatcaaatcaattggccaccaatggtactgaacctacgagtacaccgactacggcggactaatcttcaactcctacatacttcccccattattcctagaaccaggcgacctgcgactccttgacgttgacaatcgagtagtactcccgattgaagcccccattcgtataataattacatcacaagacgtcttgcactcatgagctgtccccacattaggcttaaaaacagatgcaattcccggacgtctaaaccaaaccactttcaccgctacacgaccgggggtatactacggtcaatgctctgaaatctgtggagcaaaccacagtttcatgcccatcgtcctagaattaattcccctaaaaatctttgaaatagggcccgtatttaccctatagcaccccctctgccccctctagagcccactgtaaagctaacttagcattaaccttttaagttaaagattaagagaaccaacacctctttacagtgaaatgccccaactaaatactaccgtatggcccaccataattacccccatactccttacactattcctcatcacccaactaaaaatattaaacacaaactaccacctacctccctcaccaaagcccataaaaataaaaaattataacaaaccctgagaaccaaaatgaacgaaaatctgttcgcttcattcattgcccccacaatcctaggcctacccgccgcagtactgatcattctatttccccctctattgatccccacctccaaatatctcatcaacaaccgactaatcaccacccaacaatgactaatcaaactaacctcaaaacaaatgataaccatacacaacactaaaggacgaacctgatctcttatactagtatccttaatcatttttattgccacaactaacctcctcggactcctgcctcactcatttacaccaaccacccaactatctataaacctagccatggccatccccttatgagcgggcgcagtgattataggctttcgctctaagattaaaaatgccctagcccacttcttaccacaaggcacacctacaccccttatccccatactagttattatcgaaaccatcagcctactcattcaaccaatagccctggccgtacgcctaaccgctaacattactgcaggccacctactcatgcacctaattggaagcgccaccctagcaatatcaaccattaaccttccctctacacttatcatcttcacaattctaattctactgactatcctagaaatcgctgtcgccttaatccaagcctacgttttcacacttctagtaagcctctacctgcacgacaacacataatgacccaccaatcacatgcctatcatatagtaaaacccagcccatgacccctaacaggggccctctcagccctcctaatgacctccggcctagccatgtgatttcacttccactccataacgctcctcatactaggcctactaaccaacacactaaccatataccaatgatggcgcgatgtaacacgagaaagcacataccaaggccaccacacaccacctgtccaaaaaggccttcgatacgggataatcctatttattacctcagaagtttttttcttcgcaggatttttctgagccttttaccactccagcctagcccctaccccccaattaggagggcactggcccccaacaggcatcaccccgctaaatcccctagaagtcccactcctaaacacatccgtattactcgcatcaggagtatcaatcacctgagctcaccatagtctaatagaaaacaaccgaaaccaaataattcaagcactgcttattacaattttactgggtctctattttaccctcctacaagcctcagagtacttcgagtctcccttcaccatttccgacggcatctacggctcaacattttttgtagccacaggcttccacggacttcacgtcattattggctcaactttcctcactatctgcttcatccgccaactaatatttcactttacatccaaacatcactttggcttcgaagccgccgcctgatactggcattttgtagatgtggtttgactatttctgtatgtctccatctattgatgagggtcttactcttttagtataaatagtaccgttaacttccaattaactagttttgacaacattcaaaaaagagtaataaacttcgccttaattttaataatcaacaccctcctagccttactactaataattattacattttgactaccacaactcaacggctacatagaaaaatccaccccttacgagtgcggcttcgaccctatatcccccgcccgcgtccctttctccataaaattcttcttagtagctattaccttcttattatttgatctagaaattgccctccttttacccctaccatgagccctacaaacaactaacctgccactaatagttatgtcatccctcttattaatcatcatcctagccctaagtctggcctatgagtgactacaaaaaggattagactgagccgaattggtatatagtttaaacaaaacgaatgatttcgactcattaaattatgataatcatatttaccaaatgcccctcatttacataaatattatactagcatttaccatctcacttctaggaatactagtatatcgctcacacctcatatcctccctactatgcctagaaggaataatactatcgctgttcattatagctactctcataaccctcaacacccactccctcttagccaatattgtgcctattgccatactagtctttgccgcctgcgaagcagcagtgggcctagccctactagtctcaatctccaacacatatggcctagactacgtacataacctaaacctactccaatgctaaaactaatcgtcccaacaattatattactaccactgacatgactttccaaaaaacacataatttgaatcaacacaaccacccacagcctaattattagcatcatccctctactattttttaaccaaatcaacaacaacctatttagctgttccccaaccttttcctccgaccccctaacaacccccctcctaatactaactacctgactcctacccctcacaatcatggcaagccaacgccacttatccagtgaaccactatcacgaaaaaaactctacctctctatactaatctccctacaaatctccttaattataacattcacagccacagaactaatcatattttatatcttcttcgaaaccacacttatccccaccttggctatcatcacccgatgaggcaaccagccagaacgcctgaacgcaggcacatacttcctattctacaccctagtaggctcccttcccctactcatcgcactgatttacactcacaacaccctaggctcactaaacattctactactcactctcactgcccaagaactatcaaactcctgagccaacaacttaatatgactagcttacacaatagcttttatagtaaagatacctctttacggactccacttatgactccctaaagcccatgtcgaagcccccatcgctgggtcaatagtacttgccgcagtactcttaaaactaggcggctatggtataatacgcctcacactcattctcaaccccctgacaaaacacatagcctaccccttccttgtactatccctatgaggcataattataacaagctccatctgcctacgacaaacagacctaaaatcgctcattgcatactcttcaatcagccacatagccctcgtagtaacagccattctcatccaaaccccctgaagcttcaccggcgcagtcatcctcataatcgcccacggacttacatcctcattactattctgcctagcaaactcaaactacgaacgcactcacagtcgcatcataatcctctctcaaggacttcaaactctactcccactaatagctttttgatgacttctagcaagcctcgctaacctcgccttaccccccactattaacctactgggagaactctctgtgctagtaaccacgttctcctgatcaaatatcactctcctacttacaggactcaacatactagtcacagccctatactccctctacatatttaccacaacacaatggggctcactcacccaccacattaacaacataaaaccctcattcacacgagaaaacaccctcatgttcatacacctatcccccattctcctcctatccctcaaccccgacatcattaccgggttttcctcttgtaaatatagtttaaccaaaacatcagattgtgaatctgacaacagaggcttacgaccccttatttaccgagaaagctcacaagaactgctaactcatgcccccatgtctaacaacatggctttctcaacttttaaaggataacagctatccattggtcttaggccccaaaaattttggtgcaactccaaataaaagtaataaccatgcacactactataaccaccctaaccctgacttccctaattccccccatccttaccaccctcgttaaccctaacaaaaaaaactcatacccccattatgtaaaatccattgtcgcatccacctttattatcagtctcttccccacaacaatattcatgtgcctagaccaagaagttattatctcgaactgacactgagccacaacccaaacaacccagctctccctaagcttcaaactagactacttctccataatattcatccctgtggcattgttcgttacatggtccatcatagaattctcactgtgatatataaactcagacccaaacattaatcagttcttcaaatatctactcatcttcctaattaccatactaatcttagttaccgctaacaacctattccaactgttcatcggctgagagggcgtaggaattatatccttcttgctcatcagttgatgatacgcccgagcagatgccaacacagcagccattcaagcaatcctatacaaccgtatcggcgatatcggtttcatcctcgccttagcatgatttatcctacactccaactcatgagacccacaacaaatagcccttctaaacgctaatccaagcctcaccccactactaggcctcctcctagcagcagcaggcaaatcagcccaattaggtctccacccctgactcccctcagccatagaaggccccaccccagtctcagccctactccactcaagcactatagttgtagcaggaatcttcttactcatccgcttccaccccctagcagaaaatagcccactaatccaaactctaacactatgcttaggcgctatcaccactctgttcgcagcagtctgcgcccttacacaaaatgacatcaaaaaaatcgtagccttctccacttcaagtcaactaggactcataatagtcacaatcggcatcaaccaaccacacctagcattcctgcacatctgtacccacgccttcttcaaagccatactatttatgtgctccgggtccatcatccacaaccttaacaatgaacaagatattcgaaaaataggaggactactcaaaaccatacctctcacttcaacctccctcaccattggcagcctagcattagcaggaatacctttcctcacaggtttctactccaaagaccacatcatcgaaaccgcaaacatatcatacacaaacgcctgagccctatctattactctcatcgctacctccctgacaagcgcctatagcactcgaataattcttctcaccctaacaggtcaacctcgcttccccaccctcactaacattaacgaaaataaccccaccctactaaaccccattaaacgcctgacagccggaagcctattcgcaggatttctcattactaacaacatttcccccgcatcccccttccaaacaacaatccccctctacctaaaactcacagccctcgctgtcactttcctaggacttctaacagccctagacctcaactacctaaccaacaaacttaaaataaaatccccactatgcacattttatttctccaacatactcggattctaccctagcatcgcacaccgcacaatcccctatctaggccttcttacgagccaaaacctgcccctactcctcctagacctaacctgactagaaaagctattacctaaaacaatttcacagcaccaaatctccacctccatcatcacctcaacccaaaaaggcataattaaactttacttcctctctttcttcttcccactcatcctaaccctactcctaatcacataacctattcccccgagcaatctcaattacaatatatacaccaacaaacaatgttcaaccagtaactactactaatcaacgcccataatcatacaaagcccccgcaccaataggatcctcccgaatcaaccctgacccctctccttcataaattattcagcttcctacactattaaagtttaccacaaccaccaccccatcatactctttcacccacagcaccaatcctacctccatcgctaaccccactaaaacactcaccaagacctcaacccctgacccccatgcctcaggatactcctcaatagccatcgctgtagtatatccaaagacaaccatcattccccctaaataaattaaaaaaactattaaacccatataacctcccccaaaattcagaataataacacacccgaccacaccgctaacaatcaatactaaacccccataaataggagaaggcttagaagaaaaccccacaaaccccattactaaacccacactcaacagaaacaaagcatacatcattattctcgcacggactacaaccacgaccaatgatatgaaaaaccatcgttgtatttcaactacaagaacaccaatgaccccaatacgcaaaattaaccccctaataaaattaattaaccactcactcatcgacctccccaccccatccaacatctccgcatgatgaaacttcggctcactccttggcgcctgcctgatcctccaaatcaccacaggactattcctagccatgcactactcaccagacgcctcaaccgccttttcatcaatcgcccacatcactcgagacgtaaattatggctgaatcatccgctaccttcacgccaatggcgcctcaatattctttatctgcctcttcctacacatcgggcgaggcctatattacggatcatttctctactcagaaacctgaaacatcggcattatcctcctgcttgcaactatagcaacagccttcataggctatgtcctcccgtgaggccaaatatcattctgaggggccacagtaattacaaacttactatccgccatcccatacattgggacagacctagttcaatgaatctgaggaggctactcagtagacagtcccaccctcacacgattctttacctttcacttcatcttgcccttcattattgcagccctagcagcactccacctcctattcttgcacgaaacgggatcaaacaaccccctaggaatcacctcccattccgataaaatcaccttccacccttactacacaatcaaagacgccctcggcttacttctcttcattctctccttaatgacattaacactattctcaccagacctcctaggcgacccagacaattataccctagccaaccccttaaacacccctccccacatcaagcccgaatgatatttcctattcgcctacacaattctccgatccgtccctaacaaactaggaggcgtccttgccctattactatccatcctcatcctagcaataatccccatcctccatatatccaaacaacaaagcataatatttcgcccactaagccaatcactttattgactcctagccgcagacctcctcattctaacctgaatcggaggacaaccagtaagctacccttttaccatcattggacaagtagcatccgtactatacttcacaacaatcctaatcctaataccaactatctccctaattgaaaacaaaatactcaaatgggcctgtccttgtagtataaactaatacaccagtcttgtaaaccggagatgaaaacctttttccaaggacaaatcagagaaaaagtctttaactccaccattagcacccaaagctaagattctaatttaaactattctctgttctttcatggggaagcagatttgggtaccacccaagtattgacttacccatcaacaaccgctatgtatttcgtacattactgccagccaccatgaatattgcacggtaccataaatacttgaccacctgtagtacataaaaacccaatccacatcaaaaccccctccccatgcttacaagcaagtacagcaatcaaccctcaactatcacacatcaactgcaactccaaagccacccctcacccactaggataccaacaaacctacccacccttaacagtacatagtacataaagccatttaccgtacatagcacattacagtcaaatcccttctcgtccccatggatgacccccctcagataggggtcccttgaccaccatcctccgtgaaatcaatatcccgcacaagagtgctactctcctcgctccgggcccataacacttgggggtagctaaagtgaactgtatccgacatctggttcctacttcagggccataaagcctaaatagcccacacgttccccttaaataagacatcacgatg

SEQ ID NO: 537 - DNA, 16568 bp, Homo sapiens mitochondrial
  3106: "n" refers to a nucleotide at position 3107 of the Cambridge Reference Sequence (CRS, Anderson et al. 1981 Nature 290:457-465), later determined to be absent from the human mtDNA sequence according to the revised CRS (rCRS, Andrews et al. 1999 Nature Genetics 23:147); "n" therefore represents a single nucleotide deletion at a position corresponding to nucleotide 3107 of SEQ ID NO:1 as provided herein.
gatcacaggtctatcaccctattaaccactcacgggagctctccatgcatttggtattttcgtctggggggtgtgcacgcgatagcattgcgagacgctggagccggagcaccctatgtcgcagtatctgtctttgattcctgccccattctattatttatcgcacctacgttcaatattacaggcgaacatacttaccaaagtgtgttaattaattaatgcttgtaggacataataataacaattgaatgtctgcacagccgctttccacacagacatcataacaaaaaatttccaccaaaccccccctcccccgccttctggccacagcacttaaacacatctctgccaaaccccaaaaacaaagaaccctaacaccagcctaaccagatttcaaattttatcttttggcggtatgcacttttaacagtcaccccccaactaacacattattttcccctcccactcccatactactaatctcatcaacacaacccccgcccatcctacccagcacacacaccgctgctaaccccataccccgaaccaaccaaaccccaaagacaccccccacagtttatgtagcttacctcctcaaagcaatacactgaaaatgtttagacgggctcacatcaccccataaacaaataggtttggtcctagcctttctattagctcttagtaagattacacatgcaagcatccccgttccagtgagttcaccctctaaatcaccacgatcaaaagggacaagcatcaagcacgcagcaatgcagctcaaaacgcttagcctagccacacccccacgggaaacagcagtgattaacctttagcaataaacgaaagtttaactaagctatactaaccccagggttggtcaatttcgtgccagccaccgcggtcacacgattaacccaagtcaatagaagccggcgtaaagagtgttttagatcaccccctccccaataaagctaaaactcacctgagttgtaaaaaactccagttgacacaaaatagactacgaaagtggctttaacatatctgaacacacaatagctaagacccaaactgggattagataccccactatgcttagccctaaacctcaacagttaaatcaacaaaactgctcgccagaacactacgagccacagcttaaaactcaaaggacctggcggtgcttcatatccctctagaggagcctgttctgtaatcgataaaccccgatcaacctcaccacctcttgctcagcctatataccgccatcttcagcaaaccctgatgaaggctacaaagtaagcgcaagtacccacgtaaagacgttaggtcaaggtgtagcccatgaggtggcaagaaatgggctacattttctaccccagaaaactacgatagcccttatgaaacttaagggtcgaaggtggatttagcagtaaactgagagtagagtgcttagttgaacagggccctgaagcgcgtacacaccgcccgtcaccctcctcaagtatacttcaaaggacatttaactaaaacccctacgcatttatatagaggagacaagtcgtaacatggtaagtgtactggaaagtgcacttggacgaaccagagtgtagcttaacacaaagcacccaacttacacttaggagatttcaacttaacttgaccgctctgagctaaacctagccccaaacccactccaccttactaccagacaaccttagccaaaccatttacccaaataaagtataggcgatagaaattgaaacctggcgcaatagatatagtaccgcaagggaaagatgaaaaattataaccaagcataatatagcaaggactaacccctataccttctgcataatgaattaactagaaataactttgcaaggagagccaaagctaagacccccgaaaccagacgagctacctaagaacagctaaaagagcacacccgtctatgtagcaaaatagtgggaagatttataggtagaggcgacaaacctaccgagcctggtgatagctggttgtccaagatagaatcttagttcaactttaaatttgcccacagaaccctctaaatccccttgtaaatttaactgttagtccaaagaggaacagctctttggacactaggaaaaaaccttgtagagagagtaaaaaatttaacacccatagtaggcctaaaagcagccaccaattaagaaagcgttcaagctcaacacccactacctaaaaaatcccaaacatataactgaactcctcacacccaattggaccaatctatcaccctatagaagaactaatgttagtataagtaacatgaaaacattctcctccgcataagcctgcgtcagattaaaacactgaactgacaattaacagcccaatatctacaatcaaccaacaagtcattattaccctcactgtcaacccaacacaggcatgctcataaggaaaggttaaaaaaagtaaaaggaactcggcaaatcttaccccgcctgtttaccaaaaacatcacctctagcatcaccagtattagaggcaccgcctgcccagtgacacatgtttaacggccgcggtaccctaaccgtgcaaaggtagcataatcacttgttccttaaatagggacctgtatgaatggctccacgagggttcagctgtctcttacttttaaccagtgaaattgacctgcccgtgaagaggcgggcatgacacagcaagacgagaagaccctatggagctttaatttattaatgcaaacagtacctaacaaacccacaggtcctaaactaccaaacctgcattaaaaatttcggttggggcgacctcggagcagaacccaacctccgagcagtacatgctaagacttcaccagtcaaagcgaactactatactcaattgatccaataacttgaccaacggaacaagttaccctagggataacagcgcaatcctattctagagtccatatcaacaatagggtttacgacctcgatgttggatcaggacatcccgatggtgcagccgctattaaaggttcgtttgttcaacgattaaagtcctacgtgatctgagttcagaccggagtaatccaggtcggtttctatctacnttcaaattcctccctgtacgaaaggacaagagaaataaggcctacttcacaaagcgccttcccccgtaaatgatatcatctcaacttagtattatacccacacccacccaagaacagggtttgttaagatggcagagcccggtaatcgcataaaacttaaaactttacagtcagaggttcaattcctcttcttaacaacatacccatggccaacctcctactcctcattgtacccattctaatcgcaatggcattcctaatgcttaccgaacgaaaaattctaggctatatacaactacgcaaaggccccaacgttgtaggcccctacgggctactacaacccttcgctgacgccataaaactcttcaccaaagagcccctaaaacccgccacatctaccatcaccctctacatcaccgccccgaccttagctctcaccatcgctcttctactatgaacccccctccccatacccaaccccctggtcaacctcaacctgggcctcctatttattctagccacctctagcctagccgtttactcaatcctctgatcagggtgagcatcaaactcaaactacgccctgatcggcgcactgcgagcagtagcccaaacaatctcatatgaagtcaccctagccatcattctactatcaacattactaataagtggctcctttaacctctccacccttatcacaacacaagaacacctctgattactcctgccatcatgacccttggccataatatgatttatctccacactagcagagaccaaccgaacccccttcgaccttgccgaaggggagtccgaactagtctcaggcttcaacatcgaatacgccgcaggccccttcgccctattcttcatagccgaatacacaaacattattataataaacaccctcaccactacaatcttcctaggaacaacatatgacgcactctcccctgaactctatacaacatattttgtcaccaagaccctacttctaacctccctgttcttatgaattcgaacagcatacccccgattccgctacgaccaactcatacacctcctatgaaaaaacttcctaccactcaccctagcattacttatatgatatgtctccatacccattacaatctccagcattccccctcaaacctaagaaatatgtctgataaaagagttactttgatagagtaaataataggagcttaaacccccttatttctaggactatgagaatcgaacccatccctgagaatccaaaattctccgtgccacctatcacaccccatcctaaagtaaggtcagctaaataagctatcgggcccataccccgaaaatgttggttatacccttcccgtactaattaatcccctggcccaacccgtcatctactctaccatctttgcaggcacactcatcacagcgctaagctcgcactgattttttacctgagtaggcctagaaataaacatgctagcttttattccagttctaaccaaaaaaataaaccctcgttccacagaagctgccatcaagtatttcctcacgcaagcaaccgcatccataatccttctaatagctatcctcttcaacaatatactctccggacaatgaaccataaccaatactaccaatcaatactcatcattaataatcataatggctatagcaataaaactaggaatagccccctttcacttctgagtcccagaggttacccaaggcacccctctgacatccggtctgcttcttctcacatgacaaaaactagcccccatctcaatcatataccaaatctctccctcactaaacgtaagccttctcctcactctctcaatcttatccatcatagcaggcagttgaggtggattaaaccaaacccagctacgcaaaatcttagcatactcctcaattacccacataggatgaataatagcagttctaccgtacaaccctaacataaccattcttaatttaactatttatattatcctaactactaccgcattcctactactcaacttaaactccagcaccacgaccctactactatctcgcacctgaaacaagctaacatgactaacacccttaattccatccaccctcctctccctaggaggcctgcccccgctaaccggctttttgcccaaatgggccatcatcgaagaattcacaaaaaacaatagcctcatcatccccaccatcatagccaccatcaccctccttaacctctacttctacctacgcctaatctactccacctcaatcacactactccccatatctaacaacgtaaaaataaaatgacagtttgaacatacaaaacccaccccactcctccccacactcatcgcccttaccacgctactcctacctatctccccttttatactaataatcttatagaaatttaggttaaatacagaccaagagccttcaaagccctcagtaagttgcaatacttaatttctgtaacagctaaggactgcaaaaccccactctgcatcaactgaacgcaaatcagccactttaattaagctaagcccttactagaccaatgggacttaaacccacaaacacttagttaacagctaagcaccctaatcaactggcttcaatctacttctcccgccgccgggaaaaaaggcgggagaagccccggcaggtttgaagctgcttcttcgaatttgcaattcaatatgaaaatcacctcggagctggtaaaaagaggcctaacccctgtctttagatttacagtccaatgcttcactcagccattttacctcacccccactgatgttcgccgaccgttgactattctctacaaaccacaaagacattggaacactatacctattattcggcgcatgagctggagtcctaggcacagctctaagcctccttattcgagccgagctgggccagccaggcaaccttctaggtaacgaccacatctacaacgttatcgtcacagcccatgcatttgtaataatcttcttcatagtaatacccatcataatcggaggctttggcaactgactagttcccctaataatcggtgcccccgatatggcgtttccccgcataaacaacataagcttctgactcttacctccctctctcctactcctgctcgcatctgctatagtggaggccggagcaggaacaggttgaacagtctaccctcccttagcagggaactactcccaccctggagcctccgtagacctaaccatcttctccttacacctagcaggtgtctcctctatcttaggggccatcaatttcatcacaacaattatcaatataaaaccccctgccataacccaataccaaacgcccctctttgtctgatccgtcctaatcacagcagtcctacttctcctatctctcccagtcctagctgctggcatcactatactactaacagaccgcaacctcaacaccaccttcttcgaccccgccggaggaggagaccccattctataccaacacctattctgatttttcggtcaccctgaagtttatattcttatcctaccaggcttcggaataatctcccatattgtaacttactactccggaaaaaaagaaccatttggatacataggtatggtctgagctatgatatcaattggcttcctagggtttatcgtgtgagcacaccatatatttacagtaggaatagacgtagacacacgagcatatttcacctccgctaccataatcatcgctatccccaccggcgtcaaagtatttagctgactcgccacactccacggaagcaatatgaaatgatctgctgcagtgctctgagccctaggattcatctttcttttcaccgtaggtggcctgactggcattgtattagcaaactcatcactagacatcgtactacacgacacgtactacgttgtagctcacttccactatgtcctatcaataggagctgtatttgccatcataggaggcttcattcactgatttcccctattctcaggctacaccctagaccaaacctacgccaaaatccatttcactatcatattcatcggcgtaaatctaactttcttcccacaacactttctcggcctatccggaatgccccgacgttactcggactaccccgatgcatacaccacatgaaacatcctatcatctgtaggctcattcatttctctaacagcagtaatattaataattttcatgatttgagaagccttcgcttcgaagcgaaaagtcctaatagtagaagaaccctccataaacctggagtgactatatggatgccccccaccctaccacacattcgaagaacccgtatacataaaatctagacaaaaaaggaaggaatcgaaccccccaaagctggtttcaagccaaccccatggcctccatgactttttcaaaaaggtattagaaaaaccatttcataactttgtcaaagttaaattataggctaaatcctatatatcttaatggcacatgcagcgcaagtaggtctacaagacgctacttcccctatcatagaagagcttatcacctttcatgatcacgccctcataaccattttccttatctgcttcctagtcctgtatgcccttttcctaacactcacaacaaaactaactaatactaacatctcagacgctcaggaaatagaaaccgtctgaactatcctgcccgccatcatcctagtcctcatcgccctcccatccctacgcatcctttacataacagacgaggtcaacgatccctcccttaccatcaaatcaattggccaccaatggtactgaacctacgagtacaccgactacggcggactaatcttcaactcctacatacttcccccattattcctagaaccaggcgacctgcgactccttgacgttgacaatcgagtagtactcccgattgaagcccccattcgtataataattacatcacaagacgtcttgcactcatgagctgtccccacattaggcttaaaaacagatgcaattcccggacgtctaaaccaaaccactttcaccgctacacgaccgggggtatactacggtcaatgctctgaaatctgtggagcaaaccacagtttcatgcccatcgtcctagaattaattcccctaaaaatctttgaaatagggcccgtatttaccctatagcaccccctctaccccctctagagcccactgtaaagctaacttagcattaaccttttaagttaaagattaagagaaccaacacctctttacagtgaaatgccccaactaaatactaccgtatggcccaccataattacccccatactccttacactattcctcatcacccaactaaaaatattaaacacaaactaccacctacctccctcaccaaagcccataaaaataaaaaattataacaaaccctgagaaccaaaatgaacgaaaatctgttcgcttcattcattgcccccacaatcctaggcctacccgccgcagtactgatcattctatttccccctctattgatccccacctccaaatatctcatcaacaaccgactaatcaccacccaacaatgactaatcaaactaacctcaaaacaaatgatagccatacacaacactaaaggacgaacctgatctcttatactagtatccttaatcatttttattgccacaactaacctcctcggactcctgcctcactcatttacaccaaccacccaactatctataaacctagccatggccatccccttatgagcgggcgcagtgattataggctttcgctctaagattaaaaatgccctagcccacttcttaccacaaggcacacctacaccccttatccccatactagttattatcgaaaccatcagcctactcattcaaccaatagccctggccgtacgcctaaccgctaacattactgcaggccacctactcatgcacctaattggaagcgccaccctagcaatatcaaccattaaccttccctctacacttatcatcttcacaattctaattctactgactatcctagaaatcgctgtcgccttaatccaagcctacgttttcacacttctagtaagcctctacctgcacgacaacacataatgacccaccaatcacatgcctatcatatagtaaaacccagcccatgacccctaacaggggccctctcagccctcctaatgacctccggcctagccatgtgatttcacttccactccataacgctcctcatactaggcctactaaccaacacactaaccatataccaatgatggcgcgatgtaacacgagaaagcacataccaaggccaccacacaccacctgtccaaaaaggccttcgatacgggataatcctatttattacctcagaagtttttttcttcgcaggatttttctgagccttttaccactccagcctagcccctaccccccaactaggagggcactggcccccaacaggcatcaccccgctaaatcccctagaagtcccactcctaaacacatccgtattactcgcatcaggagtatcaatcacctgagctcaccatagtctaatagaaaacaaccgaaaccaaataattcaagcactgcttattacaattttactgggtctctattttaccctcctacaagcctcagagtacttcgagtctcccttcaccatttccgacggcatctacggctcaacattttttgtagccacaggcttccacggactccacgtcattattggctcaactttcctcactatctgcttcatccgccaactaatatttcactttacatccaaacatcactttggcttcgaagccgccgcctgatactggcattttgtagatgtggtttgactatttctgtatgtctccatctattgatgagggtcttactcttttagtataaatagtaccgttaacttccaattaactagttttgacaacattcaaaaaagagtaataaacttcgccttaattttaataatcaacaccctcctagccttactactaataattattacattttgactaccacaactcaacggctacatagaaaaatccaccccttacgagtgcggcttcgaccctatatcccccgcccgcgtccctttctccataaaattcttcttagtagctattaccttcttattatttgatctagaaattgccctccttttacccctaccatgagccctacaaacaactaacctgccactaatagttatgtcatccctcttattaatcatcatcctagccctaagtctggcctatgagtgactacaaaaaggattagactgagctgaattggtatatagtttaaacaaaacgaatgatttcgactcattaaattatgataatcatatttaccaaatgcccctcatttacataaatattatactagcatttaccatctcacttctaggaatactagtatatcgctcacacctcatatcctccctactatgcctagaaggaataatactatcgctgttcattatagctactctcataaccctcaacacccactccctcttagccaatattgtgcctattgccatactagtctttgccgcctgcgaagcagcggtgggcctagccctactagtctcaatctccaacacatatggcctagactacgtacataacctaaacctactccaatgctaaaactaatcgtcccaacaattatattactaccactgacatgactttccaaaaaacacataatttgaatcaacacaaccacccacagcctaattattagcatcatccccctactattttttaaccaaatcaacaacaacctatttagctgttccccaaccttttcctccgaccccctaacaacccccctcctaatactaactacctgactcctacccctcacaatcatggcaagccaacgccacttatccagtgaaccactatcacgaaaaaaactctacctctctatactaatctccctacaaatctccttaattataacattcacagccacagaactaatcatattttatatcttcttcgaaaccacacttatccccaccttggctatcatcacccgatgaggcaaccagccagaacgcctgaacgcaggcacatacttcctattctacaccctagtaggctcccttcccctactcatcgcactaatttacactcacaacaccctaggctcactaaacattctactactcactctcactgcccaagaactatcaaactcctgagccaacaacttaatatgactagcttacacaatagcttttatagtaaagatacctctttacggactccacttatgactccctaaagcccatgtcgaagcccccatcgctgggtcaatagtacttgccgcagtactcttaaaactaggcggctatggtataatacgcctcacactcattctcaaccccctgacaaaacacatagcctaccccttccttgtactatccctatgaggcataattataacaagctccatctgcctacgacaaacagacctaaaatcgctcattgcatactcttcaatcagccacatagccctcgtagtaacagccattcttatccaaaccccctgaagcttcaccggcgcagtcattctcataatcgcccacggacttacatcctcattactattctgcctagcaaactcaaactacgaacgcactcacagtcgcatcataatcctctctcaaggacttcaaactctactcccactaatagctttttgatgacttctagcaagcctcgctaacctcgccttaccccccactattaacctactgggagaactctctgtgctagtaaccacgttctcctgatcaaatatcactctcctacttacaggactcaacatactagtcacagccctatactccctctacatatttaccacaacacaatggggctcactcacccaccacattaacaacataaaaccctcattcacacgagaaaacaccctcatgttcatacacctatcccccatcctcctcctatccctcaaccccgacatcattaccgggttttcctcttgtaaatatagtttaaccaaaacatcagattgtgaatctgacaacagaggcttacgaccccttatttaccgagaaagctcacaagaactgctaactcatgcccccatgtctaacaacatggctttctcaacttttaaaggataacagctatccattggtcttaggccccaaaaattttggtgcaactccaaataaaagtaataaccatgcacactactataaccaccctaaccctgacttccctaattccccccatccttaccaccctcgttaaccctaacaaaaaaaactcatacccccattatgtaaaatccattgtcgcatccacctttattatcagtctcttccccacaacaatattcatgtgcctagaccaagaagttattatctcgaactgacactgagccacaacccaaacaacccagctctccctaagcttcaaactagactacttctccataatattcatccctgtagcattgttcgttacatggtccatcatagaattctcactgtgatatataaactcagacccaaacattaatcagttcttcaaatatctactcattttcctaattaccatactaatcttagttaccgctaacaacctattccaactgttcatcggctgagagggcgtaggaattatatccttcttgctcatcagttgatgatacgcccgagcagatgccaacacagcagccattcaagcaatcctatacaaccgtatcggcgatatcggtttcatcctcgccttagcatgatttatcctacactccaactcatgagacccacaacaaatagcccttctaaacgctaatccaagcctcaccccactactaggcctcctcctagcagcagcaggcaaatcagcccaattaggtctccacccctgactcccctcagccatagaaggccccaccccagtctcagccctactccactcaagcactatagttgtagcaggaatcttcttactcatccgcttccaccccctagcagaaaatagcccactaatccaaactctaacactatgcttaggcgctatcaccactctgttcgcagcagtctgcgcccttacacaaaatgacatcaaaaaaatcgtagccttctccacttcaagtcaactaggactcataatagttacaatcggcatcaaccaaccacacctagcattcctgcacatctgtacccacgccttcttcaaagccatactatttatgtgctccgggtccatcatccacaaccttaacaatgaacaagatattcgaaaaataggaggactactcaaaaccatacctctcacttcaacctccctcaccattggcagcctagcattagcaggaatacctttcctcacaggtttctactccaaagaccacatcatcgaaaccgcaaacatatcatacacaaacgcctgagccctatctattactctcatcgctacctccctgacaagcgcctatagcactcgaataattcttctcaccctaacaggtcaacctcgcttccccacccttactaacattaacgaaaataaccccaccctactaaaccccattaaacgcctggcagccggaagcctattcgcaggatttctcattactaacaacatttcccccgcatcccccttccaaacaacaatccccctctacctaaaactcacagccctcgctgtcactttcctaggacttctaacagccctagacctcaactacctaaccaacaaacttaaaataaaatccccactatgcacattttatttctccaacatactcggattctaccctagcatcacacaccgcacaatcccctatctaggccttcttacgagccaaaacctgcccctactcctcctagacctaacctgactagaaaagctattacctaaaacaatttcacagcaccaaatctccacctccatcatcacctcaacccaaaaaggcataattaaactttacttcctctctttcttcttcccactcatcctaaccctactcctaatcacataacctattcccccgagcaatctcaattacaatatatacaccaacaaacaatgttcaaccagtaactactactaatcaacgcccataatcatacaaagcccccgcaccaataggatcctcccgaatcaaccctgacccctctccttcataaattattcagcttcctacactattaaagtttaccacaaccaccaccccatcatactctttcacccacagcaccaatcctacctccatcgctaaccccactaaaacactcaccaagacctcaacccctgacccccatgcctcaggatactcctcaatagccatcgctgtagtatatccaaagacaaccatcattccccctaaataaattaaaaaaactattaaacccatataacctcccccaaaattcagaataataacacacccgaccacaccgctaacaatcaatactaaacccccataaataggagaaggcttagaagaaaaccccacaaaccccattactaaacccacactcaacagaaacaaagcatacatcattattctcgcacggactacaaccacgaccaatgatatgaaaaaccatcgttgtatttcaactacaagaacaccaatgaccccaatacgcaaaattaaccccctaataaaactaattaaccactcattcatcgacctccccaccccatccaacatctccgcatgatgaaacttcggctcactccttggcgcctgcctgatcctccaaatcaccacaggactattcctagccatgcactactcaccagacgcctcaaccgccttttcatcaatcgcccacatcactcgagacgtaaattatggctgaatcatccgctaccttcacgccaatggcgcctcaatattctttatctgcctcttcctacacatcggacgaggcctatattacggatcatttctctactcagaaacctgaaacatcggcattatcctcctgcttgcaactatagcaacagccttcataggctatgtcctcccgtgaggccaaatatcattctgaggggccacagtaattacaaacttactatccgccatcccatacattgggacagacctagttcaatgagtctgaggaggctactcagtagacagtcccaccctcacacgattctttacctttcacttcatcttacccttcattattgcagccctagcagcactccacctcctattcttgcacgaaacgggatcaaacaaccccctaggaatcacctcccattccgataaaatcaccttccacccttactacacaatcaaagacgccctcggcttacttctcttccttctctccttaatgacattaacactattctcaccagacctcctaggcgacccagacaattataccctagccaaccccttaaacacccctccccacatcaagcccgaatgatatttcctattcgcctacacaattctccgatccgtccctaacaaactaggaggcgtccttgccctattactatccatcctcatcctagcaataatccccatcctccatatatccaaacaacaaagcataatatttcgcccactaagccaatcactttattgactcctagccgcagacctcctcattctaacctgaatcggaggacaaccagtaagctacccttttaccatcattggacaagtagcatccgtactatacttcacaacaatcctaatcctaataccaactatctccctaattgaaaacaaaatactcaaatgggcctgtccttgtagtataaactaatacaccagtcttgtaaaccggagatgaaaacctttttccaaggacaaatcagagaaaaagtctttaactccaccattagcacccaaagctaagattctaatttaaactattctctgttctttcatggggaagcagatttgggtaccacccaagtattgactcacccatcaacaaccgctatgtatttcgtacattactgccagccaccatgaatattgtacggtaccataaatacttgaccacctgtagtacataaaaacccaatccacatcaaaaccccccccccatgcttacaagcaagtacagcaatcaaccttcaactatcacacatcaactgcaactccaaagccacccctcacccactaggataccaacaaacctacccacccttaacagtacatagtacataaagccatttaccgtacatagcacattacagtcaaatcccttctcgcccccatggatgacccccctcagataggggtcccttgaccaccatcctccgtgaaatcaatatcccgcacaagagtgctactctcctcgctccgggcccataacacttgggggtagctaaagtgaactgtatccgacatctggttcctacttcagggccataaagcctaaatagcccacacgttccccttaaataagacatcacgatg

SEQ ID NO: 538 - DNA, 16563 bp, Homo sapiens mitochondrial
  3108: "n" refers to a nucleotide at position 3107 of the Cambridge Reference Sequence (CRS, Anderson et al. 1981 Nature 290:457-465), later determined to be absent from the human mtDNA sequence according to the revised CRS (rCRS, Andrews et al. 1999 Nature Genetics 23:147); "n" therefore represents a single nucleotide deletion at a position corresponding to nucleotide 3107 of SEQ ID NO:1 as provided herein.
gatcacaggtctatcaccctattaaccactcacgggagctctccatgcatttggtattttcgtctggggggtgtgcacgcgatagcattgcgagacgctggagccggagcaccctatgtcgcagtatctgtctttgattcctgcctcatcctattatttatcgcacctacgttcaatattacaggcgaacatacctactaaagtgtgttaattaattaatgcttgtaggacataataataacaattgaatgtctgcacagccgctttccacacagacatcataacaaaaaatttccaccaaaccccccctcccccgccttctggccacagcacttaaacacatctctgccaaaccccaaaaacaaagaaccctaacaccagcctaaccagatttcaaattttatcttttggcggtatgcacttttaacagtcaccccccaactaacacattattttcccctcccactcccatactactaatctcatcaatacaacccccgcccatcctacccagcacacacacaccgctgctaaccccataccccgaaccaaccaaaccccaaagacaccccccacagtttatgtagcttacctcctcaaagcaatacactgaaaatgtttagacgggctcacatcaccccataaacaaataggtttggtcctagcctttctattagctcttagtaagattacacatgcaagcatccccattccagtgagttcaccctctaaatcaccacgatcaaaagggacaagcatcaagcacgcagcaatgcagctcaaaacgcttagcctagccacacccccacgggaaacagcagtgattaacctttagcaataaacgaaagtttaactaagctatactaaccccagggttggtcaatttcgtgccagccaccgcggtcacacgattaacccaagtcaatagaagccggcgtaaagagtgttttagatcaccccctccccaataaagctaaaactcacctgagttgtaaaaaactccagttgacacaaaatagactacgaaagtggctttaacatatctgaacacacaatagctaagacccaaactgggattagataccccactatgcttagccctaaacctcaacagttaaatcaacaaaactgctcgccagaacactacgagccacagcttaaaactcaaaggacctggcggtgcttcatatccctctagaggagcctgttctgtaatcgataaaccccgatcaacctcaccacctcttgctcagcctatataccgccatcttcagcaaaccctgatgaaggctacaaagtaagcgcaagtacccacgtaaagacgttaggtcaaggtgtagcccatgaggtggcaagaaatgggctacattttctaccccagaaaactacgatagcccttatgaaacttaagggtcgaaggtggatttagcagtaaactgagagtagagtgcttagttgaacagggccctgaagcgcgtacacaccgcccgtcaccctcctcaagtatacttcaaaggacatttaactaaaacccctacgcatttatatagaggagacaagtcgtaacatggtaagtgtactggaaagtgcacttggacgaaccagagtgtagcttaacacaaagcacccaacttacacttaggagatttcaacttaacttgaccgctctgagctaaacctagccccaaacccactccaccttactaccagacaaccttagccaaaccatttacccaaataaagtataggcgatagaaattgaaacctggcgcaatagatatagtaccgcaagggaaagatgaaaaattataaccaagcataatatagcaaggactaacccctataccttctgcataatgaattaactagaaataactttgcaaggagaaccaaagctaagacccccgaaaccagacgagctacctaagaacagctaaaagagcacacccgtctatgtagcaaaatagtgggaagatttataggtagaggcgacaaacctaccgagcctggtgatagctggttgtccaagatagaatcttagttcaactttaaatttgcccacagaaccctctaaatccccttgtaaatttaactgttagtccaaagaggaacagctctttggacactaggaaaaaaccttgtagagagagtaaaaaatttaacacccatagtaggcctaaaagcagccaccaattaagaaagcgttcaagctcaacacccactacctaaaaaatcccaaacatataactgaactcctcacacccaattggaccaatctatcaccctatagaagaactaatgttagtataagtaacatgaaaacattctcctccgcataagcctgcgtcagattaaaacactgaactgacaattaacagcccaatatctacaatcaaccaacaagtcattattaccctcactgtcaacccaacacaggcatgctcataaggaaaggttaaaaaaagtaaaaggaactcggcaaatcttaccccgcctgtttaccaaaaacatcacctctagcatcaccagtattagaggcaccgcctgcccagtgacacatgtttaacggccgcggtaccctaaccgtgcaaaggtagcataatcacttgttccttaaatagggacctgtatgaatggctccacgagggttcagctgtctcttacttttaaccagtgaaattgacctgcccgtgaagaggcgggcatgacacagcaagacgagaagaccctatggagctttaatttattaatgcaaacagtacctaacaaacccacaggtcctaaactaccaaacctgcattaaaaatttcggttggggcgacctcggagcagaacccaacctccgagcagtacatgctaagacttcaccagtcaaagcgaactactatactcaattgatccaataacttgaccaacggaacaagttaccctagggataacagcgcaatcctattctagagtccatatcaacaatagggtttacgacctcgatgttggatcaggacatcccgatggtgcagccgctattaaaggttcgtttgttcaacgattaaagtcctacgtgatctgagttcagaccggagtaatccaggtcggtttctatctacnttcaaattcctccctgtacgaaaggacaagagaaataaggcctacttcacaaagcgccttcccccgtaaatgatatcatctcaacttagtattatacccacacccacccaagaacagggtttgttaagatggcagagcccggtaatcgcataaaacttaaaactttacagtcagaggttcaattcctcttcttaacaacatacccatggccaacctcctactcctcattgtacccattctaatcgcaatggcattcctaatgcttaccgaacgaaaaattctaggctatatacaactacgcaaaggccccaacgttgtaggcccctacgggctactacaacccttcgctgacgccataaaactcttcaccaaagagcccctaaaacccgccacatctaccatcaccctctacatcaccgccccgaccttagctctcaccatcgctcttctactatgaacccccctccccatacccaaccccctggtcaacctcaacctaggcctcctatttattctagccacctctagcctagccgtttactcaatcctctgatcagggtgagcatcaaactcaaactacgccctgatcggcgcactgcgagcagtagcccaaacaatctcatatgaagtcaccctagccatcattctactatcaacattactaataagtggctcctttaacctctccacccttatcacaacacaagaacacctctgattactcctgccatcatgacccttggccataatatgatttatctccacactagcagagaccaaccgaacccccttcgaccttgccgaaggggagtccgaactagtctcaggcttcaacatcgaatacgccgcaggccccttcgccctattcttcatagccgaatacacaaacattattataataaacaccctcaccactacaatcttcctaggaacaacatatgacgcactctcccctgaactctacacaacatattttgtcaccaagaccctacttctaacctccctgttcttatgaattcgaacagcatacccccgattccgctacgaccaactcatacacctcctatgaaaaaacttcctaccactcaccctagcattacttatatgacatgtctccatacccattacaatctccagcattccccctcaaacctaagaaatatgtctgataaaagagttactttgatagagtaaataataggagcttaaacccccttatttctaggactatgagaatcgaacccatccctgagaatccaaaattctccgtgccacctatcacaccccatcctaaagtaaggtcagctaaataagctatcgggcccataccccgaaaatgttggttatacccttcccgtactaattaatcccctggcccaacccgtcatctactctaccatctttgcaggcacactcatcacagcgctaagctcgcactgattttttacctgagtaggcctagaaataaacatgctagcttttattccagttctaaccaaaaaaataaaccctcgttccacagaagctgccatcaagtatttcctcacgcaagcaaccgcatccataatccttctaatagctatcctcttcaacaatatactctccggacaatgaaccataaccaatactaccaatcaatactcatcattaataatcataatggctatagcaataaaactaggaatagccccctttcacttctgagtcccagaggttacccaaggcacccctctgacatccggcctgcttcttctcacatgacaaaaactagcccccatctcaatcatataccaaatctctccctcactagacgtaagccttctcctcactctctcaatcttatccatcatagcaggcagttgaggtggattaaaccaaacccagctacgcaaaatcttagcatactcctcaattacccacataggatgaataatagcagttctaccgtacaaccctaacataaccattcttaatttaactatttatattatcctaactactaccgcattcctactactcaacttaaactccagcaccacgaccctactactatctcgcacctgaaacaagctaacatgactaacacccttaattccatccaccctcctctccctaggaggcctgcccccgctaaccggctttttgcccaaatgggccattatcgaagaactcacaaaaaacaatagcctcatcatccccaccatcatagccaccatcaccctccttaacctctacttctacctacgcctaatctactccacctcaatcacactactccccatatctaacaacgtaaaaataaaatgacagtttgaacacacaaaacccaccccattcctccccacactcatcgcccttaccacgctactcctacctatctccccttttatactaataatcttatagaaatttaggttaaatacagaccaagagccttcaaagccctcagtaagttgcaatacttaatttctgtaacagctaaggactgcaaaaccccactctgcatcaactgaacgcaaatcagccactttaattaagctaagcccttactagaccaatgggacttaaacccacaaacacttagttaacagctaagcaccctaatcaactggcttcaatctacttctcccgccgccgggaaaaaaggcgggagaagccccggcaggtttgaagctgcttcttcgaatttgcaattcaatatgaaaatcacctcggagctggtaaaaagaggcctaacccctgtctttagatttacagtccaatgcttcactcagccattttacctcacccccactgatgttcgccgaccgttgactattctctacaaaccacaaagacattggaacactatacctattattcggcgcatgagctggagtcctaggcacagctctaagcctccttattcgagccgagctgggccagccaggcaaccttctaggtaacgaccacatctacaacgttatcgtcacagcccatgcatttgtaataatcttcttcatagtaatacccatcataatcggaggctttggcaactgactagttcccctaataatcggtgcccccgatatggcgtttccccgcataaacaacataagcttctgactcttacctccctctctcctactcctgctcgcatctgctatagtggaggccggagcaggaacaggttgaacagtctaccctcccttagcagggaactactcccaccctggagcctccgtagacctaaccatcttctccttacacctagcaggtgtctcctctatcttaggggccatcaatttcatcacaacaattatcaatataaaaccccctgccataacccaataccaaacgcccctcttcgtctgatccgtcctaatcacagcagtcctacttatcctatctctcccagtcctagctgctggcatcactatactactaacagaccgcaacctcaacaccaccttcttcgaccccgccggaggaggagaccccattctataccaacacctattctgatttttcggtcaccctgaagtttatattcttatcctaccaggcttcggaataatctcccatattgtaacttactactccggaaaaaaagaaccatttggatacataggtatggtctgagctatgatatcaattggcttcctagggtttatcgtgtgagcacaccatatatttacagtaggaatagacgtagacacacgagcatatttcacctccgctaccataatcatcgctatccccaccggcgtcaaagtatttagctgactcgccacactccacggaagcaatatgaaatgatctgctgcagtgctctgagccctaggattcatctttcttttcaccgtaggtggcctgactggcattgtattagcaaactcatcactagacatcgtactacacgacacgtactacgttgtagctcacttccactatgtcctatcaataggagctgtatttgccatcataggaggcttcattcactgatttcccctattctcaggctacaccctagaccaaacctacgccaaaatccatttcactatcatattcatcggcgtaaatctaactttcttcccacaacactttctcggcctatccggaatgccccgacgttactcggactaccccgatgcatacaccacatgaaacatcctatcatctgtaggctcattcatttctctaacagcagtaatattaataattttcatgatttgagaagccttcgcttcgaagcgaaaagtcctaatagtagaagaaccctccataaacctggagtgactatatggatgccccccaccctaccacacattcgaagaacccgtatacataaaatctagacaaaaaaggaaggaatcgaaccccccaaagctggtttcaagccaaccccatggcctccatgactttttcaaaaaggtattagaaaaaccatttcataactttgtcaaagttaaattataggctaaatcctatatatcttaatggcacatgcagcgcaagtaggtctacaagacgctacttcccctatcatagaagagcttatcacctttcatgatcacgccctcataatcattttccttatctgcttcctagtcctgtatgcccttttcctaacactcacaacaaaactaactaatactaacatctcagacgctcaggaaatagaaaccgtctgaactatcctgcccgccatcatcctagtcctcatcgccctcccatccctacgcatcctttacataacagacgaggtcaacgatccctcccttaccatcaaatcaattggccaccaatggtactgaacctacgagtacaccgactacggcggactaatcttcaactcctacatacttcccccattattcctagaaccaggcgacctgcgactccttgacgttgacaatcgagtagtactcccgattgaagcccccattcgtataataattacatcacaagacgtcttgcactcatgagctgtccccacattaggcttaaaaacagatgcaattcccggacgtctaaaccaaaccactttcaccgctacacgaccgggggtatactacggtcaatgctctgaaatctgtggagcaaaccacagtttcatgcccatcgtcctagaattaattcccctaaaaatctttgaaatagggcccgtatttaccctatagtacccctcctctagagcccactgtaaagctaacttagcattaaccttttaagttaaagattaagagaaccaacacctctttacagtgaaatgccccaactaaatactaccgtatggcccaccataattacccccatactccttacactattcctcatcacccaactaaaaatattaaacacaaactaccacctacctccctcaccaaagcccataaaaataaaaaattataacaaaccctgagaaccaaaatgaacgaaaatctgttcgcttcattcattgcccccacaatcctaggcctacccgccgcagtactgatcattctatttccccctctattgatccccacctccaaatatctcatcaacaaccgactaatcaccacccaacaatgactaatcaaactaacctcaaaacaaataataaccatacacaacactaaaggacgaacctgatctcttatactagtatccttaatcatttttattgccacaactaacctcctcggactcctgcctcactcatttacaccaaccacccaactatctataaacctagccatggccatccccttatgagcgggcgcagtgattataggctttcgctctaagattaaaaatgccctagcccacttcttaccacaaggcacacctacaccccttatccccatactagttattatcgaaaccatcagcctactcattcaaccaatagccctggccgtacgcctaaccgctaacattactgcaggccacctactcatgcacctaattggaagcgccaccctagcaatatcaaccattaaccttccctctacacttatcatcttcacaattctaattctactgactatcctagaaatcgctgtcgccttaatccaagcctacgttttcacacttctagtaagcctctacctgcacgacaacacataatgacccaccaatcacatgcctatcatatagtaaaacccagcccatgacccctaacaggggccctctcagccctcctaatgacctccggcctagccatgtgatttcacttccactccataacgctcctcatactaggcctactaaccaacacactaaccatataccaatgatggcgcgatgtaacacgagaaagcacataccaaggccaccacacaccacctgtccaaaaaggccttcgatacgggataatcctatttattacctcagaagtttttttcttcgcaggatttttctgagccttttaccactccagcctagcccctaccccccaattaggagggcactggcccccaacaggcatcaccccgctaaatcccctagaagtcccactcctaaacacatccgtattactcgcatcaggagtatcaatcacctgagctcaccatagtctaatagaaaacaaccgaaaccaaataattcaagcactgcttattacaattttactgggtctctattttaccctcctacaagcctcagagtacttcgagtctcccttcaccatttccgacggcatctacggctcaacattttttgtagccacaggcttccacggacttcacgtcattattggctcaactttcctcactatctgcttcatccgccaactaatatttcactttacatccaaacatcactttggcttcgaagccgccgcctgatactggcattttgtagatgtggtttgactatttctgtatgtctccatctattgatgagggtcttactcttttagtataaatagtaccgttaacttccaattaactagttttgacaacattcaaaaaagagtaataaacttcgccttaattttaataatcaacaccctcctagccttactactaataattattacattttgactaccacaactcaacggctacatagaaaaatccaccccttacgagtgcggcttcgaccctatatcccccgcccgcgtccctttctccataaaattcttcttagtagctattaccttcttattatttgatctagaaattgccctccttttacccctaccatgagccctacaaacaactaacctgccactaatagttatgtcatccctcttattaatcatcatcctagccctaagtctggcctatgagtgactacaaaaaggattagactgaaccgaattggtatatagtttaaacaaaacgaatgatttcgactcattaaattatgataatcatatctaccaaatgcccctcatttacataaatattatactagcatttaccatctcacttctaggaatactagtatatcgctcacacctcatatcctccctactatgcctagaaggaataatactatcgctgttcattatagctactctcataaccctcaacacccactccctcttagccaatattgtgcctattgccatactagtctttgccgcctgcgaagcagcggtgggcctagccctactagtctcaatctccaacacatatggcctagactacgtacataacctaaacctactccaatgctaaaactaatcgtcccaacaattatattactaccactgacatgactttccaaaaaacacataatttgaatcaacacaaccacccacagcctaattattagcatcatccctctactattttttaaccaaatcaacaacaacctatttagctgttccccaaccttttcctccgaccccctaacaacccccctcctaatactaactacctgactcctacccctcacaatcatggcaagccaacgccacttatccagtgaaccactatcacgaaaaaaactctacctctctatactaatctccctacaaatctccttaattataacattcacagccacagaactaatcatattttatatcttcttcgaaaccacacttatccccaccttggctatcatcacccgatgaggcaaccagccagaacgcctgaacgcaggcacatacttcctattctacaccctagtaggctcccttcccctactcatcgcactgatttacactcacaacaccctaggctcactaaacattctactactcactctcactgcccaagaactatcaaactcctgagccaacaacttaatatgactagcttacacaatagcttttatagtaaagatacctctttacggactccacttatgactccctaaagcccatgtcgaagcccccatcgctgggtcaatagtacttgccgcagtactcttaaaactaggcggctatggtataatacgcctcacactcattctcaaccccctgacaaaacacatagcctaccccttccttgtactatccctatgaggcataattataacaagctccatctgcctacgacaaacagacctaaaatcgctcattgcatactcttcaatcagccacatagccctcgtagtaacagccattctcatccaaaccccctgaagcttcaccggcgcagtcattctcataatcgcccacggacttacatcctcattactattctgcctagcaaactcaaactacgaacgcactcacagtcgcatcataatcctctctcaaggacttcaaactctgctcccactaatagctttttgatgacttctagcaagcctcgctaacctcgccttaccccccactattaacctactgggagaactctctgtgctagtaaccacattctcctgatcaaatatcactctcctacttacaggactcaacatactagtcacagccctatactccctctacatatttaccacaacacaatggggctcactcacccaccacattaacaacataaaaccctcattcacacgagaaaacaccctcatgttcatacacctatcccccattctcctcctatccctcaaccccgacatcattaccgggttttcctcttgtaaatatagtttaaccaaaacatcagattgtgaatctgacaacagaggcttacgaccccttatttaccgagaaagctcacaagaactgctaactcatgcccccatgtctaacaacatggctttctcaacttttaaaggataacagctatccattggtcttaggccccaaaaattttggtgcaactccaaataaaagtaataaccatgcacactactataaccaccctaaccctgacttccctaattccccccatccttaccaccctcgttaaccctaacaaaaaaaactcatacccccattatgtaaaatccattgtcgcatccacctttattatcagtctcttccccacaacaatattcatgtgcctagaccaagaagttattatctcgaactgacactgagccacaacccaaacaacccagctctccctaagcttcaaactagactacttctccataatattcatccctgtagcattgttcgttacatggtccatcatagaattctcactgtgatatataaactcagacccaaacattaatcagttcttcaaatatctactcatcttcctaattaccatactaatcttagttaccgctaacaacctattccaactgttcatcggctgagagggcgtaggaattatatccttcttgctcatcagttgatgatacgcccgagcagatgccaacacagcagccattcaagcaatcctatacaaccgtatcggcgatatcggtttcatcctcgccttagcatgatttatcctacactccaactcatgagacccacaacaaatagcccttctaaacgctaatccaagcctcaccccactactaggcctcctcctagcagcagcaggcaaatcagcccaattaggtctccacccctgactcccctcagccatagaaggccccaccccagtctcagccctactccactcaagcactatagttgtagcaggaatcttcttactcatccgcttccaccccctagcagaaaatagcccactaatccaaactctaacactatgcttaggcgctatcaccactctgttcgcagcagtctgcgcccttacacaaaatgacatcaaaaaaatcgtagccttctccacttcaagtcaactaggactcataatagttacaatcggcatcaaccaaccacacctagcattcctgcacatctgtacccacgccttcttcaaagccatactatttatgtgctccggatccatcatccacaaccttaacaatgaacaagatattcgaaaaataggaggactactcaaaaccatacctctcacttcaacctccctcaccattggcagcctagcattagcaggaatacctttcctcacaggtttctactccaaagaccacatcatcgaaaccgcaaacatatcatacacaaacgcctgagccctatctattactctcatcgctacctccctgacaagcgcctatagcactcgaataattcttctcaccctaacaggtcaacctcgcttccccacccttactaacattaacgaaaataaccccaccctactaaaccccattaaacgcctggcagccggaagcctattcgcaggatttctcattactaacaacatttcccccgcatcccccttccaaacaacaatccccctctacctaaaactcacagccctcgctgtcactttcctaggacttctaacagccctagacctcaactacctaaccaacaaacttaaaataaaatccccactatgcacattttatttctccaacatactcggattctaccctagcatcacacaccgcacaatcccctatctaggccttcttacgagccaaaacctgcccctactcctcctagacctaacctgactagaaaagctattacctaaaacaatttcacagcaccaaatctccacctccatcatcacctcaacccaaaaaggcataattaaactttacttcctctctttcttcttcccactcatcctaaccctactcctaatcacataacctattcccccgagcaatctcaattacaatatatacaccaacaaacaatgttcaaccagtaactactactaatcaacgcccatagtcatacaaagcccccgcaccaataggatcctcccgaatcaaccctgacccctctccttcataaattattcagcttcctacactattaaagtttaccacaaccaccaccccatcatactctttcacccacagcaccaatcctacctccatcgctaaccccactaaaacactcaccaagacctcaacccctgacccccatgcctcaggatactcctcaatagccatcgctgtagtatatccaaagacaaccatcattccccctaaataaattaaaaaaactattaaacccatataacctcccccaaaattcagaataataacacacccgaccacaccgctaacaatcaatactaaacccccataaataggagaaggcttagaagaaaaccccacaaaccccattactaaacccacactcaacagaaacaaagcatacatcattattctcgcacggactacaaccacgaccaatgatatgaaaaaccatcgttgtatttcaactacaagaacaccaatgaccccaatacgcaaaattaaccccctaataaaattaattaaccactcattcatcgacctccccaccccatccaacatctccgcatgatgaaacttcggctcactccttggcgcctgcctgatcctccaaatcaccacaggactattcctagccatacactactcaccagacgcctcaaccgccttttcatcaatcgcccacatcactcgagacgtaaattatggctgaatcatccgctaccttcacgccaatggcgcctcaatattctttatctgcctattcctacacatcggacgaggcctatattacggatcatttctctactcagaaacctgaaacatcggcattatcctcctgcttgcaactatagcaacagccttcataggctatgtcctcccgtgaggccaaatatcattctgaggggccacagtaattacaaacttactatccgccatcccatacattgggacagacctagttcaatgaatctgaggaggctactcagtagacagtcccaccctcacacgattctttacctttcacttcatcttgcccttcattattgcagccctagcagcactccacctcctattcttgcacgaaacgggatcaaacaaccccctaggaatcacctcccattccgataaaatcaccttccacccttactacacaatcaaagacgccctcggcttacttctcttcattctctccttaatgacattaacactattctcaccagacctcctaggcgacccagacaattataccctagccaaccccttaaacacccctccccacatcaagcccgaatgatatttcctattcgcctacacaattctccgatccgtccctaacaagctaggaggcgtccttgccctattactatccatcctcatcctagcaataatccccatcctccatatatccaaacaacaaagcataatatttcgcccactaagccaatcactttattgactcctagccgcagacctcctcattctaacctgaatcggaggacaaccagtaagctacccttttaccatcattggacaagtagcatccgtactatacttcacaacaatcctaatcctaataccaactatctccctaattgaaaacaaaatactcaaatgggcctgtccttgtagtataaactaatacaccagtcttgtaaaccgaagatgaaaacctttttccaaggacaaatcagagaaaaagtctttaactccaccattagcacccaaagctaagattctaatttaaactattctctgttctttcatggggaagcagatttgggtaccacccaagtattgactcacccatcaacaaccgctatgtatttcgtacattactgccagccaccatgaatattgcacggtaccataaatacttgaccacctgtagtacataaaaacccaatccacatcaaccccccccccccatgcttacaagcaagtacagcaatcaaccctcaactatcacacatcaactgcaactccaaagccacccctcacccactaggataccaacaaacctacccatcttcaacagtacatagtacataaagccatttaccgtacatagcacattacagtcaaatcccttctcgtccccatggatgacccccctcagataggggtcccttgaccaccatcctccgtgaaatcaatatcccgcacaagagtgctactctcctcgctccgggcccataacacttgggggtagctaaagtgaactgtatccgacatctggttcctacttcagggccataaagtctaaatagcccacacgttccccttaaataagacatcacgatg

SEQ ID NO: 539 - DNA, 16572 bp, Homo sapiens mitochondrial
  3110: "n" refers to a nucleotide at position 3107 of the Cambridge Reference Sequence (CRS, Anderson et al. 1981 Nature 290:457-465), later determined to be absent from the human mtDNA sequence according to the revised CRS (rCRS, Andrews et al. 1999 Nature Genetics 23:147); "n" therefore represents a single nucleotide deletion at a position corresponding to nucleotide 3107 of SEQ ID NO:1 as provided herein.
gatcacaggtctatcaccctattaaccactcacgggagctctccatgcatttggtattttcgtctggggggtgtgcacgcgatagcattgcgagacgctggagccggagcaccctatgtcgcagtatctgtctttgattcctgcctcatcccattatttatcgcacctacgttcaatattacaggcgaacatacttactaaagtgtgttaattaatcaatgcttgtaggacataataataacaattgaatgtctgcacagccgctttccacacagacatcataacaaaaaatttccaccaaaccccccctcccccccgcttctggccacagcacttaaacatatctctgccaaaccccaaaaacaaagaaccctaacaccagcctaaccagatttcaaattttatcttttggcggtatgcacttttaacagtcaccccccaactaacacattattttcccctcccactcccatactactaatctcatcaatacaacccccgcccatcctgcccagcacacacacaccagctgctaaccccataccccgaaccaaccaaaccccaaagacaccccccacagtttatgtagcttacctcctcaaagcaatacactgaaaatgtttagacgggctcacatcaccccataaacaaataggtttggtcctagcctttctattagctcttagtaagattacacatgcaagcatccccgttccagtgagttcaccctctaaatcaccacgatcaaaagggacaagcatcaagcacgcagcaatgcagctcaaaacgcttagcctagccacacccccacgggaaacagcagtgattaacctttagcaataaacgaaagtttaactaagctatactaaccccagggttggtcaatttcgtgccagccaccgcggtcacacgattaacccaagtcaatagaagccggcgtaaagagtgttttagatcaccccctccccaataaagctaaaactcacctgagttgtaaaaaactccagttgacacaaaatagactacgaaagtggctttaacatatctgaacacacaatagctaagacccaaactgggattagataccccactatgcttagccctaaacctcaacagttaaatcaacaaaactgctcgccagaacactacgagccacagcttaaaactcaaaggacctggcggtgcttcatatccctctagaggagcctgttctgtaatcgataaaccccgatcaacctcaccacctcttgctcagcctatataccgccatcttcagcaaaccctgatgaaggctacaaagtaagcgcaagtacccacgtaaagacgttaggtcaaggtgtagcccatgaggtggcaagaaatgggctacattttctaccccagaaaactacgatagcccttatgaaacttaagggtcgaaggtggatttagcagtaaactgagagtagagtgcttagttgaacagggccctgaagcgcgtacacaccgcccgtcaccctcctcaagtatacttcaaaggacatttaactaaaacccctacgcatttatatagaggagacaagtcgtaacatggtaagtgtactggaaagtgcacttggacgaaccagagtgtagcttaacacaaagcacccaacttacacttaggagatttcaacttaacttgaccgctctgagctaaacctagccccaaacccactccaccttactaccagacaaccttagccaaaccatttacccaaataaagtataggcgatagaaattgaaacctggcgcaatagatatagtaccgcaagggaaagatgaaaaattatagccaagcataatatagcaaggactaacccctataccttctgcataatgaattaactagaaataactttgcaaggagagccaaagctaagacccccgaaaccagacgagctacctaagaacagctaaaagagcacacccgtctatgtagcaaaatagtgggaagatttataggtagaggcgacaaacctaccgagcctggtgatagctggttgtccaagatagaatcttagttcaactttaaatttgcccacagaaccctctaaatccccttgtaaatttaactgttagtccaaagaggaacagctctttggacactaggaaaaaaccttgtagagagagtaaaaaatctaacacccatagtaggcctaaaagcagccaccaattaagaaagcgttcaagctcaacacccactacctaaaaaatcccaaacatataactgaactcctcacacccaattggaccaatctatcaccctatagaagaactaatgttagtataagtaacatgaaaacattctcctccgcataagcctgcgtcagattaaaacactgaactgacaattaacagcccaatatctacaatcaaccaacaagtcattattaccctcactgtcaacccaacacaggcatgctcataaggaaaggttaaaaaaagtaaaaggaactcggcaaatcttaccccgcctgtttaccaaaaacatcacctctagcatcaccagtattagaggcaccgcctgcccagtgacacatgtttaacggccgcggtaccctaaccgtgcaaaggtagcataatcacttgttccttaaatagggacctgtatgaatggctccacgagggttcagctgtctcttacttttaaccagtgaaattgacctgcccgtgaagaggcgggcatgacacagcaagacgagaagaccctatggagctttaatttattaatgcaaacagtacctaacaaacccacaggtcctaaactaccaaacctgcattaaaaatttcggttggggcgacctcggagcagaacccaacctccgagcagtacatgctaagacttcaccagtcaaagcgaactactatactcaattgatccaataacttgaccaacggaacaagttaccctagggataacagcgcaatcctattctagagtccatatcaacaatagggtttacgacctcgatgttggatcaggacatcccgatggtgcagccgctattaaaggttcgtttgttcaacgattaaagtcctacgtgatctgagttcagaccggagtaatccaggtcggtttctatctacnttcaaatttctccctgtacgaaaggacaagagaaataaggcctacttcacaaagcgccttcccccgtaaatgatatcatctcaacttagtattatacccacacccacccaagaacagggtttgttaagatggcagagcccggtaatcgcataaaacttaaaactttacagtcagaggttcaattcctcttcttaacaacatacccatggccaacctcctactcctcattgtacccattctaatcgcaatggcattcctaatgcttaccgaacgaaaaattctaggctatatacaactacgcaaaggccccaacgttgtaggcccctacgggctactacaacccttcgctgacgccataaaactcttcaccaaagagcccctaaaacccgccacatctaccatcaccctctacatcaccgccccgaccttagctctcaccatcgctcttctactatgaacccccctccccatacccaaccccctggtcaacctcaacctaggcctcctatttattctagccacctctagcctagccgtttactcaatcctctgatcagggtgagcatcaaactcaaactacgccctgatcggcgcactgcgagcagtagcccagacaatctcatatgaagtcaccctagccatcattctactatcaacattactaataagtggctcctttaacctctccacccttatcacaacacaagaacacctctgattactcctgccatcatgacccttggccataatatgatttatctccacactagcagagaccaaccgaacccccttcgaccttgccgaaggggagtccgaactagtctcaggcttcaacatcgaatacgccgcaggccccttcgccctattcttcatagccgaatacacaaacattattataataaacaccctcaccactacaatcttcctaggaacaacatatgacgcactctcccctgaactctacacaacatattttgtcaccaagaccctacttctaacctccctgttcttatgaattcgaacagcatacccccgattccgctacgaccaactcatacacctcctatgaaaaaacttcctaccactcaccctagcattacttatatgatatgtctccatacccattacaatctccagcattccccctcaaacctaagaaatatgtctgataaaagagttactttgatagagtaaataataggagcttaaacccccttatttctaggactatgagaatcgaacccatccctgagaatccaaaattctccgtgccacctatcacaccccatcctaaagtaaggtcagctaaataagctatcgggcccataccccgaaaatgttggttatacccttcccgtactaattaatcccctggcccaacccgtcatctactctaccatctttgcaggcacactcatcacagcgctaagctcgcactgattttttacctgagtaggcctagaaataaacatgctagcttttattccagttctaaccaaaaaaataaaccctcgttccacagaagctgccatcaagtatttcctcacgcaagcaaccgcatccataatccttctaatagctatcctcttcaacaatatactctccggacaatgaaccataaccaatactaccaatcaatactcatcattaataatcataatggctatagcaataaaactaggaatagccccctttcacttctgagtcccagaggttacccaaggcacccctctgacatccggcctgcttcttctcacatgacaaaaactagcccccatctcaatcatataccaaatctctccctcactaaacgtaagccttctcctcactctctcaatcttatccatcatagcaggcagttgaggtggattaaaccaaacccagctacgcaaaatcttagcatactcctcaattacccacataggatgaataatagcagttctaccgtacaaccctaacataaccattcttaatttaactatttatattatcctaactactaccgcattcctactactcaacttaaactccagcaccacgaccctactactatctcgcacctgaaacaagctaacatgactaacacccttaattccatccaccctcctctccctaggaggcctgcccccgctaaccggctttttgcccaaatgggccattatcgaagaattcacaaaaaacaatagcctcatcatccccaccatcatagccaccatcaccctccttaacctctacttctacctacgcctaatctactccacctcaatcacactactccccatgtctaacaacgtaaaaataaaatgacagtttgaacacacaaaacccaccccattcctccccacactcatcgcccttaccacgctactcctacctatctccccttttatactaataatcttatagaaatttaggttaaatacagaccaagagccttcaaagccctcagtaagttgcaatacttaatttctgtgacagctaaggactgcaaaaccccactctgcatcaactgaacgcaaatcagccactttaattaagctaagcccttactagaccaatgggacttaaacccacaaacacttagttaacagctaagcaccctaatcaactggcttcaatctacttctcccgccgccgggaaaaaaggcgggagaagccccggcaggtttgaagctgcttcttcgaatttgcaattcaatatgaaaatcacctcggagctggtaaaaagaggcctaacccctgtctttagatttacagtccaatgcttcactcagccattttacctcacccccactgatgttcgccgaccgttgactattctctacaaaccacaaagacattggaacactatacctattattcggcgcatgagctggagtcctaggcacagctctaagcctccttattcgagccgagctgggccagccaggcaaccttttaggtaacgaccacatctacaacgttatcgtcacagcccatgcatttgtaataatcttcttcatagtaatacccatcataatcggaggctttggcaactgactagtccccctaataatcggtgcccccgatatggcgtttccccgcataaacaacataagcttctgactcttacctccctctctcctactcctgctcgcatctgctatagtggaggccggagcaggaacaggttgaacagtctaccctcccttagcagggaactactcccaccctggagcctccgtagacctaaccatcttctccttacacctagcaggtgtctcctctatcttaggggccatcaatttcatcacaacaattatcaatataaaaccccctgccataacccaataccaaacgcccctcttcgtctgatccgtcctaatcacagcagtcctacttctcctatctctcccagtcctagctgctggcatcactatactactaacagaccgcaacctcaacaccaccttcttcgaccccgccggaggaggagaccccattctataccaacacctattctgatttttcggtcaccctgaagtttatattcttatcctaccaggcttcggaataatctcccatattgtaacttactactccggaaaaaaagaaccatttggatacataggtatggtctgagctatgatatcaattggcttcctagggtttatcgtgtgagcacaccatatatttacagtaggaatagacgtagacacacgagcatatttcacctccgctaccataatcatcgctatccccaccggcgtcaaagtatttagctgactcgccacactccacggaagcaatatgaaatgatctgctgcagtgctctgagccctaggattcatctttcttttcaccgtaggtggcctgactggcattgtattagcaaactcatcactagacatcgtactacacgacacgtactacgttgtagctcacttccactatgtcctatcaataggagctgtatttgccatcataggaggcttcattcactgatttcccctattctcaggctacaccctagaccaaacctacgccaaaatccatttcactatcatattcatcggcgtaaatctaactttcttcccacaacactttctcggcctatccggaatgccccgacgttactcggactaccccgatgcatacaccacatgaaacatcctatcatctgtaggctcattcatttctctaacagcagtaatattaataattttcatgatttgagaagccttcgcttcgaagcgaaaagtcctaatagtagaagaaccctccataaacctggagtgactatatggatgccccccaccctaccacacattcgaagaacccgtatacataaaatctagacaaaaaaggaaggaatcgaaccccccaaagctggtttcaagccaaccccatggcctccatgactttttcaaaaaggtattagaaaaaccatttcataactttgtcaaagttaaattataggctaaatcctatatatcttaatggcacatgcagcgcaagtaggtctacaagacgctacttcccctatcatagaagagcttatcacctttcatgatcacgccctcataatcattttccttatctgcttcctagtcctgtatgcccttttcctaacactcacaacaaaactaactaatactaacatctcagacgctcaggaaatagaaaccgtctgaactatcctgcccgccatcatcctagtcctcatcgccctcccatccctacgcatcctttacataacagacgaggtcaacgatccctcccttaccatcaaatcaattggccaccaatggtactgaacctacgagtacaccgactacggcggactaatcttcaactcctacatacttcccccattattcctagaaccaggcgacctgcgactccttgacgttgacaatcgagtagtactcccgattgaagcccccattcgtataataattacatcacaagacgtcttgcactcatgagctgtccccacattaggcttaaaaacagatgcaattcccggacgtctaaaccaaaccactttcaccgctacacgaccgggggtatactacggtcaatgctctgaaatctgtggagcaaaccacagtttcatgcccatcgtcctagaattaattcccctaaaaatctttgaaatagggcccgtatttaccctatagcaccccctctaccccctctagagcccactgtaaagctaacttagcattaaccttttaagttaaagattaagagaaccaacacctctttacagtgaaatgccccaactaaatactaccgtatggcccaccataattacccccatactccttacactattcctcatcacccaactaaaaatattaaacacaaactaccacctacctccctcaccaaagcccataaaaataaaaaattataacaaaccctgagaaccaaaatgaacgaaaatctgttcgcttcattcattgcccccacaatcctaggcctacccgccgcagtactgatcattctatttccccctctattgatccccacctccaaatatctcatcaacaaccgactaatcaccacccaacaatgactaatcaaactaacctcaaaacaaatgataaccatacacaacactaaaggacgaacctgatctcttatactagtatccttaatcatttttattgccacaactaacctcctcggactcctgcctcactcatttacaccaaccacccaactatctataaacctagccatggccatccccttatgagcgggcgcagtgattataggctttcgctctaagattaaaaatgccctagcccacttcttaccacaaggcacacctacaccccttatccccatactagttattatcgaaaccatcagcctactcattcaaccaatagccctggccgtacgcctaaccgctaacattactgcaggccacctactcatgcacctaattggaagcgccaccctagcaatatcaaccattaaccttccctctacacttatcatcttcacaattctaattctactgactatcctagaaatcgctgtcgccttaatccaagcctacgttttcacacttctagtaagcctctacctgcacgacaacacataatgacccaccaatcacatgcctatcatatagtaaaacccagcccatgacccctaacaggggccctctcagccctcctaatgacctccggcctagccatgtgatttcacttccactccataacgctcctcatactaggcctactaaccaacacactaaccatataccaatgatggcgcgatgtaacacgagaaagcacataccaaggccaccacacaccacctgtccaaaaaggccttcgatacgggataatcctatttattacctcagaagtttttttcttcgcaggatttttctgagccttttaccactccagcctagcccctaccccccaattaggagggcactggcccccaacaggcatcaccccgctaaatcccctagaagtcccactcctaaacacatccgtattactcgcatcaggagtatcaatcacctgagctcaccatagtctaatagaaaacaaccgaaaccaaataattcaagcactgcttattacaattttactgggtctctattttaccctcctacaagcctcagagtacttcgagtctcccttcaccatttccgacggcatctacggctcaacattttttgtagccacaggcttccacggacttcacgtcattattggctcaactttcctcactatctgcttcatccgccaactaatatttcactttacatccaaacatcactttggcttcgaagccgccgcctgatactggcattttgtagatgtggtttgactatttctgtatgtctccatctattgatgagggtcttactcttttagtataaatagtaccgttaacttccaattaactagttttgacaacattcaaaaaagagtaataaacttcgccttaattttaataatcaacaccctcctagccttactactaataattattacattttgactaccacaactcaacggctacatagaaaaatccaccccttacgagtgcggcttcgaccctatatcccccgcccgcgtccctttctccataaaattcttcttagtagctattaccttcttattatttgatctagaaattgccctccttttacccctaccatgagccctacaaacaactaacctgccactaatagttatgtcatccctcttattaatcatcatcctagccctaagtctggcctatgagtgactacaaaaaggattagactgaaccgaattggtatatagtttaaacaaaacgaatgatttcgactcattaaattatgataatcatatttaccaaatgcccctcatttacataaatattatactagcatttaccatctcacttctaggaatactagtatatcgctcacacctcatatcctccctactatgcctagaaggaataatactatcgctgttcattatagctactctcataaccctcaacacccactccctcttagccaatattgtgcctattgccatactagtctttgccgcctgcgaagcagcggtgggcctagccctactagtctcaatctccaacacatatggcctagactacgtacataacctaaacctactccaatgctaaaactaatcgtcccaacaattatattactaccactgacatgactttccaaaaaacacataatttgaatcaacacaaccacccacagcctaattattagcatcatccctctgctattttttaaccaaatcaacaacaacctatttagctgttccccaaccttttcctccgaccccctaacaacccccctcctaatactaactacctgactcctacccctcacaatcatggcaagccaacgccacttatccagtgaaccactatcacgaaaaaaactctacctctctatactaatctccctacaaatctccttaattataacattcacagccacagaactaatcatattttatatcttcttcgaaaccacacttatccccaccttggctatcatcacccgatgaggcaaccagccagaacgcctgaacgcaggtacatacttcctattctacaccctagtaggctcccttcccctactcatcgcactaatttacactcacaacaccctaggctcactaaacattctactactcactctcactgcccaagaactatcaaactcctgagccaacaacttaatatgactagcttacacaatagcttttatagtaaagatacctctttacggactccacttatgactccctaaagcccatgtcgaagcccccatcgctgggtcaatagtacttgccgcagtactcttgaaactaggcggctatggtataatacgcctcacactcattctcaaccccctgacaaaacacatagcctaccccttccttgtactatccctatgaggcataattataacaagctccatctgcctacgacaaacagacctaaaatcgctcattgcatactcttcaatcagccacatagccctcgtagtaacagccattctcatccaaaccccctgaagcttcaccggcgcagtcattctcataatcgcccacggacttacatcctcactactattctgcctagcaaactcaaactacgaacgcactcacagtcgcatcataatcctctctcaaggacttcaaactctactcccactaatagctttttgatgacttctagcaagcctcgctaacctcgccttaccccccactattaacctactgggagaactctctgtgctagtaaccacgttctcctgatcaaatatcactctcctacttacaggactcaacatactagtcacagccctatactccctctacatatttaccacaacacaatggggctcactcacccaccacattaacaacataaaaccctcattcacacgagaaaacaccctcatgttcatacacctatcccccattctcctcctatccctcaaccccgacatcattaccgggttttcctcttgtaaatatagtttaaccaaaacatcagattgtgaatctgacaacagaggcttacgaccccttatttaccgagaaagctcacaagaactgctaactcatgcccccatgtctaacaacatggctttctcaacttttaaaggataacagctatccattggtcttaggccccaagaattttggtgcaactccaaataaaagtaataaccatgcacactactataaccaccctaaccctaacttccctaattccccccatccttaccaccctcgttaaccctaacaaaaaaaactcatacccccattatgtaaaatccattgtcgcatccacctttattatcagtctcttccccacaacaatattcatgtgcctagaccaagaagttattatctcgaactgacactgagccacaacccaaacaacccagctctccctaagcttcaaactagactacttctccataatattcatccctgtagcattgttcgttacatggtccatcatagaattctcactgtgatatataaactcagacccaaacattaatcagttcttcaaatatctactcatcttcctaattaccatactaatcttagttaccgctaacaacctattccaactgttcatcggctgagagggcgtaggaattatatccttcttgctcatcagttgatgatacgcccgagcagatgccaacacagcagccattcaagcaatcctatacaaccgtatcggcgatatcggtttcatcctcgccttagcatgatttatcctacactccaactcatgagacccacaacaaatagcccttctaaacgctaatccaagcctcaccccactactaggcctcctcctagcagcagcaggcaaatcagcccaattaggcctccacccctgactcccctcagccatagaaggccccaccccagtctcagccctactccactcaagcactatagttgtagcaggaatcttcttactcatccgcttccaccccctagcagaaaatagcccactaatccaaactctaacactatgcttaggcgctatcaccactctgttcgcagcagtctgcgcccttacacaaaatgacatcaaaaaaatcgtagccttctccacttcaagtcaactaggactcataatagttacaatcggcatcaaccaaccacacctagcattcctgcacatctgtacccacgccttcttcaaagccatactatttatgtgctccgggtccatcatccacaaccttaacaatgaacaagatattcgaaaaataggaggactactcaaaaccatacctctcacttcaacctccctcaccattggcagcctagcattagcaggaatacctttcctcacaggtttctactccaaagaccacatcatcgaaaccgcaaacatatcatacacaaacgcctgagccctatctattactctcatcgctacctccctgacaagcgcctatagcactcgaataattcttctcaccctaacaggtcaacctcgcttccccacccttactaacattaacgaaaataaccccaccctactaaaccccattaaacgcctggcagccggaagcctattcgcaggattcctcattactaacaacatttcccccgcatcccccttccaaacaacaatccccctctacctaaaactcacagccctcgctgtcactttcctaggacttctaacagccctagacctcaactacctaaccaacaaacttaaaataaaatccccactatgcacattttatttctccaacatactcggattctaccctagcatcacacaccgcacaatcccctatctaggccttcttacgagccaaaacctgcccctactcctcctagacctaacctgactagaaaagctattacctaaaacaatttcacagcaccaaatctccacctccatcatcacctcaacccaaaaaggcataattaaactttacttcctctctttcttcttcccactcatcctaaccctactcctaatcacataacctattcccccgagcaatctcaattacaatatatacaccaacaaacaatgttcaaccagtaactactactaatcaacgcccataatcatacaaagcccccgcaccaataggatcctcccgaatcaaccctgacccctctccttcataaattattcagcttcctacactattaaagtttaccacaaccaccaccccatcatactctttcacccacagcaccaatcctacctccatcgctaaccccactaaaacactcaccaagacctcaacccctgacccccatgcctcaggatactcctcaatagccatcgctgtagtatatccaaagacaaccatcattccccctaaataaattaaaaaaactattaaacccatataacctcccccaaaattcagaataataacacacccgaccacaccgctaacaatcaatactaaacccccataaataggagaaggcttagaagaaaaccccacaaaccccattactaaacccacactcaacagaaacaaagcatacatcattattctcgcacggactacaaccacgaccaatgatatgaaaaaccatcgttgtatttcaactacaagaacaccaatgaccccaatacgcaaaattaaccccctaataaaattaattaaccactcattcatcgacctccccaccccatccaacatctccgcatgatgaaacttcggctcactccttggcgcctgcctgatcctccaaatcaccacaggactattcctagccatgcactactcaccagacgcctcaaccgccttttcatcaatcgcccacatcactcgagacgtaaattatggctgaatcatccgctaccttcacgccaatggcgcctcaatattctttatctgcctcttcctacacatcgggcgaggcctatattacggatcatttctctactcagaaacctgaaacatcggcattatcctcctgcttgcaactatagcaacagccttcataggctatgtcctcccgtgaggccaaatatcattctgaggggccacagtaattacaaacttactatccgccatcccatacattgggacagacctagttcaatgaatctgaggaggctactcagtagacagtcccaccctcacacgattctttacctttcacttcatcttgcccttcattattgcagccctagcagcactccacctcctattcttgcacgaaacgggatcaaacaaccccctaggaatcacctcccattccgataaaatcaccttccacccttactacacaatcaaagacgccctcggcttacttctcttccttctctccttaatgacattaacactattctcaccagacctcctaggcgacccagacaattataccctagccaaccccttaaacacccctccccacatcaagcccgaatgatatttcctattcgcctacacaattctccgatccgtccctaacaaactaggaggcgtccttgccctattactatccatcctcatcctagcaataatccccatcctccatatatccaaacaacaaagcataatatttcgcccactaagccaatcactttattgactcctagccgcagacctcctcattctaacctgaatcggaggacaaccagtaagctacccttttaccatcattggacaagtagcatccgtactatacttcacaacaatcctaatcctaataccaactatctccctaattgaaaacaaaatactcaaatgggcctgtccttgtagtataaactagtacaccagtcttgtaaaccggagatgaaaacctttttccaaggacaaatcagagaaaaagtctttaactccaccattagcacccaaagctaagattctaatttaaactattctctgttctttcatggggaagcagatttgggtgccacccaagtattgactcacccatcaacaaccgctatgtatttcgtacattactgccagccaccatgaatattgtaccgtaccataaatacttgaccacctgtagtacataaaaacccaatccacatcaaacccccccccccatgcttacaagcaagtacagcaatcaaccctcaactatcacacatcaactgcaactccaaagccacccctcacccactaggataccaacaaacctacccacccttaacagtacatagtacataaagccatttaccgtacatagcacattacagtcaaatcccttctcgcccccatggatgacccccctcagataggggtcccttgaccaccatcctccgtgaaatcaatatcccgcacaagagtgctactctcctcgctccgggcccataacacttgggggtagctaaagtgaactgtatccgacatctggttcctacttcagggccataaagcctaaatagcccacacgttccccttaaataagacatcacgatg

SEQ ID NO: 540 - DNA, 16569 bp, Homo sapiens mitochondrial
  3107: "n" refers to a nucleotide at position 3107 of the Cambridge Reference Sequence (CRS, Anderson et al. 1981 Nature 290:457-465), later determined to be absent from the human mtDNA sequence according to the revised CRS (rCRS, Andrews et al. 1999 Nature Genetics 23:147); "n" therefore represents a single nucleotide deletion at a position corresponding to nucleotide 3107 of SEQ ID NO:1 as provided herein.
gatcacaggtctatcaccctattaaccactcacgggagctctccatgcatttggtattttcgtctggggggtgtgcacgcgatagcattgcgagacgctggagccggagcaccctatgtcgcagtatctgtctttgattcctgccccatcctattatttatcgcacctacgttcaatattacaggcgaacatacttactaaagtgtgttaattaattaatgcttgtaggacataataataacaattgaatgtctgcacagccgctttccacacagacatcataacaaaaaatttccaccaaaccccccctcccccccgcttctggccacagcacttaaacacatctctgccaaaccccaaaaacaaagaaccctaacaccagcctaaccagatttcaaattttatcttttggcggtatgcacttttaacagtcaccccccaactaacacattattttcccctcccactcccatactactaatctcatcaatacaacccccgcccatcctacccagcacacacaccgctgctaaccccataccccgaaccaaccaaaccccaaagacaccccccacagtttatgtagcttacctcctcaaagcaatacactgaaaatgtttagacgggctcacatcaccccataaacaaataggtttggtcctagcctttctattagctcttagtaagattacacatgcaagcatccccgttccagtgagttcaccctctaaatcaccacgatcaaaagggacaagcatcaagcacgcagcaatgcagctcaaaacgcttagcctagccacacccccacgggaaacagcagtgattaacctttagcaataaacgaaagtttaactaagctatactaaccccagggttggtcaatttcgtgccagccaccgcggtcacacgattaacccaagtcaatagaagccggcgtaaagagtgttttagatcaccccctccccaataaagctaaaactcacctgagttgtaaaaaactccagttgacacaaaatagactacgaaagtggctttaacatatctgaacacacaatagctaagacccaaactgggattagataccccactatgcttagccctaaacctcaacagttaaatcaacaaaactgctcgccagaacactacgagccacagcttaaaactcaaaggacctggcggtgcttcatatccctctagaggagcctgttctgtaatcgataaaccccgatcaacctcaccacctcttgctcagcctatataccgccatcttcagcaaaccctgatgaaggctacaaagtaagcgcaagtacccacgtaaagacgttaggtcaaggtgtagcccatgaggtggcaagaaatgggctacattttctaccccagaaaactacgatagcccttatgaaacttaagggtcgaaggtggatttagcagtaaactgagagtagagtgcttagttgaacagggccctgaagcgcgtacacaccgcccgtcaccctcctcaagtatacttcaaaggacatttaactaaaacccctacgcatttatatagaggagacaagtcgtaacatggtaagtgtactggaaagtgcacttggacgaaccagagtgtagcttaacacaaagcacccaacttacacttaggagatttcaacttaacttgaccgctctgagctaaacctagccccaaacccactccaccttactaccagacaaccttagccaaaccatttacccaaataaagtataggcgatagaaattgaaacctggcgcaatagatatagtaccgcaagggaaagatgaaaaattataaccaagcataatatagcaaggactaacccctataccttctgcataatgaattaactagaaataactttgcaaggagagccaaagctaagacccccgaaaccagacgagctacctaagaacagctaaaagagcacacccgtctatgtagcaaaatagtgggaagatttataggtagaggcgacaaacctaccgagcctggtgatagctggttgtccaagatagaatcttagttcaactttaaatttgcccacagaaccctctaaatccccttgtaaatttaactgttagtccaaagaggaacagctctttggacactaggaaaaaaccttgtagagagagtaaaaaatttaacacccatagtaggcctaaaagcagccaccaattaagaaagcgttcaagctcaacacccactacctaaaaaatcccaaacatataactgaactcctcacacccaattggaccaatctatcaccctatagaagaactaatgttagtataagtaacatgaaaacattctcctccgcataagcctgcgtcagattaaaacactgaactgacaattaacagcccaatatctacaatcaaccaacaagtcattattaccctcactgtcaacccaacacaggcatgctcataaggaaaggttaaaaaaagtaaaaggaactcggcaaatcttaccccgcctgtttaccaaaaacatcacctctagcatcaccagtattagaggcaccgcctgcccagtgacacatgtttaacggccgcggtaccctaaccgtgcaaaggtagcataatcacttgttccttaaatagggacctgtatgaatggctccacgagggttcagctgtctcttacttttaaccagtgaaattgacctgcccgtgaagaggcgggcataacacagcaagacgagaagaccctatggagctttaatttattaatgcaaacagtacctaacaaacccacaggtcctaaactaccaaacctgcattaaaaatttcggttggggcgacctcggagcagaacccaacctccgagcagtacatgctaagacttcaccagtcaaagcgaactactatactcaattgatccaataacttgaccaacggaacaagttaccctagggataacagcgcaatcctattctagagtccatatcaacaatagggtttacgacctcgatgttggatcaggacatcccgatggtgcagccgctattaaaggttcgtttgttcaacgattaaagtcctacgtgatctgagttcagaccggagtaatccaggtcggtttctatctacnttcaaattcctccctgtacgaaaggacaagagaaataaggcctacttcacaaagcgccttcccccgtaaatgatatcatctcaacttagtattatacccacacccacccaagaacagggtttgttaagatggcagagcccggtaatcgcataaaacttaaaactttacagtcagaggttcaattcctcttcttaacaacatacccatggccaacctcctactcctcattgtacccattctaatcgcaatggcattcctaatgcttaccgaacgaaaaattctaggctatatacaactacgcaaaggccccaacgttgtaggcccctacgggctactacaacccttcgctgacgccataaaactcttcaccaaagagcccctaaaacccgccacatctaccatcaccctctacatcaccgccccgaccttagctctcaccatcgctcttctactatgaacccccctccccatacccaaccccctggtcaacctcaacctaggcctcctatttattctagccacctctagcctagccgtttactcaatcctctgatcagggtgagcatcaaactcaaactacgccctgatcggcgcactgcgagcagtagcccaaacaatctcatatgaagtcaccctagccatcattctactatcaacattactaataagtggctcctttaacctctccacccttatcacaacacaagaacacctctgattactcctgccatcatgacccttggccataatatgatttatctccacactagcagagaccaaccgaacccccttcgaccttgccgaaggggagtccgaactagtctcaggcttcaacatcgaatacgccgcaggccccttcgccctattcttcatagccgaatacataaacattattataataaacaccctcaccactgcaatcttcctaggaacaacatatgacgcactctcccctgaactctacacaacatattttgtcaccaagaccctacttctaacctccctgttcttatgaattcgaacagcatacccccgattccgctacgaccaactcatacacctcctatgaaaaaacttcctaccactcaccctagcattacttatatgatatgtctccatacccattacaatctccagcattccccctcaaacctaagaaatatgtctgataaaagagttactttgatagagtaaataataggagcttaaacccccttatttctaggactatgagaatcgaacccatccctgagaatccaaaattctccgtgccacctatcacaccccatcctaaagtaaggtcagctaaataagctatcgggcccataccccgaaaatgttggttatacccttcccgtactaattaatcccctggcccaacccgtcatctactctaccatctttgcaggcacactcatcacagcgctaagctcgcactgattttttacctgagtaggcctagaaataaacatgctagcttttattccagttctaaccaaaaaaataaaccctcgttccacagaagctgccatcaagtatttcctcacgcaagcaaccgcatccataatccttctaatagctatcctcttcaacaatatactctccggacaatgaaccataaccaatactaccaatcaatactcatcattaataatcataatggctatagcaataaaactaggaatagccccctttcacttctgagtcccagaggttacccaaggcacccctctgacatccggcctgcttcttctcacatgacaaaaactagcccccatctcaatcatataccaaatctctccctcactaaacgtaagccttctcctcactctctcaatcttatccatcatagcaggcagttgaggtggattaaaccaaacccagctacgcaaaatcctagcatactcctcaattacccacataggatgaataatagcagttctaccgtacaaccctaacataaccattcttaatttaactatttatattatcctaactactaccgcattcctactactcaacttaaactccagcaccacgaccctactactatctcgcacctgaaacaagctaacatgactaacacccttaattccatccaccctcctctccctaggaggcctgcccccgctaaccggctttttgcccaaatgggccattatcgaagagttcacaaaaaacaatagcctcatcatccccaccatcatagccaccatcaccctccttaacctctacttctacctacgcctaatctactccacctcaatcacactactccccatatctaacaacgtaaaaataaaatgacagtttgaacatacaaaacccaccccattcctccccacactcatcgcccttaccacgctactcctacctatctccccttttatactaataatcttatagaaatttaggttaaatacagaccaagagccttcaaagccctcagtaagttgcaatacttaatttctgtaacagctaaggactgcaaaaccccactctgcatcaactgaacgcaaatcagccactttaattaagctaagcccttactagaccaatgggacttaaacccacaaacacttagttaacagctaagcaccctaatcaactggcttcaatctacttctcccgccgccgggaaaaaaggcgggagaagccccggcaggtttgaagctgcttcttcgaatttgcaattcaatatgaaaatcacctcggagctggtaaaaagaggcctaacccctgtctttagatttacagtccaatgcttcactcagccattttacctcacccccactgatgttcgccgaccgttgactattctctacaaaccacaaagacattggaacactatacctattattcggcgcatgagctggagtcctaggcacagctctaagcctccttattcgagccgagctgggccagccaggcaaccttctaggtaacgaccacatctacaacgttatcgtcacagcccatgcatttgtaataatcttcttcatagtaatacccatcataatcggaggctttggcaactgactagttcccctaataatcggtgcccccgatatggcgtttccccgcataaacaacataagcttctgactcttacctccctctctcctactcctgctcgcatctgctatagtggaggccggagcaggaacaggttgaacagtctaccctcccttagcagggaactactcccaccctggagcctccgtagacctaaccatcttctccttacacctagcaggtgtctcctctatcttaggggccatcaatttcatcacaacaattatcaatataaaaccccctgccataacccaataccaaacgcccctcttcgtctgatccgtcctaatcacagcagtcctacttctcctatctctcccagtcctagctgctggcatcactatactactaacagaccgcaacctcaacaccaccttcttcgaccccgccggaggaggagaccccattctataccaacacctattctgatttttcggtcaccctgaagtttatattcttatcctaccaggcttcggaataatctcccatattgtaacttactactccggaaaaaaagaaccatttggatacataggtatggtctgagctatgatatcaattggcttcctagggtttatcgtgtgagcacaccatatatttacagtaggaatagacgtagacacacgagcatatttcacctccgctaccataatcatcgctatccccaccggcgtcaaagtatttagctgactcgccacactccacggaagcaatatgaaatgatctgctgcagtgctctgagccctaggattcatctttcttttcaccgtaggtggcctgactggcattgtattagcaaactcatcactagacatcgtactacacgacacgtactacgttgtagcccacttccactatgtcctatcaataggagctgtatttgccatcataggaggcttcattcactgatttcccctattctcaggctacaccctagaccaaacctacgccaaaatccatttcactatcatattcatcggcgtaaatctaactttcttcccacaacactttctcggcctatccggaatgccccgacgttactcggactaccccgatgcatacaccacatgaaacatcctatcatctgtaggctcattcatttctctaacagcagtaatattaataattttcatgatttgagaagccttcgcttcgaagcgaaaagtcctaatagtagaagaaccctccataaacctggagtgactatatggatgccccccaccctaccacacattcgaagaacccgtatacataaaatctagacaaaaaaggaaggaatcgaaccccccaaagctggtttcaagccaaccccatggcctccatgactttttcaaaaaggtattagaaaaaccatttcataactttgtcaaagttaaattataggctaaatcctatatatcttaatggcacatgcagcgcaagtaggtctacaagacgctacttcccctatcatagaagagcttatcacctttcatgatcacgccctcataatcattttccttatctgcttcctagtcctgtatgcccttttcctaacactcacaacaaaactaactaatactaacatctcagacgctcaggaaatagaaaccgtctgaactatcctgcccgccatcatcctagtcctcatcgccctcccatccctacgcatcctttacataacagacgaggtcaacgatccctcccttaccatcaaatcaattggccaccaatggtactgaacctacgagtacaccgactacggcggactaatcttcaactcctacatacttcccccattattcctagaaccaggcgacctgcgactccttgacgttgacaatcgagtagtactcccgattgaagcccccattcgtataataattacatcacaagacgtcttgcactcatgagctgtccccacattaggcttaaaaacagatgcaattcccggacgtctaaaccaaaccactttcaccgctacacgaccgggggtatactacggtcaatgctctgaaatctgtggagcaaaccacagtttcatgcccatcgtcctagaattaattcccctaaaaatctttgaaatagggcccgtatttaccctataacaccccctctaccccctctagagcccactgtaaagctaacttagcattaaccttttaagttaaagattaagagaaccaacacctctttacagtgaaatgccccaactaaatactaccgtatggcccaccataattacccccatactccttacactattcctcatcacccaactaaaaatattaaacacaaactaccacctacctccctcaccaaagcccataaaaataaaaaattataacaaaccctgagaaccaaaatgaacgaaaatctgttcgcttcattcattgcccccacaatcctaggcctacccgccgcagtactgatcattctatttccccctctattgatccccacctccaaatatctcatcaacaaccgactaatcaccacccaacaatgactaatcaaactaacctcaaaacaaatgataaccatacacaacactaaaggacgaacctgatctcttatactagtatccttaatcatttttattgccacaactaacctcctcggactcctgcctcactcatttacaccaaccacccaactatctataaacctagccatggccatccccttatgagcgggcgcagtgattataggctttcgctctaagattaaaaatgccctagcccacttcttaccacaaggcacacctacaccccttatccccatactagttattatcgaaaccatcagcctactcattcaaccaatagccctggccgtacgcctaaccgctaacattactgcaggccacctactcatgcacctaattggaagcgccaccctagcaatatcaaccattaaccttccctctacacttatcatcttcacaattctaattctactaactatcctagaaatcgctgtcgccttaatccaagcctacgttttcacacttctagtaagcctctacctgcacgacaacacataatgacccaccaatcacatgcctatcatatagtaaaacccagcccatgacccctaacaggggccctctcagccctcctaatgacctccggcctagccatgtgatttcacttccactccataacgctcctcatactaggcctactaaccaacacactaaccatataccaatgatggcgcgatgtaacacgagaaagcacataccaaggccaccacacaccacctgtccaaaaaggccttcgatacgggataatcctatttattacctcagaagtttttttcttcgcaggatttttctgagccttttaccactccagcctagcccctaccccccaattaggagggcactggcccccaacaggcatcaccccgctaaatcccctagaagtcccactcctaaacacatccgtattactcgcatcaggagtatcaatcacctgagctcaccatagtctaatagaaaacaaccgaaaccaaataattcaagcactgcttattacaattttactgggtctctattttaccctcctacaagcctcagagtacttcgagtctcccttcaccatttccgacggcatctacggctcaacattttttgtagccacaggcttccacggacttcacgtcattattggctcaactttcctcactatctgcttcatccgccaactaatatttcactttacatccaaacatcactttggcttcgaagccgccgcctgatactggcattttgtagatgtggtttgactatttctgtatgtctccatctattgatgagggtcttactcttttagtataaatagtaccgttaacttccaattaactagttttgacaacgttcaaaaaagagtaataaacttcgccttaattttaataatcaacaccctcctagccttactactaataattattacattttgactaccacaactcaacggctacatagaaaaatccaccccttacgagtgcggcttcgaccctatatcccccgcccgcgtccctttctccataaaattcttcttagtagctattaccttcttattatttgatctagaaattgccctccttttacccctaccatgagccctacaaacaactaacctgccactaatagttatgtcatccctcttattaatcatcatcctagccctaagtctggcctatgagtgactacaaaaaggattagactgaaccgaattggtatatagtttaaacaaaacgaatgatttcgactcattaaattatgataatcatatttaccaaatgcccctcatttacataaatattatactagcatttaccatctcacttctaggaatactagtatatcgctcacacctcatatcctccctactatgcctagaaggaataatactatcgctgttcattatagctactctcataaccctcaacacccactccctcttagccaatattgtgcctattgccatactagtctttgccgcctgcgaagcagcggtgggcctagccctactagtctcaatctccaacacatatggcctagactacgtacataacctaaacctactccaatgctaaaactaatcgtcccaacaattatattactaccactgacatgactttccaaaaaacacataatttgaatcaacacaaccacccacagcctaattattagcatcatccctctactattttttaaccaaatcaacaacaacctatttagctgttccccaaccttttcctccgaccccctaacaacccccctcctaatactaactacctgactcctacccctcacaatcatggcaagccaacgccacttatccagtgaaccactatcacgaaaaaaactctacctctctatactaatctccctacaaatctccttaattataacattcacagccacagaactaatcatattttatatcttcttcgaaaccacacttatccccaccttggctatcatcacccgatgaggcaaccagccagaacgcctgaacgcaggcacatacttcctattctacaccctagtaggctcccttcccctactcatcgcactaatttacactcacaacaccctaggctcactaaacattctactactcactctcactgcccaagaactatcaaactcctgagccaacaacttaatatgactagcttacacaatagcttttatagtaaagatacctctttacggactccacttatgactccctaaagcccatgtcgaagcccccatcgctgggtcaatagtacttgccgcagtactcttaaaactaggcggctatggtataatacgcctcacactcattctcaaccccctgacaaaacacatagcctaccccttccttgtactatccctatgaggcataattataacaagctccatctgcctacgacaaacagacctaaaatcgctcattgcatactcttcaatcagccacatagccctcgtagtaacagccattctcatccaaaccccctgaagcttcaccggcgcagtcattctcataatcgcccacgggcttacatcctcattactattctgcctagcaaactcaaactacgaacgcactcacagtcgcatcataatcctctctcaaggacttcaaactctactcccactaatagctttttgatgacttctagcaagcctcgctaacctcgccttaccccccactattaacctactgggagaactctctgtgctagtaaccacgttctcctgatcaaatatcactctcctacttacaggactcaacatactagtcacagccctatactccctctacatatttaccacaacacaatggggctcactcacccaccacattaacaacataaaaccctcattcacacgagaaaacaccctcatgttcatacacctatcccccattctcctcctatccctcaaccccgacatcattaccgggttttcctcttgtaaatatagtttaaccaaaacatcagattgtgaatctgacaacagaggcttacgaccccttatttaccgagaaagctcacaagaactgctaactcatgcccccatgtctaacaacatggctttctcaacttttaaaggataacagctatccattggtcttaggccccaaaaattttggtgcaactccaaataaaagtaataaccatgcacactactataaccaccctaaccctgacttccctaattccccccatccttaccaccctcgttaaccctaacaaaaaaaactcatacccccattatgtaaaatccattgtcgcatccacctttattatcagtctcttccccacaacaatattcatgtgcctagaccaagaagttattatctcgaactgacactgagccacaacccaaacaacccagctctccctaagcttcaaactagactacttctccataatattcatccctgtagcattgttcgttacatggtccatcatagaattctcactgtgatatataaactcagacccaaacattaatcagttcttcaaatatctactcatcttcctaattaccatactaatcttagttaccgctaacaacctattccaactgttcatcggctgagagggcgtaggaattatatccttcttgctcatcagttgatgatacgcccgagcagatgccaacacagcagccattcaagcaatcctatacaaccgtatcggcgatatcggtttcatcctcgccttagcatgatttatcctacactccaactcatgagacccacaacaaatagcccttctaaacgctaatccaagcctcaccccactactaggcctcctcctagcagcagcaggcaaatcagcccaattaggtctccacccctgactcccctcagccatagaaggccccaccccagtctcagccctactccactcaagcactatagttgtagcaggaatcttcttactcatccgcttccaccccctagcagaaaatagcccactaatccaaactctaacactatgcttaggcgctatcaccactctgttcgcagcagtctgcgcccttacacaaaatgacatcaaaaaaatcgtagccttctccacttcaagtcaactaggactcataatagttacaatcggcatcaaccaaccacacctagcattcctgcacatctgtacccacgccttcttcaaagccatactatttatgtgctccgggtccatcatccacaaccttaacaatgaacaagatattcgaaaaataggaggactactcaaaaccatacctctcacttcaacctccctcaccattggcagcctagcattagcaggaatacctttcctcacaggtttctactccaaagaccacatcatcgaaaccgcaaacatatcatacacaaacgcctgagccctatctattactctcatcgctacctccctgacaagcgcctatagcactcgaataattcttctcaccctaacaggtcaacctcgcttccccacccttactaacattaacgaaaataaccccaccctactaaaccccattaaacgcctggcagccggaagcctattcgcaggatttctcattactaacaacatttcccccgcatcccccttccaaacaacaatccccctctacctaaaactcacagccctcgctgtcactttcctaggacttctaacagccctagacctcaactacctaaccaacaaacttaaaataaaatccccactatgcacattttatttctccaacatactcggattctaccctagcatcacacaccgcacaatcccctatctaggccttcttacgagccaaaacctgcccctactcctcctagacctaacctgactagaaaagctattacctaaaacaatttcacagcaccaaatctccacctccatcatcacctcaacccaaaaaggcataattaaactttacttcctctctttcttcttcccactcatcctaaccctactcctaatcacataacctattcccccgagcaatctcaattacaatatatacaccaacaaacaatgttcaaccagtaactactactaatcaacgcccataatcatacaaagcccccgcaccaataggatcctcccgaatcaaccctgacccctctccttcataaattattcagcttcctacactattaaagtttaccacaaccaccaccccatcatactctttcacccacagtaccaatcctacctccatcgctaaccccactaaaacactcaccaagacctcaacccctgacccccatgcctcaggatactcctcaatagccatcgctgtagtatatccaaagacaaccatcattccccctaaataaattaaaaaaactattaaacccatataacctcccccaaaattcagaataataacacacccgaccacaccgctaacaatcaatgctaaacccccataaataggagaaggcttagaagaaaaccccacaaaccccattactaaacccacactcaacagaaacaaagcatacatcattattctcgcacggactacaaccacgaccaatgatatgaaaaaccatcgttgtatttcaactacaagaacaccaatgaccccaatacgcaaaactaaccccctaataaaattaattaaccactcattcatcgacctccccaccccatccaacatctccgcatgatgaaacttcggctcactccttggcgcctgcctgatcctccaaatcaccacaggactattcctagccatgcactactcaccagacgcctcaaccgccttttcatcaatcgcccacatcactcgagacgtaaattatggctgaatcatccgctaccttcacgccaatggcgcctcaatattctttatctgcctcttcctacacatcgggcgaggcctatattacggatcatttctctactcagaaacctgaaacatcggcattatcctcctgcttgcaactatagcaacagccttcataggctatgtcctcccgtgaggccaaatatcattctgaggggccacagtaattacaaacttactatccgccatcccatacattgggacagacctagttcaatgaatctgaggaggctactcagtagacagtcccaccctcacacgattctttacctttcacttcatcttgcccttcattattgcagccctagcagcactccacctcctattcttgcacgaaacgggatcaaacaaccccctaggaatcacctcccattccgataaaatcaccttccacccttactacacaatcaaagacgccctcggcttacttctcttccttctctccttaatgacattaacactattctcaccagacctcctaggcgacccagacaattataccctagccaaccccttaaacacccctccccacatcaagcccgaatgatatttcctattcgcctacacaattctccgatccgtccctaacaaactaggaggcgtccttgccctattactatccatcctcatcctagcaataatccccatcctccatatatccaaacaacaaagcataatatttcgcccactaagccaatcactttattgactcctagccgcagacctcctcattctaacctgaatcggaggacaaccagtaagctacccttttaccatcattggacaagtagcatccgtactatacttcacaacaatcctaatcctaataccaactatctccctaattgaaaacaaaatactcaaatgggcctgtccttgtagtataaactaatacaccagtcttgtaaaccggagatgaaaacctttttccaaggacaaatcagagaaaaagtctttaactccaccattagcacccaaagctaagattctaatttaaactattctctgttctttcatggggaagcagatttgggtaccacccaagtattgactcacccatcaacaaccgctatgtatttcgtacattactgccagccaccatgaatattgtacggtaccataaatacttgaccacctgtagtacataaaaacccaatccacatcaaaaccccctccccatgcttacaagcaagtacagcaatcaaccctcaactatcacacatcaactgcaactccaaagccacccctcacccactaggataccaacaaacctacccacccttaacagtacatagtacataaagccatttaccgtacatagcacattacagtcaaatcccttctcgtccccatggatgacccccctcagataggggtcccttgaccaccatcctccgtgaaatcaatatcccgcacaagagtgctactctcctcgctccgggcccataacacttgggggtagctaaagtgaactgtatccgacatctggttcctacttcagggtcataaagcctaaatagcccacacgttccccttaaataagacatcacgatg

SEQ ID NO: 541 - DNA, 16570 bp, Homo sapiens mitochondrial; identical to SEQ ID NO: 459
  3108: "n" refers to a nucleotide at position 3107 of the Cambridge Reference Sequence (CRS, Anderson et al. 1981 Nature 290:457-465), later determined to be absent from the human mtDNA sequence according to the revised CRS (rCRS, Andrews et al. 1999 Nature Genetics 23:147); "n" therefore represents a single nucleotide deletion at a position corresponding to nucleotide 3107 of SEQ ID NO:1 as provided herein.

SEQ ID NO: 542 - DNA, 16571 bp, Homo sapiens mitochondrial
  3109: "n" refers to a nucleotide at position 3107 of the Cambridge Reference Sequence (CRS, Anderson et al. 1981 Nature 290:457-465), later determined to be absent from the human mtDNA sequence according to the revised CRS (rCRS, Andrews et al. 1999 Nature Genetics 23:147); "n" therefore represents a single nucleotide deletion at a position corresponding to nucleotide 3107 of SEQ ID NO:1 as provided herein.
gatcacaggtctatcaccctattaaccactcacgggagctctccatgcatttggtattttcgtctggggggtgtgcacgcgatagcattgcgagacgctggagccggagcaccctatgtcgcagtatctgtctttgattcctgcctcatcctattatttatcgcacctacgttcaatattacaggcgaacatacttactaaagtgtgttaattaattaatgcttgtaggacataataataacaattgaatgtctgcacagccgctttccacacagacatcataacaaaaaatttccaccaaaccccccctcccccccgcttctggccacagcacttaaacacatctctgccaaaccccaaaaacaaagaaccctaacaccagcctaaccagatttcaaattttatcttttggcggtatgcacttttaacagtcaccccccaactaacacattattttcccctcccactcccatactactaatctcatcaatacaacccccgcccatcctacccagcacacacacaccgctgctaaccccataccccgaaccaaccaaaccccaaagacaccccccacagtttatgtagcttacctcctcaaagcaatacactgaaaatgtttagacgggctcacatcaccccataaacaaataggtttggtcctagcctttctattagctcttagtaagattacacatgcaagcatccccgttccagtgagttcaccctctaaatcaccacgatcaaaagggacaagcatcaagcacgcagcaatgcagctcaaaacgcttagcctagccacacccccacgggaaacagcagtgattaacctttagcaataaacgaaagtttaactaagctatactaaccccagggttggtcaatttcgtgccagccaccgcggtcacacgattaacccaagtcaatagaagccggcgtaaagagtgttttagatcaccccctccccaataaagctaaaactcacctgagttgtaaaaaactccagttgacacaaaatagactacgaaagtggctttaacatatctgaacacacaatagctaagacccaaactgggattagataccccactatgcttagccctaaacctcaacagttaaatcaacaaaactgctcgccagaacactacgagccacagcttaaaactcaaaggacctggcggtgcttcatatccctctagaggagcctgttctgtaatcgataaaccccgatcaacctcaccacctcttgctcagcctatataccgccatcttcagcaaaccctgatgaaggctacaaagtaagcgcaagtacccacgtaaagacgttaggtcaaggtgtagcccatgaggtggcaagaaatgggctacattttctaccccagaaaactacgatagcccttatgaaacttaagggtcgaaggtggatttagcagtaaactgagagtagagtgcttagttgaacagggccctgaagcgcgtacacaccgcccgtcaccctcctcaagtatacttcaaaggacatttaactaaaacccctacgcatttatatagaggagacaagtcgtaacatggtaagtgtactggaaagtgcacttggacgaaccagagtgtagcttaacacaaagcacccaacttacacttaggagatttcaacttaacttgaccgctctgagctaaacctagccccaaacccactccaccttactaccagacaaccttagccaaaccatttacccaaataaagtataggcgatagaaattgaaacctggcgcaatagatatagtaccgcaagggaaagatgaaaaattataaccaagcataatatagcaaggactaacccctataccttctgcataatgaattaactagaaataactttgcaaggagagccaaagctaagacccccgaaaccagacgagctacctaagaacagctaaaagagcacacccgtctatgtagcaaaatagtgggaagatttataggtagaggcgacaaacctaccgagcctggtgatagctggttgtccaagatagaatcttagttcaactttaaatttgcccacagaaccctctaaatccccttgtaaatttaactgttagtccaaagaggaacagctctttggacactaggaaaaaaccttgtagagagagtaaaaaatttaacacccatagtaggcctaaaagcagccaccaattaagaaagcgttcaagctcaacacccactacctaaaaaatcccaaacatataactgaactcctcacacccaattggaccaatctatcaccctatagaagaactaatgttagtataagtaacatgaaaacattctcctccgcataagcctgcgtcagattaaaacactgaactgacaattaacagcccaatatctacaatcaaccaacaagtcattattaccctcactgtcaacccaacacaggcatgctcataaggaaaggttaaaaaaagtaaaaggaactcggcaaatcttaccccgcctgtttaccaaaaacatcacctctagcatcaccagtattagaggcaccgcctgcccagtgacacatgtttaacggccgcggtaccctaaccgtgcaaaggtagcataatcacttgttccttaaatagggacctgtatgaatggctccacgagggttcagctgtctcttacttttaaccagtgaaattgacctgcccgtgaagaggcgggcatgacacagcaagacgagaagaccctatggagctttaatttattaatgcaaacagtacctaacaaacccacaggtcctaaactaccaaacctgcattaaaaatttcggttggggcgacctcggagcagaacccaacctccgagcagtacatgctaagacttcaccagtcaaagcgaactactatactcaattgatccaataacttgaccaacggaacaagttaccctagggataacagcgcaatcctattctagagtccatatcaacaatagggtttacgacctcgatgttggatcaggacatcccgatggtgcagccgctattaaaggttcgtttgttcaacgattaaagtcctacgtgatctgagttcagaccggagtaatccaggtcggtttctatctacnttcaaattcctccctgtacgaaaggacaagagaaataaggcctacttcacaaagcgccttcccccgtaaatgatatcatctcaacttagcattatacccacacccacccaagaacagggtttgttaagatggcagagcccggtaatcgcataaaacttaaaactttacagtcagaggttcaattcctcttcttaacaacatacccatggccaacctcctactcctcattgtacccattctaatcgcaatggcattcctaatgcttaccgaacgaaaaattctaggctatatacaactacgcaaaggccccaacgttgtaggcccctacgggctactacaacccttcgctgacgccataaaactcttcaccaaagagcccctaaaacccgccacatctaccatcaccctctacatcaccgccccgaccttagctctcaccatcgctcttctactatgaacccccctccccatacccaaccccctggtcaacctcaacctaggcctcctatttattctagccacctctagcctagccgtttactcaatcctctgatcagggtgagcatcaaactcaaactacgccctgatcggcgcactgcgagcagtagcccaaacaatctcatatgaagtcaccctagccatcattctactatcaacattactaataagtggctcctttaacctctccacccttatcacaacacaagaacacctctgattactcctgccatcatgacccttggccataatatgatttatctccacactagcagagaccaaccgaacccccttcgaccttgccgaaggggagtccgaactagtctcaggcttcaacatcgaatacgccgcaggccccttcgccctattcttcatagccgaatacacaaacattattataataaacaccctcaccactacaatcttcctaggaacaacatatgacgcactctcccctgaactctacacaacatattttgtcaccaagaccctacttctaacctccctgttcttatgaattcgaacagcatacccccgattccgctacgaccaactcatacacctcctatgaaaaaacttcctaccactcaccctagcattacttatatgatatgtctccatacccattacaatctccagcattccccctcaaacctaagaaatatgtctgataaaagagttactttgatagagtaaataataggagcttaaacccccttatttctaggactatgagaatcgaacccatccctgagaatccaaaattctccgtgccacctatcacaccccatcctaaagtaaggtcagctaaataagctatcgggcccataccccgaaaatgttggttatacccttcccgtactaattaatcccctggcccaacccgtcatctactctaccatctttgcaggcacactcatcacagcgctaagctcgcactgattttttacctgagtaggcctagaaataaacatgctagcttttattccagttctaaccaaaaaaataaaccctcgttccacagaagctgccatcaagtatttcctcacgcaagcaaccgcatccataatccttctaatagctatcctcttcaacaatatactctccggacaatgaaccataaccaatactaccaatcaatactcatcattaataatcataatggctatagcaataaaactaggaatagccccctttcacttctgagtcccagaggttacccaaggcacccctctgacatccggcctgcttcttctcacatgacaaaaactagcccccatctcaatcatataccaaatctctccctcactaaacgtaagccttctcctcactctctcaatcttatccatcatagcaggcagttgaggtggattaaaccaaacccagctacgcaaaatcttagcatactcctcaattacccacataggatgaataatagcagttctaccgtacaaccctaacataaccattcttaatttaactatttatattatcctaactactaccgcattcctactactcaacttaaactccagcaccacgaccctactactatctcgcacctgaaacaagctaacatgactaacacccttaattccatccaccctcctctccctaggaggcctgcccccgctaaccggctttttgcccaaatgggccattatcgaagaattcacaaaaaacaatagcctcatcatccccaccatcatagccaccatcaccctccttaacctctacttctacctacgcctaatctactccacctcaatcacactactccccatatctaacaacgtaaaaataaaatgacagtttgaacatacaaaacccaccccattcctccccacactcatcgcccttaccacgctactcctacctatctccccttttatactaataatcttatagaaatttaggttaaatacagaccaagagccttcaaagccctcagtaagttgcaatacttaatttctgtaacagctaaggactgcaaaaccccactctgcatcaactgaacgcaaatcagccactttaattaagctaagcccttactagaccaatgggacttaaacccacaaacacttagttaacagctaagcaccctaatcaactggcttcaatctacttctcccgccgccgggaaaaaaggcgggagaagccccggcaggtttgaagctgcttcttcgaatttgcaattcaatatgaaaatcacctcggagctggtaaaaagaggcctaacccctgtctttagatttacagtccaatgcttcactcagccattttacctcacccccactgatgttcgccgaccgttgactattctctacaaaccacaaagacattggaacactatacctattattcggcgcatgagctggagtcctaggcacagctctaagcctccttattcgagccgagctgggccagccaggcaaccttctaggtaacgaccacatctacaacgttatcgtcacagcccatgcatttgtaataatcttcttcatagtaatacccatcataatcggaggctttggcaactgactagttcccctaataatcggtgcccccgatatggcgtttccccgcataaacaacataagcttctgactcttacctccctctctcctactcctgctcgcatctgctatagtggaggccggagcaggaacaggttgaacagtctaccctcccttagcagggaactactcccaccctggagcctccgtagacctaaccatcttctccttacacctagcaggtgtctcctctatcttaggggccatcaatttcatcacaacaattatcaatataaaaccccctgccataacccaataccaaacgcccctcttcgtctgatccgtcctaatcacagcagtcctacttctcctatctctcccagtcctagctgctggcatcactatactactaacagaccgcaacctcaacaccaccttcttcgaccccgccggaggaggagaccccattctataccaacacctattctgatttttcggtcaccctgaagtttatattcttatcctaccaggcttcggaataatctcccatattgtaacttactactccggaaaaaaagaaccatttggatacataggtatggtctgagctatgatatcaattggcttcctagggtttatcgtgtgagcacaccatatatttacagtaggaatagacgtagacacacgagcatatttcacctccgctaccataatcatcgctatccccaccggcgtcaaagtatttagctgactcgccacactccacggaagcaatatgaaatgatctgctgcagtgctctgagccctaggattcatctttcttttcaccgtaggtggcctgactggcattgtattagcaaactcatcactagacatcgtactacacgacacgtactacgttgtagctcacttccactatgtcctatcaataggagctgtatttgccatcataggaggcttcattcactgatttcccctattctcaggctacaccctagaccaaacctacgccaaaatccatttcactatcatattcatcggcgtaaatctaactttcttcccacaacactttctcggcctatccggaatgccccgacgttactcggactaccccgatgcatacaccacatgaaacatcctatcatctgtaggctcattcatttctctaacagcagtaatattaataattttcatgatttgagaagccttcgcttcgaagcgaaaagtcctaatagtagaagaaccctccataaacctggagtgactatatggatgccccccaccctaccacacattcgaagaacccgtatacataaaatctagacaaaaaaggaaggaatcgaaccccccaaagctggtttcaagccaaccccatggcctccatgactttttcaaaaaggtattagaaaaaccatttcataactttgtcaaagttaaattataggctaaatcctatatatcttaatggcacatgcagcgcaagtaggtctacaagacgctacttcccctatcatagaagagcttatcacctttcatgatcacgccctcataatcattttccttatctgcttcctagtcctgtatgcccttttcctaacactcacaacaaaactaactaatactaacatctcagacgctcaggaaatagaaaccgtctgaactatcctgcccgccatcatcctagtcctcatcgccctcccatccctacgcatcctttacataacagacgagatcaacgatccctcccttaccatcaaatcaattggccaccaatggtactgaacctacgagtacaccgactacggcggactaatcttcaactcctacatacttcccccattattcctagaaccaggcgacctgcgactccttgacgttgacaatcgagtagtactcccgattgaagcccccattcgtataataattacatcacaagacgtcttgcactcatgagctgtccccacattaggcttaaaaacagatgcaattcccggacgtctaaaccaaaccactttcaccgctacacgaccgggggtatactacggtcaatgctctgaaatctgtggagcaaaccacagtttcatgcccatcgtcctagaattaattcccctaaaaatctttgaaatagggcccgtatttaccctatagcaccccctctaccccctctagagcccactgtaaagctaacttagcattaaccttttaagttaaagattaagagaaccaacacctctttacagtgaaatgccccaactaaatactaccgtatggcccaccataattacccccatactccttacactattcctcatcacccaactaaaaatattaaacacaaactaccacctacctccctcaccaaagcccataaaaataaaaaattataacaaaccctgagaaccaaaatgaacgaaaatctgttcgcttcattcattgcccccacaatcctaggcctacccgccgcagtactgatcattctatttccccctctattgatccccacctccaaatatctcatcaacaaccgactaatcaccacccaacaatgactaatcaaactaacctcaaaacaaatgataaccatacacaacactaaaggacgaacctgatctcttatactagtatccttaatcatttttattgccacaactaacctcctcggactcctgcctcactcatttacaccaaccacccaactatctataaacctagccatggccatccccttatgagcgggcgcagtgattataggctttcgctctaagattaaaaatgccctagcccacttcttaccacaaggcacacctacaccccttatccccatactagttattatcgaaaccatcagcctactcattcaaccaatagccctggccgtacgcctaaccgctaacattactgcaggccacctactcatgcacctaattggaagcgccaccctagcaatatcaaccattaaccttccctctacacttatcatcttcacaattctaattctactgactatcctagaaatcgctgtcgccttaatccaagcctacgttttcacacttctagtaagcctctacctgcacgacaacacataatgacccaccaatcacatgcctatcatatagtaaaacccagcccatgacccctaacaggggccctctcagccctcctaatgacctccggcctagccatgtgatttcacttccactccataacgctcctcatactaggcctactaaccaacacactaaccatataccaatgatggcgcgatgtaacacgagaaagcacataccaaggccaccacacaccacctgtccaaaaaggccttcgatacgggataatcctatttattacctcagaaatttttttcttcgcaggatttttctgagccttttaccactccagcctagcccctaccccccaattaggagggcactggcccccaacaggcatcaccccgctaaatcccctagaagtcccactcctaaacacatccgtattactcgcatcaggagtatcaatcacctgagctcaccatagtctaatagaaaacaaccgaaaccaaataattcaagcactgcttattacaattttactgggtctctattttaccctcctacaagcctcagagtacttcgagtctcccttcaccatttccgacggcatctacggctcaacattttttgtagccacaggcttccacggacttcacgtcattattggctcaactttcctcactatctgcttcatccgccaactaatatttcactttacatccaaacatcactttggcttcgaagccgccgcctgatactggcattttgtagatgtggtttgactatttctgtatgtctccatctattgatgagggtcttactcttttagtataaatagtaccgttaacttccaattaactagttttgacaacattcaaaaaagagtaataaacttcgccttaattttaataatcaacaccctcctagccttactactaataattattacattttgactaccacaactcaacggctacatagaaaaatccaccccttacgagtgcggcttcgaccctatatcccccgcccgcgtccctttctccataaaattcttcttagtagctattaccttcttattatttgatctagaaattgccctccttttacccctaccatgagccctacaaacaactaacctgccactaatagttatgtcatccctcttattaatcatcatcctagccctaagtctggcctatgagtgactacaaaaaggattagactgaaccgaattggtatatagtttaaacaaaacgaatgatttcgactcattaaattatgataatcatatttaccaaatgcccctcatttacataaatattatactagcatttaccatctcacttctaggaatactagtatatcgctcacacctcatatcctccctactatgcctagaaggaataatactatcgctgttcattatagctactctcataaccctcaacacccactccctcttagccaatattgtgcctattgccatactagtctttgccgcctgcgaagcagcggtgggcctagccctactagtctcaatctccaacacatatggcctagactacgtacataacctaaacctactccaatgctaaaactaatcgtcccaacaattatattactaccactgacatgactttccaaaaaacacataatttgaatcaacacaaccacccacagcctaattattagcatcatccctctactattttttaaccaaatcaacaacaacctatttagctgttccccaaccttttcctccgaccccctaacaacccccctcctaatactaactacctgactcctacccctcacaatcatggcaagccaacgccacttatccagtgaaccactatcacgaaaaaaactctacctctctatactaatctccctacaaatctccttaattataacattcacagccacagaactaatcatattttatatcttcttcgaaaccacacttatccccaccttggctatcatcacccgatgaggcaaccagccagaacgcctgaacgcaggcacatacttcctattctacaccctagtaggctcccttcccctactcatcgcactaatttacactcacaacaccctaggctcactaaacattctactactcactctcactgcccaagaactatcaaactcctgagccaacaacttaatatgactagcttacacaatagcttttatagtaaagatacctctttacggactccacttatgactccctaaagcccatgtcgaagcccccatcgctgggtcaatagtacttgccgcagtactcttgaaactaggcggctatggtataatacgcctcacactcattctcaaccccctgacaaaacacatagcctaccccttccttgtactatccctatgaggcataattataacaagctccatctgcctacgacaaacagacctaaaatcgctcattgcatactcttcaatcagccacatagccctcgtagtaacagccattctcatccaaaccccctgaagcttcaccggcgcagtcattctcataatcgcccacggacttacatcctcattactattctgcctagcaaactcaaactacgaacgcactcacagtcgcatcataatcctctctcaaggacttcaaactctactcccactaatagctttttgatgacttctagcaagcctcgctaacctcgccttaccccccactattaacctactgggagaactctctgtgctagtaaccacgttctcctgatcaaatatcactctcctacttacaggactcaacatactagtcacagccctatactccctctacatatttaccacaacacaatggggctcactcacccaccacattaacaacataaaaccctcattcacacgagaaaacaccctcatgttcatacacctatcccccattctcctcctatccctcaaccccgacatcattaccgggttttcctcttgtaaatatagtttaaccaaaacatcagattgtgaatctgacaacagaggcttacgaccccttatttaccgagaaagctcacaagaactgctaactcatgcccccatgtctaacaacatggctttctcaacttttaaaggataacagctatccattggtcttaggccccaagaattttggtgcaactccaaataaaagtaataaccatgcacactactataaccaccctaaccctaacttccctaattccccccatccttaccaccctcattaaccctaacaaaaaaaactcatacccccattatgtaaaatccattgtcgcatccacctttattatcagtctcttccccacaacaatattcatgtgcctagaccaagaagttattatctcgaactgacactgagccacaacccaaacaacccagctctccctaagcttcaaactagactacttctccataatattcatccctgtagcattgttcgttacatggtccatcatagaattctcactgtgatatataaactcagacccaaacattaatcagttcttcaaatatctactcatcttcctaattaccatactaatcttagttaccgctaacaacctattccaactgttcatcggctgagagggcgtaggaattatatccttcttgctcatcagttgatgatacgcccgagcagatgccaacacagcagccattcaagcaatcctatacaaccgtatcggcgatatcggtttcatcctcgccttagcatgatttatcctacactccaactcatgagacccacaacaaatagcccttctaaacgctaatccaagcctcaccccactactaggcctcctcctagcagcagcaggcaaatcagcccaattaggtctccacccctgactcccctcagccatagaaggccccaccccagtctcagccctactccactcaagcactatagttgtagcaggaatcttcttactcatccgcttccaccccctagcagaaaataacccactaatccaaactctaacactatgcttaggcgctatcaccactctgttcgcagcagtctgcgcccttacacaaaatgacatcaaaaaaatcgtagccttctccacttcaagtcaactaggactcataatagttacaatcggcatcaaccaaccacacctagcattcctgcacatctgtacccacgccttcttcaaagccatactatttatgtgctccgggtccatcatccacaaccttaacaatgaacaagatattcgaaaaataggaggactactcaaaaccatacctctcacttcaacctccctcaccattggcagcctagcattagcaggaatacctttcctcacaggtttctactccaaagaccacatcatcgaaaccgcaaacatatcatacacaaacgcctgagccctatctattactctcatcgctacctccctgacaagcgcctatagcactcgaataatccttctcaccctaacaggtcaacctcgcttccccacccttactaacattaacgaaaataaccccaccctactaaaccccattaaacgcctggcagccggaagcctattcgcaggatttctcattactaacaacatttcccccgcatcccccttccaaacaacaatccccctctacctaaaactcacagccctcgctgtcactttcctaggacttctaacagccctagacctcaactacctaaccaacaaacttaaaataaaatccccactatgcacattttatttctccaacatactcggattctaccctagcatcacacaccgcacaatcccctatctaggccttcttacgagccaaaacctgcccctactcctcctagacctaacctgactagaaaagctattacctaaaacaatttcacagcaccaaatctccacctccatcatcacctcaacccaaaaaggcataattaaactttacttcctctctttcttcttcccactcatcctaaccctactcctaatcacataacctattcccccgagcaatctcaattacaatatatacaccaacaaacaatgttcaaccagtaactactactaatcaacgcccataatcatacaaagcccccgcaccaataggatcctcccgaatcaaccctgacccctctccttcataaattattcagcttcctatactattaaagtttaccacaaccaccaccccatcatactctttcacccacagcaccaatcctacctccatcgctaaccccactaaaacactcaccaagacctcaacccctgacccccatgcctcaggatactcctcaatagccatcgctgtagtatatccaaagacaaccatcattccccctaaataaattaaaaaaactattaagcccatataacctcccccaaaattcagaataataacacacccgaccacaccgctaacaatcaatactaaacccccataaataggagaaggcttagaagaaaaccccacaaaccccattactaaacccacactcaacagaaacaaagcatacatcattattctcgcacggactacaaccacgaccaatgatatgaaaaaccatcgttgtatttcaactacaagaacaccaatgaccccaatacgcaaaattaaccccctaataaaattaattaaccgctcattcatcgacctccccaccccatccaacatctccgcatgatgaaacttcggctcactccttggcgcctgcctgatcctccaaatcaccacaggactattcctagccatgcactactcaccagacgcctcaaccgccttttcatcaatcgcccacatcactcgagacgtaaattatggctgaatcatccgctaccttcacgccaatggcgcctcaatattctttatctgcctcttcctacacatcgggcgaggcctatattacggatcatttctctactcagaaacctgaaacatcggcattatcctcctgcttgcaactatagcaacagccttcataggctatgtcctcccgtgaggccaaatatcattctgaggggccacagtaattacaaacttactatccgccatcccatacattgggacagacctagttcaatgaatctgaggaggctactcagtagacagtcccaccctcacacgattctttacctttcacttcatcttgcccttcattattgcagccctagcagcactccacctcctattcttgcacgaaacgggatcaaacaaccccctaggaatcacctcccattccgataaaatcaccttccacccttactacacaatcaaagacgccctcggcttacttctcttccttctctccttaatgacattaacactattctcaccagacctcctaggcgacccagacaattataccctagccaaccccttaaacacccctccccacatcaagcccgaatgatatttcctattcgcctacacaattctccgatccgtccctaacaaactaggaggcgtccttgccctattactatccatcctcatcctagcaataatccccatcctccatatatccaaacaacaaagcataatatttcgcccactaagccaatcactttattgactcctagccgcagacctcctcattctaacctgaatcggaggacaaccagtaagctacccttttaccatcattggacaagtagcatccgtactatacttcacaacaatcctaatcctaataccaactatctccctaattgaaaacaaaatactcaaatgggcctgtccttgtagtataaactaatacaccagtcttgtaaaccggagatgaaaacctttttccaaggacaaatcagagaaaaagtctttaactccaccattagcacccaaagctaagattctaatttaaactattctctgttctttcatggggaagcagatttgggtgccacccaagtattgactcacccatcaacaaccgctatgtatttcgtacattactgccagccaacatgaatattgtacggtaccataaatacttgaccacctgtagtacataaaaacccaatccacatcaaaaccccctccccatgcttacaagcaagtacagcaatcaaccctcaactatcacacatcaactgcaactccaaagtcacccctcacccattaggataccaacaaacctacccatccttaacagtacatagtacataaagccatttaccgtacatagcacattacagtcaaatcccttctcgtccccatggatgacccccctcagataggggtcccttgaccaccatcctccgtgaaatcaatatcccgcacaagagtgctactctcctcgctccgggcccataacacttgggggtagctaaagtgaactgtatccgacatctggttcctacttcagggtcataaaacctaaatagcccacacgttccccttaaataagacatcacgatg

SEQ ID NO: 543 - DNA, 16570 bp, Homo sapiens mitochondrial
  3108: "n" refers to a nucleotide at position 3107 of the Cambridge Reference Sequence (CRS, Anderson et al. 1981 Nature 290:457-465), later determined to be absent from the human mtDNA sequence according to the revised CRS (rCRS, Andrews et al. 1999 Nature Genetics 23:147); "n" therefore represents a single nucleotide deletion at a position corresponding to nucleotide 3107 of SEQ ID NO:1 as provided herein.
gatcacaggtctatcaccctattaaccactcacgggagctctccatgcatttggtattttcgtctggggggtatgcacgcgatagcattgcgagacgctggagccggagcaccctatgtcgcagtatctgtctttgattcctgcctcatcctattatttatcgcacctacgttcaatattacaggcgaacatacttactaaagtgtgttaattaattaatgcttgtaggacataataataacaattgaatgtctgcacagccgctttccacacagacatcataacaaaaaatttccaccaaaccccccctcccccgccttctggccacagcacttaaacacatctctgccaaaccccaaaaacaaagaaccctaacaccagcctaaccagatttcaaattttatcttttggcggtatgcacttttaacagtcaccccccaactaacacattattttcccctcccactcccatactactaatctcatcaatacaacccccgcccatcctacccagcacacacacaccgctgctaaccccataccccgaaccaaccaaaccccaaagacaccccccacagtttatgtagcttacctcctcaaagcaatacactgaaaatgtttagacgggctcacatcaccccataaacaaataggtttggtcctagcctttctattagctcttagtaagattacacatgcaagcatccccgttccagtgagttcaccctctaaatcaccacgatcaaaagggacaagcatcaagcacgcagcaatgcagctcaaaacgcttagcctagccacacccccacgggaaacagcagtgattaacctttagcaataaacgaaagtttaactaagctatactaaccccagggttggtcaatttcgtgccagccaccgcggtcacacgattaacccaagtcaatagaagccggcgtaaagagtgttttagatcaccccctccccaataaagctaaaactcacctgagttgtaaaaaactccagttgacacaaaatagactacgaaagtggctttaacatatctgaacacacaatagctaagacccaaactgggattagataccccactatgcttagccctaaacctcaacagttaaatcaacaaaactgctcgccagaacactacgagccacagcttaaaactcaaaggacctggcggtgcttcatatccctctagaggagcctgttctgtaatcgataaaccccgatcaacctcaccacctcttgctcagcctatataccgccatcttcagcaaaccctgatgaaggctacaaagtaagcgcaagtacccacgtaaagacgttaggtcaaggtgtagcccatgaggtggcaagaaatgggctacattttctaccccagaaaactacgatagcccttatgaaacttaagggtcgaaggtggatttagcagtaaactgagagtagagtgcttagttgaacagggccctgaagcgcgtacacaccgcccgtcaccctcctcaagtatacttcaaaggacatttaactaaaacccctacgcatttatatagaggagacaagtcgtaacatggtaagtgtactggaaagtgcacttggacgaaccagagtgtagcttaacacaaagcacccaacttacacttaggagatttcaacttaacttgaccgctctgagctaaacctagccccaaacccactccaccttactaccagacaaccttagccaaaccatttacccaaataaagtataggcgatagaaattgaaacctggcgcaatagatatagtaccgcaagggaaagatgaaaaattataaccaagcataatatagcaaggactaacccctataccttctgcataatgaattaactagaaataactttgcaaggagagccaaagctaagacccccgaaaccagacgagctacctaagaacagctaaaagagcacacccgtctatgtagcaaaatagtgggaagatttataggtagaggcgacaaacctaccgagcctggtgatagctggttgtccaagatagaatcttagttcaactttaaatttgcccacagaaccctctaaatccccttgtaaatttaactgttagtccaaagaggaacagctctttggacactaggaaaaaaccttgtagagagagtaaaaaatttaacacccatagtaggcctaaaagcagccaccaattaagaaagcgttcaagctcaacacccactacctaaaaaatcccaaacatataactgaactcctcacacccaattggaccaatctatcaccctatagaagaactaatgttagtataagtaacatgaaaacattctcctccgcataagcctgcgtcagattaaaacactgaactgacaattaacagcccaatatctacaatcaaccaacaagtcattattaccctcactgtcaacccaacacaggcatgctcataaggaaaggttaaaaaaagtaaaaggaactcggcaaatcttaccccgcctgtttaccaaaaacatcacctctagcatcaccagtattagaggcaccgcctgcccagtgacacatgtttaacggccgcggtaccctaaccgtgcaaaggtagcataatcacttgttccttaaatagggacctgtatgaatggctccacgagggttcagctgtctcttacttttaaccagtgaaattgacctgcccgtgaagaggcgggcataacacagcaagacgagaagaccctatggagctttaatttattaatgcaaacagtacctaacaaacccacaggtcctaaactaccaaacctgcattaaaaatttcggttggggcgacctcggagcagaacccaacctccgagcagtacatgctaagacttcaccagtcaaagcgaactactatactcaattgatccaataacttgaccaacggaacaagttaccctagggataacagcgcaatcctattctagagtccatatcaacaatagggtttacgacctcgatgttggatcaggacatcccgatggtgcagccgctattaaaggttcgtttgttcaacgattaaagtcctacgtgatctgagttcagaccggagtaatccaggtcggtttctatctacnttcaaattcctccctgtacgaaaggacaagagaaataaggcctacttcacaaagcgccttcccccgtaaatgatatcatctcaacttagtattatacccacacccacccaagaacagggtttgttaagatggcagagcccggtaatcgcataaaacttaaaactttacagtcagaggttcaattcctcttcttaacaacatacccatggccaacctcctactcctcattgtacccattctaatcgcaatggcattcctaatgcttaccgaacgaaaaattctaggctatatacaactacgcaaaggccccaacgttgtaggcccctacgggctactacaacccttcgctgacgccataaaactcttcaccaaagagcccctaaaacccgccacatctaccatcaccctctacatcaccgccccgaccttagctctcaccatcgctcttctactatgaacccccctccccatacccaaccccctggtcaacctcaacctaggcctcctatttattctagccacctctagcctagccgtttactcaatcctctgatcagggtgagcatcaaactcaaactacgccctgatcggcgcactgcgagcagtagcccaaacaatctcatatgaagtcaccctagccatcattctactatcaacattactaataagtggctcctttaacctctccacccttatcacaacacaagaacacctctgattactcctgccatcatgacccttggccataatatgatttatctccacactagcagagaccaaccgaacccccttcgaccttgccgaaggggagtccgaactagtctcaggcttcaacatcgaatacgccgcaggccccttcgccctattcttcatagccgaatacacaaacattattataataaacaccctcaccactacaatcttcctaggaacaacatatgacgcactctcccctgaactctacacaacatattttgtcaccaagaccctacttctaacctccctgttcttatgaattcgaacagcatacccccgattccgctacgaccaactcatacacctcctatgaaaaaacttcctaccactcaccctagcattacttatatgatatgtctccatacccattacaatctccagcattccccctcaaacctaagaaatatgtctgataaaagagttactttgatagagtaaataataggagcttaaacccccttatttctaggactatgagaatcgaacccatccctgagaatccaaaattctccgtgccacctatcacaccccatcctaaagtaaggtcagctaaataagctatcgggcccataccccgaaaatgttggttatacccttcccgtactaattaatcccctggcccaacccgtcatctactctaccatctttgcaggcacactcatcacagcgctaagctcgcactgattttttacctgagtaggcctagaaataaacatgctagcttttattccagttctaaccaaaaaaataaaccctcgttccacagaagctgccatcaagtatttcctcacgcaagcaaccgcatccataatccttctaatagctatcctcttcaacaatatactctccggacaatgaaccataaccaatactaccaatcaatactcatcattaataatcataatggctatagcaataaaactaggaatagccccctttcacttctgagtcccagaggttacccaaggcacccctctgacatccggcctgcttcttctcacatgacaaaaactagcccccatctcaatcatataccaaatctctccctcactaaacgtaagccttctcctcactctctcaatcttatccatcatagcaggcagttgaggtggattaaaccaaacccagctacgcaaaatcttagcatactcctcaattacccacataggatgaataatagcagttctaccgtacaaccctaacataaccattcttaatttaactatttatattatcctaactactaccgcattcctactactcaacttaaactccagcaccacgaccctactactatctcgcacctgaaacaagctaacatgactaacacccttaattccatccaccctcctctccctaggaggcctgcccccgctaaccggctttttgcccaaatgggccattatcgaagaattcacaaaaaacaatagcctcatcatccccaccatcatagccaccatcaccctccttaacctctacttctacctacgcctaatctactccacctcaatcacactactccccatatctaacaacgtaaaaataaaatgacagtttgaacatacaaaacccaccccattcctccccacactcatcgcccttaccacgctactcctacctatctccccttttatactaataatcttatagaaatttaggttaaatacagaccaagagccttcaaagccctcagtaagttgcaatacttaatttctgtaacagctaaggactgcaaaaccccactctgcatcaactgaacgcaaatcagccactttaattaagctaagcccttactagaccaatgggacttaaacccacaaacacttagttaacagctaagcaccctaatcaactggcttcaatctacttctcccgccgccgggaaaaaaggcgggagaagccccggcaggtttgaagctgcttcttcgaatttgcaattcaatatgaaaatcacctcggagctggtaaaaagaggcctaacccctgtctttagatttacagtccaatgcttcactcagccattttacctcacccccactgatgttcgccgaccgttgactattctctacaaaccacaaagacattggaacactatacctattattcggcgcatgagctggagtcctaggcacagctctaagcctccttattcgagccgagctgggccagccaggcaaccttctaggtaacgaccacatctacaacgttatcgtcacagcccatgcatttgtaataatcttcttcatagtaatacccatcataatcggaggctttggcaactgactagttcccctaataatcggtgcccccgatatggcgtttccccgcataaacaacataagcttctgactcttacctccctctctcctactcctgctcgcatctgctatagtggaggccggagcaggaacaggttgaacagtctaccctcccttagcagggaactactcccaccctggagcctccgtagacctaaccatcttctccttacacctagcaggtgtctcctctatcttaggggccatcaatttcatcacaacaattatcaatataaaaccccctgccataacccaataccaaacgcccctcttcgtctgatccgtcctaatcacagcagtcctacttctcctatctctcccagtcctagctgctggcatcactatactactaacagaccgcaacctcaacaccaccttcttcgaccccgccggaggaggagaccccattctataccaacacctattctgatttttcggtcaccctgaagtttatattcttatcctaccaggcttcggaataatctcccatattgtaacttactactccggaaaaaaagaaccatttggatacataggtatggtctgagctatgatatcaattggcttcctagggtttatcgtgtgagcacaccatatatttacagtaggaatagacgtagacacacgagcatatttcacctccgctaccataatcatcgctatccccaccggcgtcaaagtatttagctgactcgccacactccacggaagcaatatgaaatgatctgctgcagtgctctgagccctaggattcatctttcttttcaccgtaggtggcctgactggcattgtattagcaaactcatcactagacatcgtactacacgacacgtactacgttgtagcccacttccactatgtcctatcaataggagctgtatttgccatcataggaggcttcattcactgatttcccctattctcaggctacaccctagaccaaacctacgccaaaatccatttcactatcatattcatcggcgtaaatctaactttcttcccacaacactttctcggcctatccggaatgccccgacgttactcggactaccccgatgcatacaccacatgaaacatcctatcatctgtaggctcattcatttctctaacagcagtaatattaataattttcatgatttgagaagccttcgcttcgaagcgaaaagtcctaatagtagaagaaccctccataaacctggagtgactatatggatgccccccaccctaccacacattcgaagaacccgtatacataaaatctagacaaaaaaggaaggaatcgaaccccccaaagctggtttcaagccaaccccatggcctccatgactttttcaaaaaggtattagaaaaaccatttcataactttgtcaaagttaaattataggctaaatcctatatatcttaatggcacatgcagcgcaagtaggtctacaagacgctacttcccctatcatagaagagcttatcacctttcatgatcacgccctcataatcattttccttatctgcttcctagtcctgtatgcccttttcctaacactcacaacaaaactaactaatactaacatctcagacgctcaggaaatagaaaccgtctgaactatcctgcccgccatcatcctagtcctcatcgccctcccatccctacgcatcctttacataacagacgaggtcaacgatccctcccttaccatcaaatcaattggccaccaatggtactgaacctacgagtacaccgactacggcggactaatcttcaactcctacatacttcccccattattcctagaaccaggcgacctgcgactccttgacgttgacaatcgagtagtactcccgattgaagcccccattcgtataataattacatcacaagacgtcttgcactcatgagctgtccccacattaggcttaaaaacagatgcaattcccggacgtctaaaccaaaccactttcaccgctacacgaccgggggtatactacggtcaatgctctgaaatctgtggagcaaaccacagtttcatgcccatcgtcctagaattaattcccctaaaaatctttgaaatagggcccgtatttaccctatagcaccccctctaccccctctagagcccactgtaaagctaacttagcattaaccttttaagttaaagattaagagaaccaacacctctttacagtgaaatgccccaactaaatactaccgtatggcccaccataattacccccatactccttacactattcctcatcacccaactaaaaatattaaacacaaactaccacctacctccctcaccaaagcccataaaaataaaaaattataacaaaccctgagaaccaaaatgaacgaaaatctgttcgcttcattcattgcccccacaatcctaggcctacccgccgcagtactgatcattctatttccccctctattgatccccacctccaaatatctcatcaacaaccgactaatcaccacccaacaatgactaatcaaactaacctcaaaacaaatgataaccatacacaacactaaaggacgaacctgatctcttatactagtatccttaatcatttttattgccacaactaacctcctcggactcctgcctcactcatttacaccaaccacccaactatctataaacctagccatggccatccccttatgagcgggcgcagtgattataggctttcgctctaagattaaaaatgccctagcccacttcttaccacaaggcacacctacaccccttatccccatactagttattatcgaaaccatcagcctactcattcaaccaatagccctggccgtacgcctaaccgctaacattactgcaggccacctactcatgcacctaattggaagcgccaccctagcaatatcaaccattaaccttccctctacacttatcatcttcacaattctaattctactgactatcctagaaatcgctgtcgccttaatccaagcctacgttttcacacttctagtaagcctctacctgcacgacaacacataatgacccaccaatcacatgcctatcatatagtaaaacccagcccatgacccctaacaggggccctctcagccctcctaatgacctccggcctagccatgtgatttcacttccactccataacgctcctcatactaggcctactaaccaacacactaaccatataccaatgatggcgcgatgtaacacgagaaagcacataccaaggccaccacacaccacctgtccaaaaaggccttcgatacgggataatcctatttattacctcagaagtttttttcttcgcaggatttttctgagccttttaccactccagcctagcccctaccccccaattaggagggcactggcccccaacaggcatcaccccgctaaatcccctagaagtcccactcctaaacacatccgtattactcgcatcaggagtatcaatcacctgagctcaccatagtctaatagaaaacaaccgaaaccaaataattcaagcactgcttattacaattttactgggtctctattttaccctcctacaagcctcagagtacttcgagtctcccttcaccatttccgacggcatctacggctcaacattttttgtagccacaggcttccacggacttcacgtcattattggctcaactttcctcactatctgcttcatccgccaactaatatttcactttacatccaaacatcactttggcttcgaagccgccgcctgatactggcattttgtagatgtggtttgactatttctgtatgtctccatctattgatgagggtcttactcttttagtataaatagtaccgttaacttccaattaactagttttgacaacattcaaaaaagagtaataaacttcgccttaattttaataatcaacaccctcctagccttactactaataattattacattttgactaccacaactcaacggctacatagaaaaatccaccccttacgagtgcggcttcgaccctatatcccccgcccgcgtccctttctccataaaattcttcttagtagctattaccttcttattatttgatctagaaattgccctccttttacccctaccatgagccctacaaacaactaacctgccactaatagttatgtcatccctcttattaatcatcatcctagccctaagtctggcctatgagtgactacaaaaaggattagactgaaccgaattggtatatagtttaaacaaaacgaatgatttcgactcattaaattatgataatcatatttaccaaatgcccctcatttacataaatattatactagcatttaccatctcacttctaggaatactagtatatcgctcacacctcatatcctccctactatgcctagaaggaataatactatcgctgttcattatagctactctcataaccctcaacacccactccctcttagccaatattgtgcctattgccatactagtctttgccgcctgcgaagcagcggtgggcctagccctactagtctcaatctccaacacatatggcctagactacgtacataacctaaacctactccaatgctaaaactaatcgtcccaacaattatattactaccactgacatgactttccaaaaaacacataatttgaatcaacacaaccacccacagcctaattattagcatcatccctctactattttttaaccaaatcaacaacaacctatttagctgttccccaaccttttcctccgaccccctaacaacccccctcctaatactaactacctgactcctacccctcacaatcatggcaagccaacgccacttatccagtgaaccactatcacgaaaaaaactctacctctctatactaatctccctacaaatctccttaattataacattcacagccacagaactaatcatattttatatcttcttcgaaaccacacttatccccaccttggctatcatcacccgatgaggcaaccagccagaacgcctgaacgcaggcacatacttcctattctacaccctagtaggctcccttcccctactcatcgcactaatttacactcacaacaccctaggctcactaaacattctactactcactctcactgcccaagaactatcaaactcctgagccaacaacttaatatgactagcttacacaatagcttttatagtaaagatacctctttacggactccacttatgactccctaaagcccatgtcgaagcccccatcgctgggtcaatagtacttgccgcagtactcttaaaactaggcggctatggtataatacgcctcacactcattctcaaccccctgacaaaacacatagcctaccccttccttgtactatccctatgaggcataattataacaagctccatctgcctacgacaaacagacctaaaatcgctcattgcatactcttcaatcagccacatagccctcgtagtaacagccattctcatccaaaccccctgaagcttcaccggcgcagtcattctcataatcgcccacgggcttacatcctcattactattctgcctagcaaactcaaactacgaacgcactcacagtcgcatcataatcctctctcaaggacttcaaactctactcccactaatagctttttgatgacttctagcaagcctcgctaacctcgccttaccccccactattaacctactgggagaactctctgtgctagtaaccacgttctcctgatcaaatatcactctcctacttacaggactcaacatactagtcacagccctatactccctctacatatttaccacaacacaatggggctcactcacccaccacattaacaacataaaaccctcattcacacgagaaaacaccctcatgttcatacacctatcccccattctcctcctatccctcaaccccgacatcattaccgggttttcctcttgtaaatatagtttaaccaaaacatcagattgtgaatctgacaacagaggcttacgaccccttatttaccgagaaagctcacaagaactgctaactcatgcccccatgtctaacaacatggctttctcaacttttaaaggataacagctatccattggtcttaggccccaaaaattttggtgcaactccaaataaaagtaataaccatgcacactactataaccaccctaaccctgacttccctaattccccccatccttaccaccctcgttaaccctaacaaaaaaaactcatacccccattatgtaaaatccattgtcgcatccacctttattatcagtctcttccccacaacaatattcatgtgcctagaccaagaagttattatctcgaactgacactgagccacaacccaaacaacccagctctccctaagcttcaaactagactacttctccataatattcatccctgtagcattgttcgttacatggtccatcatagaattctcactgtgatatataaactcagacccaaacattaatcagttcttcaaatatctactcatcttcctaattaccatactaatcttagttaccgctaacaacctattccaactgttcatcggctgagagggcgtaggaattatatccttcttgctcatcagttgatgatacgcccgagcagatgccaacacagcagccattcaagcaatcctatacaaccgtatcggcgatatcggtttcatcctcgccttagcatgatttatcctacactccaactcatgagacccacaacaaatagcccttctaaacgctaatccaagcctcaccccactactaggcctcctcctagcagcagcaggcaaatcagcccaattaggtctccacccctgactcccctcagccatagaaggccccaccccagtctcagccctactccactcaagcactatagttgtagcaggaatcttcttactcatccgcttccaccccctagcagaaaatagcccactaatccaaactctaacactatgcttaggcgctatcaccactctgttcgcagcagtctgcgcccttacacaaaatgacatcaaaaaaatcgtagccttctccacttcaagtcaactaggactcataatagttacaatcggcatcaaccaaccacacctagcattcctgcacatctgtacccacgccttcttcaaagccatactatttatgtgctccgggtccatcatccacaaccttaacaatgaacaagatattcgaaaaataggaggactactcaaaaccatacctctcacttcaacctccctcaccattggcagcctagcattagcaggaatacctttcctcacaggtttctactccaaagaccacatcatcgaaaccgcaaacatatcatacacaaacgcctgagccctatctattactctcatcgctacctccctgacaagcgcctatagcactcgaataattcttctcaccctaacaggtcaacctcgcttccccacccttactaacattaacgaaaataaccccaccctactaaaccccattaaacgcctgacagccggaagcctattcgcaggatttctcattactaacaacatttcccccgcatcccccttccaaacaacaatccccctctacctaaaactcacagccctcgctgtcactttcctaggacttctaacagccctagacctcaactacctaaccaacaaacttaaaataaaatccccactatgcacattttatttctccaacatactcggattctaccctagcatcacacaccgcacaatcccctatctaggccttcttacgagccaaaacctgcccctactcctcctagacctaacctgactagaaaagctattacctaaaacaatttcacagcaccaaatctccacctccatcatcacctcaacccaaaaaggcataattaaactttacttcctctctttcttcttcccactcatcctaaccctactcctaatcacataacctattcccccgagcaatctcaattacaatatatacaccaacaaacaatgttcaaccagtaactactactaatcaacgcccataatcatacaaagcccccgcaccaataggatcctcccgaatcaaccctgacccctctccttcataaattattcagcttcctacactattaaagtttaccacaaccaccaccccatcatactctttcacccacaacaccaatcctacctccatcgctaaccccactaaaacactcaccaagacctcaacccctgacccccatgcctcaggatactcctcaatagccatcgctgtagtatatccaaagacaaccatcattccccctaaataaattaaaaaaactattaaacccatataacctcccccaaaattcagaataataacacacccgaccacaccgctaacaatcaatactaaacccccataaataggagaaggcttagaagaaaaccccacaaaccccattactaaacccacactcaacagaaacaaagcatacatcattattctcgcacggactacaaccacgaccaatgatatgaaaaaccatcgttgtatttcaactacaagaacaccaatgaccccaatacgcaaaactaaccccctaataaaattaattaaccactcattcatcgacctccccaccccatccaacatctccgcatgatgaaacttcggctcactccttggcgcctgcctgatcctccaaatcaccacaggactattcctagccatgcactactcaccagacgcctcaaccgccttttcatcaatcgcccacatcactcgagacgtaaattatggctgaatcatccgctaccttcacgccaatggcgcctcaatattctttatctgcctcttcctacacatcgggcgaggcctatattacggatcatttctctactcagaaacctgaaacatcggcattatcctcctgcttgcaactatagcaacagccttcataggctatgtcctcccgtgaggccaaatatcattctgaggggccacagtaattacaaacttactatccgccatcccatacattgggacagacctagttcaatgaatctgaggaggctactcagtagacagtcccaccctcacacgattctttacctttcacttcatcttgcccttcattattgcagccctagcagcactccacctcctattcttgcacgaaacgggatcaaacaaccccctaggaatcacctcccattccgataaaatcaccttccacccttactacacaatcaaagacgccctcggcttacttctcttccttctctccttaatgacattaacactattctcaccagacctcctaggcgacccagacaattataccctagccaaccccttaaacacccctccccacatcaagcccgaatgatatttcctattcgcctacacaattctccgatccgtccctaacaaactaggaggcgtccttgccctattactatccatcctcatcctagcaataatccccatcctccatatatccaaacaacaaagcataatatttcgcccactaagccaatcactttattgactcctagccgcagacctcctcattctaacctgaatcggaggacaaccagtaagctacccttttaccatcattggacaagtagcatccgtactatacttcacaacaatcctaatcctaataccaactatctccctaattgaaaacaaaatactcaaatgggcctgtccttgtagtataaactaatacaccagtcttgtaaaccggagatgaaaacctttttccaaggacaaatcagagaaaaagtctttaactccaccattagcacccaaagctaagattctaatttaaactattctctgttctttcatggggaagcagatttgggtaccacccaagtattgactcacccatcaacaaccgctatgtatttcgtacattactgccagccaccatgaatattgtacggtaccataaatacttgaccacctgtagtacataaaaacccaatccacatcaaaaccccctccccatgcttacaagcaagtacagcaatcaaccctcaactatcacacatcaactgcaactccaaagccacccctcacccactaggataccaacaaacctacccacccttaacagtacatagtacataaagccatttaccgtacatagcacattacagtcaaatcccttctcgtccccatggatgacccccctcagataggggtcccttgaccaccatcctccgtgaaatcaatatcccgcacaagagtgctactctcctcgctccgggcccataacacttgggggtagctaaagtgaactgtatccgacatctggttcctacttcagggccataaagcctaaatagcccacacgttccccttaaataagacatcacgatg

SEQ ID NO: 544 - DNA, 16570 bp, Homo sapiens mitochondrial
  3108: "n" refers to a nucleotide at position 3107 of the Cambridge Reference Sequence (CRS, Anderson et al. 1981 Nature 290:457-465), later determined to be absent from the human mtDNA sequence according to the revised CRS (rCRS, Andrews et al. 1999 Nature Genetics 23:147); "n" therefore represents a single nucleotide deletion at a position corresponding to nucleotide 3107 of SEQ ID NO:1 as provided herein.
gatcacaggtctatcaccctattaaccactcacgggagctctccatgcatttggtattttcgtctggggggtgtgcacgcgatagcattgcgagacgctggagccggagcaccctatgtcgcagtatctgtctttgattcctgcctcatcctattatttatcgcacctacgttcaatattacagacggacatacttactaaagtgtgttaattaattaatgcttgtaagacataataataacaattgaatgtctgcacagccgctttccacacagacatcataacaaaaaattttcaccaaaccccccctccccccccgcttctggccacagcacttaaacacatctctgccaaaccccaaaaacaaagaaccctaacaccagcctaaccagatttcaaattttatcttttggcggtatgcacttttaacagtcaccccccaactaacacattattttcccctctcactcccatactactaatctcatcaacacaacccccgcccatcctacccagcacacacaccgctgctaaccccataccccgaaccaaccaaaccccaaagacaccccccacagtttatgtagcttacctcctcaaagcaatacactgaaaatgtttagacgggctcacatcaccccataaacaaataggtttggtcctagcctttctattagctcttagtaagattacacatgcaagcatccccgttccagtgagttcaccctctaaatcaccacgatcaaaagggacaagcatcaagcacgcagcaatgcagctcaaaacgcttagcctagccacacccccacgggaaacagcagtgattaacctttagcaataaacgaaagtttaactaagctatactaaccccagggttggtcaatttcgtgccagccaccgcggtcacacgattaacccaagtcaatagaagccggcgtaaagagtgttttagatcaccccctccccaataaagctaaaactcacctgagttgtaaaaaactccagttgacacaaaatagactacgaaagtggctttaacatatctgaacacacaatagctaagacccaaactgggattagataccccactatgcttagccctaaacctcaacagttaaatcaacaaaactgctcgccagaacactacgagccacagcttaaaactcaaaggacctggcggtgcttcatatccctctagaggagcctgttctgtaatcgataaaccccgatcaacctcaccacctcttgctcagcctatataccgccatcttcagcaaaccctgatgaaggctacaaagtaagcgcaagtacccacgtaaagacgttaggtcaaggtgtagcccatgaggtggcaagaaatgggctacattttctaccccagaaaactacgatagcccttatgaaacttaagggtcgaaggtggatttagcagtaaactgagagtagagtgcttagttgaacagggccctgaagcgcgtacacaccgcccgtcaccctcctcaagtatacttcaaaggacatttaactaaaacccctacgcatttatatagaggagacaagtcgtaacatggtaagtgtactggaaagtgcacttggacgaaccagagtgtagcttaacacaaagcacccaacttacacttaggagatttcaacttaacttgaccgctctgagctaaacctagccccaaacccactccaccttactaccagacaaccttagccaaaccatttacccaaataaagtataggcgatagaaattgaaacctggcgcaatagatatagtaccgcaagggaaagatgaaaaattataaccaagcataatatagcaaggactaacccctataccttctgcataatgaattaactagaaataactttgcaaggagagccaaagctaagacccccgaaaccagacgagctacctaagaacagctaaaagagcacacccgtctatgtagcaaaatagtgggaagatttataggtagaggcgacaaacctaccgagcctggtgatagctggttgtccaagatagaatcttagttcaactttaaatttgcccacagaaccctctaaatccccttgtaaatttaactgttagtccaaagaggaacagctctttggacactaggaaaaaaccttgtagagagagtaaaaaatttaacacccatagtaggcctaaaagcagccaccaattaagaaagcgttcaagctcaacacccactacctaaaaaatcccaaacatataactgaactcctcacacccaattggaccaatctatcaccctatagaagaactaatgttagtataagtaacatgaaaacattctcctccgcataagcctgcgtcagattaaaacactgaactgacaattaacagcccaatatctacaatcaaccaacaagtcattattaccctcactgtcaacccaacacaggcatgctcataaggaaaggttaaaaaaagtaaaaggaactcggcaaatcttaccccgcctgtttaccaaaaacatcacctctagcatcaccagtattagaggcaccgcctgcccagtgacacatgtttaacggccgcggtaccctaaccgtgcaaaggtagcataatcacttgttccttaaatagggacctgtatgaatggctccacgagggttcagctgtctcttacttttaaccagtgaaattgacctgcccgtgaagaggcgggcatgacacagcaagacgagaagaccctatggagctttaatttattaatgcaaacagtacctaacaaacccacaggtcctaaactaccaaacctgcattaaaaatttcggttggggcgacctcggagcagaacccaacctccgagcagtacatgctaagacttcaccagtcaaagcgaactactatactcaattgatccaataacttgaccaacggaacaagttaccctagggataacagcgcaatcctattctagagtccatatcaacaatagggtttacgacctcgatgttggatcaggacatcccaatggtgcagccgctattaaaggttcgtttgttcaacgattaaagtcctacgtgatctgagttcagaccggagtaatccaggtcggtttctatctacnttcaaattcctccctgtacgaaaggacaagagaaataaggcctacttcacaaagcgccttcccccgtaaatgatatcatctcaacttagtattatacccacacccacccaagaacagggtttgttaagatggcagagcccggtaatcgcataaaacttaaaactttacagtcagaggttcaattcctcttcttaacaacatacccatggccaacctcctactcctcattgtacccattctaatcgcaatggcattcctaatgcttaccgaacgaaaaattctaggctatatacaactacgcaaaggccccaacgttgtaggcccctacgggctactacaacccttcgctgacgccataaaactcttcaccaaagagcccctaaaacccgccacatctaccatcaccctctacatcaccgccccgaccttagctctcaccatcgctcttctactatgaacccccctccccatacccaaccccctggtcaacctcaacctaggcctcctatttattctagccacctctagcctagccgtttactcaatcctctgatcagggtgagcatcaaactcaaactacgccctgatcggcgcactgcgagcagtagcccaaacaatctcatatgaagtcaccctagccatcattctactatcaacattactaataagtggctcctttaacctctccacccttatcacaacacaagaacacctctgattactcctgccatcatgacccttggccataatatgatttatctccacactagcagagaccaaccgaacccccttcgaccttgccgaaggggagtccgaactagtctcaggcttcaacatcgaatacgccgcaggccccttcgccctattcttcatagccgaatacacaaacattattataataaacaccctcaccactacaatcttcctaggaacaacatatgacgcactctcccctgaactctacacaacatattttgtcaccaagaccctacttctaacctccctgttcttatgaattcgaacagcatacccccgattccgctacgaccaactcatacacctcctatgaaaaaacttcctaccactcaccctagcattacttatatgacatgtctccatacccattacaatctccagcattccccctcaaacctaagaaatatgtctgataaaagagttactttgatagagtaaataataggagcttaaacccccttatttctaggactatgagaatcgaacccatccctgagaatccaaaattctccgtgccacctatcacaccccatcctaaagtaaggtcagctaaataagctatcgggcccataccccgaaaatgttggttatacccttcccgtactaattaatcccctggcccaacccgtcatctactctaccatctttgcaggcacactcatcacagcgctaagctcgcactgattttttacctgagtaggcctagaaataaacatgctagcttttattccagttctaaccaaaaaaataaaccctcgttccacagaagctgccatcaagtatttcctcacgcaagcaaccgcatccataatccttctaatagctatcctcttcaacaatatactctccggacaatgaaccataaccaatactaccaatcaatactcatcattaataatcataatggctatagcaataaaactaggaatagccccctttcacttctgagtcccagaggttacccaaggcacccctctgacatccggcctgcttcttctcacatgacaaaaactagcccccatctcaatcatataccaaatctctccctcactaaacgtaagccttctcctcactctctcaatcttatccatcatagcaggcagttgaggtggattaaaccaaacccagctacgcaaaatcttagcatactcctcaattacccacataggatgaataatagcagttctaccgtacaaccctaacataaccattcttaatttaactatttatattatcctaactactaccgcattcctactactcaacttaaactccagcaccacgaccctactactatctcgcacctgaaacaagctaacatgactaacacccttaattccatccaccctcctctccctaggaggcctgcccccgctaaccggctttttgcccaaatgggccattatcgaagaattcacaaaaaacaatagcctcatcatccccaccatcatagccaccatcaccctccttaacctctacttctacctacgcctaatctactccacctcaatcacactactccccatatctaacaacgtaaaaataaaatgacagtttgaacatacaaaacccaccccattcctccccacactcatcgcccttaccacgctactcctacctatctccccttttatactaataatcttatagaaatttaggttaaatacagaccaagagccttcaaagccctcagtaagttgcaatacttaatttctgtaacagctaaggactgcaaaaccccactctgcatcaactgaacgcaaatcagccactttaattaagctaagcccttactagaccaatgggacttaaacccacaaacacttagttaacagctaagcaccctaatcaactggcttcaatctacttctcccgccgccgggaaaaaaggcgggagaagccccggcaggtttgaagctgcttcttcgaatttgcaattcaatatgaaaatcacctcggagctggtaaaaagaggcctaacccctgtctttagatttacagtccaatgcttcactcagccattttacctcacccccactgatgttcgccgaccgttgactattctctacaaaccacaaagacattggaacactatacctattattcggcgcatgagctggagtcctaggcacagctctaagcctccttattcgagccgagctgggccagccaggcaaccttctaggtaacgaccacatctacaacgttatcgtcacagcccatgcatttgtaataatcttcttcatagtaatacccatcataatcggaggctttggcaactgactagttcccctaataatcggtgcccccgatatggcgtttccccgcataaacaacataagcttctgactcttacctccctctctcctactcctgctcgcatctgctatagtggaggccggagcaggaacaggttgaacagtctaccctcccttagcagggaactactcccaccctggagcctccgtagacctaaccatcttctccttacacctagcaggtgtctcctctatcttaggggccatcaatttcatcacaacaattatcaatataaaaccccctgccataacccaataccaaacgcccctcttcgtctgatccgtcctaatcacagcagtcctacttctcctatctctcccagtcctagctgctggcatcactatactactaacagaccgcaacctcaacaccaccttcttcgaccccgccggaggaggagaccccattctataccaacacctattctgatttttcggtcaccctgaagtttatattcttatcctaccaggcttcggaataatctcccatattgtaacttactactccggaaaaaaagaaccatttggatacataggtatggtctgagctatgatatcaattggcttcctagggtttatcgtgtgagcacaccatatatttacagtaggaatagacgtagacacacgagcatatttcacctccgctaccataatcatcgctatccccaccggcgtcaaagtatttagctgactcgccacactccacggaagcaatatgaaatgatctgctgcagtgctctgagccctaggattcatctttcttttcaccgtaggtggcctgactggcattgtattagcaaactcatcactagacatcgtactacacgacacgtactacgttgtagctcacttccactatgtcctatcaataggagctgtatttgccatcataggaggcttcattcactgatttcccctattctcaggctacaccctagaccaaacctacgccaaaatccatttcactatcatattcatcggcgtaaatctaactttcttcccacaacactttctcggcctatccggaatgccccgacgttactcggactaccccgatgcatacaccacatgaaacatcctatcatctgtaggctcattcatttctctaacagcagtaatattaataattttcatgatttgagaagccttcgcttcgaagcgaaaagtcctaatagtagaagaaccctccataaacctggagtgactatatggatgccccccaccctaccacacattcgaagaacccgtatacataaaatctagacaaaaaaggaaggaatcgaaccccccaaagctggtttcaagccaaccccatggcctccatgactttttcaaaaaggtattagaaaaaccatttcataactttgtcaaagttaaattataggctaaatcctatatatcttaatggcacatgcagcgcaagtaggtctacaagacgctacttcccctatcatagaagagcttatcacctttcatgatcacgccctcataatcattttccttatctgcttcctagtcctgtatgcccttttcctaacactcacaacaaaactaactaatactaacatctcagacgctcaggaaatagaaaccgtctgaactatcctgcccgccatcatcctagtcctcatcgccctcccatccctacgcatcctttacataacagacgaggtcaacgatccctcccttaccatcaaatcaattggccaccaatggtactgaacctacgagtacaccgactacggcggactaatcttcaactcctacatacttcccccattattcctagaaccaggcgacctgcgactccttgacgttgacaatcgagtagtactcccgattgaagcccccattcgtataataattacatcacaagacgtcttgcactcatgagctgtccccacattaggcttaaaaacagatgcaattcccggacgtctaaaccaaaccactttcaccgctacacgaccgggggtatactacggtcaatgctctgaaatctgtggagcaaaccacagtttcatgcccatcgtcctagaattaattcccctaaaaatctttgaaatagggcccgtatttaccctatagcaccccctctaccccctctagagcccactgtaaagctaacttagcattaaccttttaagttaaagattaagagaaccaacacctctttacagtgaaatgccccaactaaatactaccgtatggcccaccataattacccccatactccttacactattcctcatcacccaactaaaaatattaaacacaaactaccacctacctccctcaccaaagcccataaaaataaaaaattataacaaaccctgagaaccaaaatgaacgaaaatctgttcgcttcattcattgcccccacaatcctaggcctacccgccgcagtactgatcattctatttccccctctattgatccccacctccaaatatctcatcaacaaccgactaatcaccacccaacaatgactaatcaaactaacctcaaaacaaatgataaccatacacaacactaaaggacgaacctgatctcttatactagtatccttaatcatttttattgccacaactaacctcctcggactcctgcctcactcatttacaccaaccacccaactatctataaacctagccatggccatccccttatgagcgggcgcagtgattataggctttcgctctaagattaaaaatgccctagcccacttcttaccacaaggcacacctacaccccttatccccatactagttattatcgaaaccatcagcctactcattcaaccaatagccctggccgtacgcctaaccgctaacattactgcaggccacctactcatgcacctaattggaagcgccaccctagcaatatcaaccattaaccttccctctacacttatcatcttcacaattctaattctactgactatcctagaaatcgctgtcgccttaatccaagcctacgttttcacacttctagtaagcctctacctgcacgacaacacataatgacccaccaatcacatgcctatcatatagtaaaacccagcccatgacccctaacaggggccctctcagccctcctaatgacctccggcctagccatgtgatttcacttccactccataacgctcctcatactaggcctactaaccaacacactaaccatataccaatgatggcgcgacgtaacacgagaaagcacataccaaggccaccacacaccacctgtccaaaaaggccttcgatacgggataatcctatttattacctcagaagtttttttcttcgcaggatttttctgagccttttaccactccagcctagcccctaccccccaattaggagggcactggcccccaacaggcatcaccccgctaaatcccctagaagtcccactcctaaacacatccgtattactcgcatcaggagtatcaatcacctgagctcaccatagtctaatagaaaacaaccgaaaccaaataattcaagcactgcttattacaattttactgggtctctattttaccctcctacaagcctcagagtacttcgagtctcccttcaccatttccgacggcatctacggctcaacattttttgtagccacaggcttccacggacttcacgtcattattggctcaactttcctcactatctgcttcatccgccaactaatatttcactttacatccaaacatcactttggcttcgaagccgccgcctgatactggcattttgtagatgtggtttgactatttctgtatgtctccatctattgatgagggtcttactcttttagtataaatagtaccgttaacttccaattaactagttttgacaacattcaaaaaagagtaataaacttcgccttaattttaataatcaacaccctcctagccttactactaataattattacattttgactaccacaactcaacggctacatagaaaaatccaccccttacgagtgcggcttcgaccctatatcccccgcccgcgtccctttctccataaaattcttcttagtagctattaccttcttattatttgatctagaaattgccctccttttacccctaccatgagccctacaaacaactaacctgccactaatagttatgtcatccctcttattaatcatcatcctagccctaagtctggcctatgagtgactacaaaaaggattagactgagccgaattggtatatagtttaaacaaaacgaatgatttcgactcattaaattatgataatcatatttaccaaatgcccctcatttacataaatattatactagcatttaccatctcacttctaggaatactagtatatcgctcacacctcatatcctccctactatgcctagaaggaataatactatcgctgttcattatagctactctcataaccctcaacacccactccctcttagccaatattgtgcctattgccatactagtctttgccgcctgcgaagcagcggtgggcctagccctactagtctcaatctccaacacatatggcctagactacgtacataacctaaacctactccaatgctaaaactaatcgtcccaacaattatattactaccactgacatgactttccaaaaaacacataatttgaatcaacacaaccacccacagcctaattattagcatcatccctctactattttttaaccaaatcaacaacaacctatttagctgttccccaaccttttcctccgaccccctaacaacccccctcctaatactaactacctgactcctacccctcacaatcatggcaagccaacgccacttatccagtgaaccactatcacgaaaaaaactctacctctctatactaatctccctacaaatctccttaattataacattcacagccacagaactaatcatattttatatcttcttcgaaaccacacttatccccaccttggctatcatcacccgatgaggcaaccagccagaacgcctgaacgcaggcacatacttcctattctacaccctagtaggctcccttcccctactcatcgcactgatttacactcacaacaccctaggctcactaaacattctactactcactctcactgcccaagaactatcaaactcctgagccaacaacttaatatgactagcttacacaatagcttttatagtaaagatacctctttacggactccacttatgactccctaaagcccatgtcgaagcccccatcgctgggtcaatagtacttgccgcagtactcttaaaactaggcggctatggtataatacgcctcacactcattctcaaccccctgacaaaacacatagcctaccccttccttgtactatccctatgaggcataattataacaagctccatctgcctacgacaaacagacctaaaatcgctcattgcatactcttcaatcagccacatagccctcgtagtaacagccattctcatccaaaccccctgaagcttcaccggcgcagtcattctcataatcgcccacggacttacatcctcattactattctgcctagcaaactcaaactacgaacgcactcacagtcgcatcataatcctctctcaaggacttcaaactctactcccactaatagctttttgatgacttctagcaagcctcgctaacctcgccttaccccccactattaacctactgggagaactctctgtgctagtaaccacgttctcctgatcaaatatcactctcctacttacaggactcaacatactagtcacagccctatactccctctacatatttaccacaacacaatggggctcactcacccaccacattaacaacataaaaccctcattcacacgagaaaacaccctcatgttcatacacctatcccccattatcctcctatccctcaaccccgacatcattaccgggttttcctcttgtaaatatagtttaaccaaaacatcagattgtgaatctgacaacagaggcttacgaccccttatttaccgagaaagctcacaagaactgctaactcatgcccccatgtctaacaacatggctttctcaacttttaaaggataacagctatccattggtcttaggccccaaaaattttggtgcaactccaaataaaagtaataaccatgcacactactataaccaccctaaccctgacttccctaattccccccatccttaccaccctcgttaaccctaacaaaaaaaactcatacccccattatgtaaaatccattgtcgcatccacctttattatcagtctcttccccacaacaatattcatgtgcctagaccaagaagttattatctcgaactgacactgagccacaacccaaacaacccagctctccctaagcttcaaactagactacttctccataatattcatccctgtggcattgttcgttacatggtccatcatagaattctcactgtgatatataaactcagacccaaacattaatcagttcttcaaatatctactcatcttcctaattaccatactaatcttagttaccgctaacaacctattccaactgttcatcggctgagagggcgtaggaattatatccttcttgctcatcagttgatgatacgcccgagcagatgccaacacagcagccattcaagcaatcctatacaaccgtatcggcgatatcggtttcatcctcgccttagcatgatttatcctacactccaactcatgagacccacaacaaatagcccttctaaacgctaatccaagcctcaccccactactaggcctcctcctagcagcagcaggcaaatcagcccaattaggtctccacccctgactcccctcagccatagaaggccccaccccagtctcagccctactccactcaagcactatagttgtagcaggaatcttcttactcatccgcttccaccccctagcagaaaatagcccactaatccaaactctaacactatgcttaggcgctatcaccactctgttcgcagcagtctgcgcccttacacaaaatgacatcaaaaaaatcgtagccttctccacttcaagtcaactaggactcataatagttacaatcggcatcaaccaaccacacctagcattcctgcacatctgtacccacgccttcttcaaagccatactatttatgtgctccgggtccatcatccacaaccttaacaatgaacaagatattcgaaaaataggaggactactcaaaaccatacctctcacttcaacctccctcaccattggcagcctagcattagcaggaatacctttcctcacaggtttctactccaaagaccacatcatcgaaaccgcaaacatatcatacacaaacgcctgagccctatctattactctcatcgctacctccctgacaagcgcctatagcactcgaataattcttctcaccctaacaggtcaacctcgcttccccacccttactaacattaacgaaaataaccccaccctactaaaccccattaaacgcctgacagccggaagcctattcgcaggatttctcattactaacaacatttcccccgcatcccccttccaaacaacaatccccctctacctaaaactcacagccctcgctgtcactttcctaggacttctaacagccctagacctcaactacctaaccaacaaacttaaaataaaatccccactatgcacattttatttctccaacatactcggattctaccctagcatcacacaccgcacaatcccctatctaggccttcttacgagccaaaacctgcccctactcctcctagacctaacctgactagaaaagctattacctaaaacaatttcacagcaccaaatctccacctccatcatcacctcaacccaaaaaggcataattaaactttacttcctctctttcttcttcccactcatcctaaccctactcctaatcacataacctattcccccgagcaatctcaattacaatatatacaccaacaaacaatgttcaaccagtaactactactaatcaacgcccataatcatacaaagcccccgcaccaataggatcctcccgaatcaaccctgacccctctccttcataaattattcagcttcctacactattaaagtttaccacaaccaccaccccatcatactctttcacccacagcaccaatcctacctccatcgctaaccccactaaaacactcaccaagacctcaacccctgacccccatgcctcaggatactcctcaatagccatcgctgtagtatatccaaagacaaccatcattccccctaaataaattaaaaaaactattaaacccatataacctcccccaaaattcagaataataacacacccgaccacaccgctaacaatcaatactaaacccccataaataggagaaggcttagaagaaaaccccacaaaccccattactaaacccacactcaacagaaacaaagcatacatcattattctcgcacggactacaaccacgaccaatgatatgaaaaaccatcgttgtatttcaactacaagaacaccaatgaccccaatacgcaaaattaaccccctaataaaattaattaaccactcactcatcgacctccccaccccatccaacatctccgcatgatgaaacttcggctcactccttggcgcctgcctgatcctccaaatcaccacaggactattcctagccatgcactactcaccagacgcctcaaccgccttttcatcaatcgcccacatcactcgagacgtaaattatggctgaatcatccgctaccttcacgccaatggcgcctcaatattctttatctgcctcttcctacacatcgggcgaggcctatattacggatcatttctctactcagaaacctgaaacatcggcattatcctcctgcttgcaactatagcaacagccttcataggctatgtcctcccgtgaggccaaatatcattctgaggggccacagtaattacaaacttactatccgccatcccatacattgggacagacctagttcaatgaatctgaggaggctactcagtagacagtcccaccctcacacgattctttacctttcacttcatcttgcccttcattattgcagccctagcagcactccacctcctattcttgcacgaaacgggatcaaacaaccccctaggaatcacctcccattccgataaaatcaccttccacccttactacacaatcaaagacgccctcggcttacttctcttcattctctccttaatgacattaacactattctcaccagacctcctaggcgacccagacaattataccctagccaaccccttaaacacccctccccacatcaagcccgaatgatatttcctattcgcctacacaattctccgatccgtccctaacaaactaggaggcgtccttgccctattactatccatcctcatcctagcaataatccccatcctccatatatccaaacaacaaagcataatatttcgcccactaagccaatcactttattgactcctagccgcagacctcctcattctaacctgaatcggaggacaaccagtaagctacccttttaccatcattggacaagtagcatccgtactatacttcacaacaatcctaatcctaataccaactatctccctaattgaaaacaaaatactcaaatgggcctgtccttgtagtataaactaatacaccagtcttgtaaaccggagatgaaaacctttttccaaggacaaatcagagaaaaagtctttaactccaccattagcacccaaagctaagattctaatttaaactattctctgttctttcatggggaagcagatttgggtaccacccaagtattgacttacccatcaacaaccgctatgtatttcgtacattactgccagccaccatgaatattgcacggtaccataaatacttgaccacctgtagtacataaaaacccaatccacatcaaaaccccctccccatgcttacaagcaagtacagcaatcaaccctcaactatcacacatcaactgcaactccaaagccacccctcacccactaggataccaacaaacctacccacccttaacagtacatagtacataaagccatttaccgtacatagcacattacagtcaaatcccttctcgtccctatggatgacccccctcagataggagtcccttgaccaccatcctccgtgaaatcaatatcccgcacaagagtgctactctcctcgctccgggcccataacacttgggggtagctaaagtgaactgtatccgacatctggttcctacttcagggccataaagcctaaatagcccacacgttccccttaaataagacatcacgatg

SEQ ID NO: 545 - DNA, 16570 bp, Homo sapiens mitochondrial
  3108: "n" refers to a nucleotide at position 3107 of the Cambridge Reference Sequence (CRS, Anderson et al. 1981 Nature 290:457-465), later determined to be absent from the human mtDNA sequence according to the revised CRS (rCRS, Andrews et al. 1999 Nature Genetics 23:147); "n" therefore represents a single nucleotide deletion at a position corresponding to nucleotide 3107 of SEQ ID NO:1 as provided herein.
gatcacaggtctatcaccctattaaccactcacgggagctctccatgcatttggtattttcgtctggggggcatgcacgcgatagcattgcgagacgctggagccggagcaccctatgtcgcagtatctgtctttgattcctgcctcatcctattatttatcgcacctacgttcaatattacaggcgaacatacttactaaagtgtgttaattaattaatgcttgtaggacataataataacaattgaatgtctgcacagccgctttccacacagacatcataacaaaaaatttccaccaaaccccccctcccccgccttctggccacagcacttaaacacatctctgccaaaccccaaaaacaaagaaccctaacaccagcctaaccagatttcaaattttatcttttggcggtatgcacttttaacagtcaccccccaactaacacattattttcccctcccactcccatactactaatctcatcaatacaacccccgcccatcctacccagcacacacacaccgctgctaaccccataccccgaaccaaccaaaccccaaagacaccccccacagtttatgtagcttacctcctcaaagcaatacactgaaaatgtttagacgggctcacatcaccccataaacaaataggtttggtcctagcctttctattagctcttagtaagattacacatgcaagcatccccgttccagtgagttcaccctctaaatcaccacgatcaaaagggacaagcatcaagcacgcagcaatgcagctcaaaacgcttagcctagccacacccccacgggaaacagcagtgattaacctttagcaataaacgaaagtttaactaagctatactaaccccagggttggtcaatttcgtgccagccaccgcggtcacacgattaacccaagtcaatagaagccggcgtaaagagtgttttagatcaccccctccccaataaagctaaaactcacctgagttgtaaaaaactccagttgacacaaaatagactacgaaagtggctttaacatatctgaacacacaatagctaagacccaaactgggattagataccccactatgcttagccctaaacctcaacagttaaatcaacaaaactgctcgccagaacactacgagccacagcttaaaactcaaaggacctggcggtgcttcatatccctctagaggagcctgttctgtaatcgataaaccccgatcaacctcaccacctcttgctcagcctatataccgccatcttcagcaaaccctgatgaaggctacaaagtaagcgcaagtacccacgtaaagacgttaggtcaaggtgtagcccatgaggtggcaagaaatgggctacattttctaccccagaaaactacgatagcccttatgaaacttaagggtcgaaggtggatttagcagtaaactgagagtagagtgcttagttgaacagggccctgaagcgcgtacacaccgcccgtcaccctcctcaagtatacttcaaaggacatttaactaaaacccctacgcatttatatagaggagacaagtcgtaacatggtaagtgtactggaaagtgcacttggacgaaccagagtgtagcttaacacaaagcacccaacttacacttaggagatttcaacttaacttgaccgctctgagctaaacctagccccaaacccactccaccttactaccagacaaccttagccaaaccatttacccaaataaagtataggcgatagaaattgaaacctggcgcaatagatatagtaccgcaagggaaagatgaaaaattataaccaagcataatatagcaaggactaacccctataccttctgcataatgaattaactagaaataactttgcaaggagagccaaagctaagacccccgaaaccagacgagctacctaagaacagctaaaagagcacacccgtctatgtagcaaaatagtgggaagatttataggtagaggcgacaaacctaccgagcctggtgatagctggttgtccaagatagaatcttagttcaactttaaatttgcccacagaaccctctaaatccccttgtaaatttaactgttagtccaaagaggaacagctctttggacactaggaaaaaaccttgtagagagagtaaaaaatttaacacccatagtaggcctaaaagcagccaccaattaagaaagcgttcaagctcaacacccactacctaaaaaatcccaaacatataactgaactcctcacacccaattggaccaatctatcaccctatagaagaactaatgttagtataagtaacatgaaaacattctcctccgcataagcctgcgtcagattaaaacactgaactgacaattaacagcccaatatctacaatcaaccaacaagtcattattaccctcactgtcaacccaacacaggcatgctcataaggaaaggttaaaaaaagtaaaaggaactcggcaaatcttaccccgcctgtttaccaaaaacatcacctctagcatcaccagtattagaggcaccgcctgcccagtgacacatgtttaacggccgcggtaccctaaccgtgcaaaggtagcataatcacttgttccttaaatagggacctgtatgaatggctccacgagggttcagctgtctcttacttttaaccagtgaaattgacctgcccgtgaagaggcgggcatgacacagcaagacgagaagaccctatggagctttaatttattaatgcaaacagtacctaacaaacccacgggtcctaaactaccaaacctgcattaaaaatttcggttggggcgacctcggagcagaacccaacctccgagcagtacatgctaagacttcaccagtcaaagcgaactactatactcaattgatccaataacttgaccaacggaacaagttaccctagggataacagcgcaatcctattctagagtccatatcaacaatagggtttacgacctcgatgttggatcaggacatcccgatggtgcagccgctattaaaggttcgtttgttcaacgattaaagtcctacgtgatctgagttcagaccggagtaatccaggtcggtttctatctacnttcaaattcctccctgtacgaaaggacaagagaaataaggcctacttcacaaagcgccttcccccgtaaatgatatcatctcaacttagtattatacccacacccacccaagaacagggtttgttaagatggcagagcccggtaatcgcataaaacttaaaactttacagtcagaggttcaattcctcttcttaacaacatacccatggccaacctcctactcctcattgtacccattctaatcgcaatggcattcctaatgcttaccgaacgaaaaattctaggctatatacaactacgcaaaggccccaacgttgtaggcccctacgggctactacaacccttcgctgacgccataaaactcttcaccaaagagcccctaaaacccgccacatctaccatcaccctctacatcaccgccccgaccttagctctcaccatcgctcttctactatgaacccccctccccatacccaaccccctggtcaacctcaacctaggcctcctatttattctagccacctctagcctagccgtttactcaatcctctgatcagggtgagcatcaaactcaaactacgccctgatcggcgcactgcgagcagtagcccaaacaatctcatatgaagtcaccctagccatcattctactatcaacattactaataagtggctcctttaacctctccacccttatcacaacacaagaacacctctgattactcctgccatcatgacccttggccataatatgatttatctccacactagcagagaccaaccgaacccccttcgaccttgccgaaggggagtccgaactagtctcaggcttcaacatcgaatacgccgcaggccccttcgccctattcttcatagccgaatacacaaacattattataataaacaccctcaccactacaatcttcctaggaacaacatatgacgcactctcccctgaactctacacaacatattttgtcaccaagaccctacttctaacctccctgttcttatgaattcgaacagcatacccccgattccgctacgaccaactcatacacctcctatgaaaaaacttcctaccactcaccctagcattacttatatgatatgtctccatacccattacaatctccagcattccccctcaaacctaagaaatatgtctgataaaagagttactttgatagagtaaataataggagcttaaacccccttatttctaggactatgagaatcgaacccatccctgagaatccaaaattctccgtgccacctatcacaccccatcctaaagtaaggtcagctaaataagctatcgggcccataccccgaaaatgttggttatacccttcccgtactaattaatcccctggcccaacccgtcatctactctaccatctttgcaggcacactcatcacagcgctaagctcgcactgattttttacctgagtaggcctagaaataaacatactagcttttattccagttctaaccaaaaaaataaaccctcgttccacagaagctgccatcaagtatttcctcacgcaagcaaccgcatccataatccttctaatagctatcctcttcaacaatatactctccggacaatgaaccataaccaatactaccaatcaatactcatcattaataatcataatggctatagcaataaaactaggaatagccccctttcacttctgagtcccagaggttacccaaggcacccctctgacatccggcctgcttcttctcacatgacaaaaactagcccccatctcaatcatataccaaatctctccctcactaaacgtaagccttctcctcactctctcaatcttatccatcatagcaggcagttgaggtggattaaaccaaacccagctacgcaaaatcttagcatactcctcaattacccacataggatgaataatagcagttctaccgtacaaccctaacataaccattcttaatttaactatttatattatcctaactactaccgcattcctactactcaacttaaactccagcaccacgaccctactactatctcgcacctgaaacaagctaacatgactaacacccttaattccatccaccctcctctccctaggaggcctgcccccgctaaccggctttttgcccaaatgggccattatcgaagaattcacaaaaaacaatagcctcatcatccccaccatcatagccaccatcaccctccttaacctctacttctacctacgcctaatctactccacctcaatcacactactccccatatctaacaacgtaaaaataaaatgacagtttgaacatacaaaacccaccccattcctccccacactcatcacccttaccacgctactcctacctatctccccttttatactaataatcttatagaaatttaggttaaatacagaccaagagccttcaaagccctcagtaagttgcaatacttaatttctgtaacagctaaggactgcaaaaccccactctgcatcaactgaacgcaaatcagccactttaattaagctaagcccttactagaccaatgggacttaaacccacaaacacttagttaacagctaagcaccctaatcaactggcttcaatctacttctcccgccgccgggaaaaaaggcgggagaagccccggcaggtttgaagctgcttcttcgaatttgcaattcaatatgaaaatcacctcggagctggtaaaaagaggcctaacccctgtctttagatttacagtccaatgcttcactcagccattttacctcacccccactgatgttcgccgaccgttgactattctctacaaaccacaaagacattggaacactatacctattattcggcgcatgagctggagtcctaggcacagctctaagcctccttattcgagccgagctgggccagccaggcaaccttctaggtaacgaccacatctacaacgttatcgtcacagcccatgcatttgtaataatcttcttcatagtaatacccatcataatcggaggctttggcaactgactagttcccctaataatcggtgcccccgatatggcgtttccccgcataaacaacataagcttctgactcttacctccctctctcctactcctgctcgcatctgctatagtggaggccggagcaggaacaggttgaacagtctaccctcccttagcagggaactactcccaccctggagcctccgtagacctaaccatcttctccttacacctagcaggtgtctcctctatcttaggggccatcaatttcatcacaacaattatcaatataaaaccccctgccataacccaataccaaacgcccctcttcgtctgatccgtcctaatcacagcagtcctacttctcctatctctcccagtcctagctgctggcatcactatactactaacagaccgcaacctcaacaccaccttcttcgaccccgccggaggaggagaccccattctataccaacacctattctgatttttcggtcaccctgaagtttatattcttatcctaccaggcttcggaataatctcccatattgtaacttactactccggaaaaaaagaaccatttggatacataggtatggtctgagctatgatatcaattggcttcctagggtttatcgtgtgagcacaccatatatttacagtaggaatagacgtagacacacgagcatatttcacctccgctaccataatcatcgctatccccaccggcgtcaaagtatttagctgactcgccacactccacggaagcaatataaaatgatctgctgcagtgctctgagccctaggattcatctttcttttcaccgtaggtggcctgactggcattgtattagcaaactcatcactagacatcgtactacacgacacgtactacgttgtagctcacttccactatgtcctatcaataggagctgtatttgccatcataggaggcttcattcactgatttcccctattctcaggctacaccctagaccaaacctacgccaaaatccatttcactatcatattcatcggcgtaaatctaactttcttcccacaacactttctcggcctatccggaatgccccgacgttactcggactaccccgatgcatacaccacatgaaacatcctatcatctgtaggctcattcatttctctaacagcagtaatattaataattttcatgatttgagaagccttcgcttcgaagcgaaaagtcctaatagtagaagaaccctccataaacctggagtgactatatggatgccccccaccctaccacacattcgaagaacccgtatacataaaatctagacaaaaaaggaaggaatcgaaccccccaaagctggtttcaagccaaccccatggcctccatgactttttcaaaaaggtattagaaaaaccatttcataactttgtcaaagttaaattataggctaaatcctatatatcttaatggcacatgcagcgcaagtaggtctacaagacgctacttcccctatcatagaagagcttatcacctttcatgatcacgccctcataatcattttccttatctgcttcctagtcctgtatgcccttttcctaacactcacaacaaaactaactaatactaacatctcagacgctcaggaaatagaaaccgtctgaactatcctgcccgccatcatcctagtcctcatcgccctcccatccctacgcatcctttacataacagacgaggtcaacgatccctcccttaccatcaaatcaattggccaccaatggtactgaacctacgagtacaccgactacggcggactaatcttcaactcctacatacttcccccattattcctagaaccaggcgacctgcgactccttgacgttgacaatcgagtagtactcccgattgaagcccccattcgtataataattacatcacaagacgtcttgcactcatgagctgtccccacattaggcttaaaaacagatgcaattcccggacgtctaaaccaaaccactttcaccgctacacgaccgggggtatactacggtcaatgctctgaaatctgtggagcaaaccacagtttcatgcccatcgtcctagaattaattcccctaaaaatctttgaaatagggcccgtatttaccctatagcaccccctctaccccctctagagcccactgtaaagctaacttagcattaaccttttaagttaaagattaagagaaccaacacctctttacagtgaaatgccccaactaaatactaccgtatggcccaccataattacccccatactccttacactattcctcatcacccaactaaaaatattaaacacaaactaccacctacctccctcaccaaagcccataaaaataaaaaattataacaaaccctgagaaccaaaatgaacgaaaatctgttcgcttcattcattgcccccacaatcctaggcctacccgccgcagtactgatcattctatttccccctctattgatccccacctccaaatatctcatcaacaaccgactaatcaccacccaacaatgactaatcaaactaacctcaaaacaaatgataaccatacacaacactaaaggacgaacctgatctcttatactagtatccttaatcatttttattgccacaactaacctcctcggactcctgcctcactcatttacaccaaccacccaactatctataaacctagccatggccatccccttatgagcgggcgcagtgattataggctttcgctctaagattaaaaatgccctagcccacttcttaccacaaggcacacctacaccccttatccccatactagttattatcgaaaccatcagcctactcattcaaccaatagccctggccgtacgcctaaccgctaacattactgcaggccacctactcatgcacctaattggaagcgccaccctagcaatatcaaccattaaccttccctctacacttatcatcttcacaattctaattctactgactatcctagaaatcgctgtcgccttaatccaagcctacgttttcacacttctagtaagcctctacctgcacgacaacacataatgacccaccaatcacatgcctatcatatagtaaaacccagcccatgacccctaacaggggccctctcagccctcctaatgacctccggcctagccatgtgatttcacttccactccataacgctcctcatactaggcctactaaccaacacactaaccatataccaatgatggcgcgatgtaacacgagaaagcacataccaaggccaccacacaccacctgtccaaaaaggccttcgatacgggataatcctatttattacctcagaagtttttttcttcgcaggatttttctgagccttttaccactccagcctagcccctaccccccaattaggagggcactggcccccaacaggcatcaccccgctaaatcccctagaagtcccactcctaaacacatccgtattactcgcatcaggagtatcaatcacctgagctcaccatagtctaatagaaaacaaccgaaaccaaataattcaagcactgcttattacaattttactgggtctctattttaccctcctacaagcctcagagtacttcgagtctcccttcaccatttccgacggcatctacggctcaacattttttgtagccacaggcttccacggacttcacgtcattattggctcaactttcctcactatctgcttcatccgccaactaatatttcactttacatccaaacatcactttggcttcgaagccgccgcctgatactggcattttgtagatgtggtttgactatttctgtatgtctccatctattgatgagggtcttactcttttagtataaatagtaccgttaacttccaattaactagttttgacaacattcaaaaaagagtaataaacttcgccttaattttaataatcaacaccctcctagccttactactaataattattacattttgactaccacaactcaacggctacatagaaaaatccaccccttacgagtgcggcttcgaccctatatcccccgcccgcgtccctttctccataaaattcttcttagtagctattaccttcttattatttgatctagaaattgccctccttttacccctaccatgagccctacaaacaactaacctgccactaatagttatgtcatccctcttattaatcatcatcctagccctaagtctggcctatgagtgactacaaaaaggattagactgaaccgaattggtatatagtttaaacaaaacgaatgatttcgactcattaaattatgataatcatatttaccaaatgcccctcatttacataaatattatactagcatttaccatctcacttctaggaatactagtatatcgctcacacctcatatcctccctactatgcctagaaggaataatactatcgctgttcattatagctactctcataaccctcaacacccactccctcttagccaatattgtgcctattgccatactagtctttgccgcctgcgaagcagcggtgggcctagccctactagtctcaatctccaacacatatggcctagactacgtacataacctaaacctactccaatgctaaaactaatcgtcccaacaattatattactaccactgacatgactttccaaaaaacacataatttgaatcaacacaaccacccacagcctaattattagcatcatccctctactattttttaaccaaatcaacaacaacctatttagctgttccccaaccttttcctccgaccccctaacaacccccctcctaatactaactacctgactcctacccctcacaatcatggcaagccaacgccacttatccagtgaaccactatcacgaaaaaaactctacctctctatactaatctccctacaaatctccttaattataacattcacagccacagaactaatcatattttatatcttcttcgaaaccacacttatccccaccttggctatcatcacccgatgaggcaaccagccagaacgcctgaacgcaggcacatacttcctattctacaccctagtaggctcccttcccctactcatcgcactaatttacactcacaacaccctaggctcactaaacattctactactcactctcactgcccaagaactatcaaactcctgagccaacaacttaatatgactagcttacacaatagcttttatagtaaagatacctctttacggactccacttatgactccctaaagcccatgtcgaagcccccatcgctgggtcaatagtacttgccgcagtactcttaaaactaggcggctatggtataatacgcctcacactcattctcaaccccctgacaaaacacatagcctaccccttccttgtactatccctatgaggcataattataacaagctccatctgcctacgacaaacagacctaaaatcgctcattgcatactcttcaatcagccacatagccctcgtagtaacagccattctcatccaaaccccctgaagcttcaccggcgcagtcattctcataatcgcccacgggcttacatcctcattactattctgcctagcaaactcaaactacgaacgcactcacagtcgcatcataatcctctctcaaggacttcaaactctactcccactaatagctttttgatgacttctagcaagcctcgctaacctcgccttaccccccactattaacctactgggagaactctctgtgctagtaaccacgttctcctgatcaaatatcactctcctacttacaggactcaacatactagtcacagccctatactccctctacatatttaccacaacacaatggggctcactcacccaccacattaacaacataaaaccctcattcacacgagaaaacaccctcatgttcatacacctatcccccattctcctcctatccctcaaccccgacatcattaccgggttttcctcttgtaaatatagtttaaccaaaacatcagattgtgaatctgacaacagaggcttacgaccccttatttaccgagaaagctcacaagaactgctaactcatgcccccatgtctaacaacatggctttctcaacttttaaaggataacagctatccattggtcttaggccccaaaaattttggtgcaactccaaataaaagtaataaccatgcacactactataaccaccctaaccctgacttccctaattccccccatccttaccaccctcgttaaccctaacaaaaaaaactcatacccccattatgtaaaatccattgtcgcatccacctttattatcagtctcttccccacaacaatattcatgtgcctagaccaagaagttattatctcgaactgacactgagccacaacccaaacaacccagctctccctaagcttcaaactagactacttctccataatattcatccctgtagcattgttcgttacatggtccatcatagaattctcactgtgatatataaactcagacccaaacattaatcagttcttcaaatatctactcatcttcctaattaccatactaatcttagttaccgctaacaacctattccaactgttcatcggctgagagggcgtaggaattatatccttcttgctcatcagttgatgatacgcccgagcagatgccaacacagcagccattcaagcaatcctatacaaccgtatcggcgatatcggtttcatcctcgccttagcatgatttatcctacactccaactcatgagacccacaacaaatagcccttctaaacgctaatccaagcctcaccccactactaggcctcctcctagcagcagcaggcaaatcagcccaattaggtctccacccctgactcccctcagccatagaaggccccaccccagtctcagccctactccactcaagcactatagttgtagcaggaatcttcttactcatccgcttccaccccctagcagaaaatagcccactaatccaaactctaacactatgcttaggcgctatcaccactctgttcgcagcagtctgcgcccttacacaaaatgacatcaaaaaaatcgtagccttctccacttcaagtcaactaggactcataatagttacaatcggcatcaaccaaccacacctagcattcctgcacatctgtacccacgccttcttcaaagccatactatttatgtgctccgggtccatcatccacaaccttaacaatgaacaagatattcgaaaaataggaggactactcaaaaccatacctctcacttcaacctccctcaccattggcagcctagcattagcaggaatacctttcctcacaggtttctactccaaagaccacatcatcgaaaccgcaaacatatcatacacaaacgcctgagccctatctattactctcatcgctacctccctgacaagcgcctatagcactcgaataattcttctcaccctaacaggtcaacctcgcttccccacccttactaacattaacgaaaataaccccaccctactaaaccccattaaacgcctggcagccggaagcctattcgcaggatttctcattactaacaacatttcccccgcatcccccttccaaacaacaatccccctctacctaaaactcacagccctcgctgtcactttcctaggacttctaacagccctagacctcaactacctaaccaacaaacttaaaataaaatccccactatgcacattttatttctccaacatactcggattctaccctagcatcacacaccgcacaatcccctatctaggccttcttacgagccaaaacctgcccctactcctcctagacctaacctgactagaaaagctattacctaaaacaatttcacagcaccaaatctccacctccatcatcacctcaacccaaaaaggcataattaaactttacttcctctctttcttcttcccactcatcctaaccctactcctaatcacataacctattcccccgagcaatctcaattacaatatatacaccaacaaacaatgttcaaccagtaactactactaatcaacgcccataatcatacaaagcccccgcaccaataggatcctcccgaatcaaccctgacccctctccttcataaattattcagcttcctacactattaaagtttaccacaaccaccaccccatcatactctttcacccacagcaccaatcctacctccatcgctaaccccactaaaacactcaccaagacctcaacccctgacccccatgcctcaggatactcctcaatagccatcgctgtagtatatccaaagacaaccatcattccccctaaataaattaaaaaaactattaaacccatataacctcccccaaaattcagaataataacacacccgaccacaccgctaacaatcaatactaaacccccataaataggagaaggcttagaagaaaaccccacaaaccccattactaaacccacactcaacagaaacaaagcatacatcattattctcgcacggactacaaccacgaccaatgatatgaaaaaccatcgttgtatttcaactacaagaacaccaatgaccccaatacgcaaaactaaccccctaataaaattaattaaccactcattcatcgacctccccaccccatccaacatctccgcatgatgaaacttcggctcactccttggcgcctgcctgatcctccaaatcaccacaggactattcctagccatgcactactccccagacgcctcaaccgccttttcatcaatcgcccacatcactcgagacgtaaattatggctgaatcatccgctaccttcacgccaatggcgcctcaatattctttatctgcctcttcctacacatcgggcgaggcctatattacggatcatttctctactcagaaacctgaaacatcggcattatcctcctgcttgcaactatagcaacagccttcataggctatgtcctcccgtgaggccaaatatcattctgaggggccacagtaattacaaacttactatccgccatcccatacattgggacagacctagttcaatgaatctgaggaggctactcagtagacagtcccaccctcacacgattctttacctttcacttcatcttgcccttcattattgcagccctagcagcactccacctcctattcttgcacgaaacgggatcaaacaaccccctaggaatcacctcccattccgataaaatcaccttccacccttactacacaatcaaagacgccctcggcttacttctcttccttctctccttaatgacattaacactattctcaccagacctcctaggcgacccagacaattataccctagccaaccccttaaacacccctccccacatcaagcccgaatgatatttcctattcgcctacacaattctccgatccgtccctaacaaactaggaggcgtccttgccctattactatccatcctcatcctagcaataatccccatcctccatatatccaaacaacaaagcataatatttcgcccactaagccaatcactttattgactcctagccgcagacctcctcattctaacctgaatcggaggacaaccagtaagctacccttttaccatcattggacaagtagcatccgtactatacttcacaacaatcctaatcctaataccaactatctccctaattgaaaacaaaatactcaaatgggcctgtccttgtagtataaattaatacaccagtcttgtaaaccggagatgaaaacctttttccaaggacaaatcagagaaaaagtctttaactccaccattagcacccaaagctaagattctaatttaaactattctctgttctttcatggggaagcagatttgggtaccacccaagtattgactcacccatcaacaaccgctatgtatttcgtacattactgccagccaccatgaatattgtacggtaccataaatacttgaccacctgtagtacataaaaacccaatccacatcaaaaccccctccccatgcttacaagcaagtacagcaatcaaccctcaactatcacacatcaactgcaactccaaagccacccctcacccactaggataccaacaaacctacccaccctcaacagtacatagtacataaagccatttaccgtacatagcacattacagtcaaatcccttctcgtccccatggatgacccccctcagataggggtcccttgaccaccatcctccgtgaaatcaatatcccgcacaagagtgctactctcctcgctccgggcccataacacttgggggtagctaaagtgaactgtatccgacatctggttcctacttcagggtcataaagcctaaatagcccacacgttccccttaaataagacatcacgatg

SEQ ID NO: 546 - DNA, 16570 bp, Homo sapiens mitochondrial
  3108: "n" refers to a nucleotide at position 3107 of the Cambridge Reference Sequence (CRS, Anderson et al. 1981 Nature 290:457-465), later determined to be absent from the human mtDNA sequence according to the revised CRS (rCRS, Andrews et al. 1999 Nature Genetics 23:147); "n" therefore represents a single nucleotide deletion at a position corresponding to nucleotide 3107 of SEQ ID NO:1 as provided herein.
gatcacaggtctatcaccctattaaccactcacgggagctctccatgcatttggtattttcgtctggggggtatgcacgcgatagcattgcgagacgctggagccggagcaccctatgtcgcagtatctgtctttgattcctgcctcatcctattatttatcgcacctacgttcaatattacaggcgaacatacttaccaaagtgtgttaattaattaatgcttgtaggacataataataacaattgaatgtctgcacagccgctttccacacagacatcataacaaaaaatttccaccaaaccccccctcccccgccttctggccacagcacttaaacacatctctgccaaaccccaaaaacaaagaaccctaacaccagcctaaccagatttcaaattttatcttttggcggtatgcacttttaacagtcaccccccaactaacacattattttcccctcccactcccatactactaatctcatcaatacaacccccgcccatcctacccagcacacacacaccgctgctaaccccataccccgaaccaaccaaaccccaaagacaccccccacagtttatgtagcttacctcctcaaagcaatacactgaaaatgtttagacgggctcacatcaccccataaacaaataggtttggtcctagcctttctattagctcttagtaagattacacatgcaagcatccccattccagtgagttcaccctctaaatcaccacgatcaaaagggacaagcatcaagcacgcagcaatgcagctcaaaacgcttagcctagccacacccccacgggaaacagcagtgattaacctttagcaataaacgaaagtttaactaagctatactaaccccagggttggtcaatttcgtgccagccaccgcggtcacacgattaacccaagtcaatagaagccggcgtaaagagtgttttagatcaccccctccccaataaagctaaaactcacctgagttgtaaaaaactccagttgacacaaaatagactacgaaagtggctttaacatatctgaacacacaatagctaagacccaaactgggattagataccccactatgcttagccctaaacctcaacagttaaatcaacaaaactgctcgccagaacactacgagccacagcttaaaactcaaaggacctggcggtgcttcatatccctctagaggagcctgttctgtaatcgataaaccccgatcaacctcaccacctcttgctcagcctatataccgccatcttcagcaaaccctgatgaaggctacaaagtaagcgcaagtacccacgtaaagacgttaggtcaaggtgtagcccatgaggtggcaagaaatgggctacattttctaccccagaaaactacgatagcccttatgaaacttaagggtcgaaggtggatttagcagtaaactgagagtagagtgcttagttgaacagggccctgaagcgcgtacacaccgcccgtcaccctcctcaagtatacttcaaaggacatttaactaaaacccctacgcatttatatagaggagacaagtcgtaacatggtaagtgtactggaaagtgcacttggacgaaccagagtgtagcttaacacaaagcacccaacttacacttaggagatttcaacttaacttgaccgctctgagctaaacctagccccaaacccactccaccttactaccagacaaccttagccaaaccatttacccaaataaagtataggcgatagaaattgaaacctggcgcaatagatatagtaccgcaagggaaagatgaaaaattataaccaagcataatatagcaaggactaacccctataccttctgcataatgaattaactagaaataactttgcaaggagagccaaagctaagacccccgaaaccagacgagctacctaagaacagctaaaagagcacacccgtctatgtagcaaaatagtgggaagatttataggtagaggcgacaaacctaccgagcctggtgatagctggttgtccaagatagaatcttagttcaactttaaatttgcccacagaaccctctaaatccccttgtaaatttaactgttagtccaaagaggaacagctctttggacactaggaaaaaaccttgtagagagagtaaaaaatttaacacccatagtaggcctaaaagcagccaccaattaagaaagcgttcaagctcaacacccactacctaaaaaatcccaaacatataactgaactcctcacacccaattggaccaatctatcaccctatagaagaactaatgttagtataagtaacatgaaaacattctcctccgcataagcctgcgtcagattaaaacactgaactgacaattaacagcccaatatctacaatcaaccaacaagtcattattaccctcactgtcaacccaacacaggcatgctcataaggaaaggttaaaaaaagtaaaaggaactcggcaaatcttaccccgcctgtttaccaaaaacatcacctctagcatcaccagtattagaggcaccgcctgcccagtgacacatgtttaacggccgcggtaccctaaccgtgcaaaggtagcataatcacttgttccttaaatagggacctgtatgaatggctccacgagggttcagctgtctcttacttttaaccagtgaaattgacctgcccgtgaagaggcgggcataacacagcaagacgagaagaccctatggagctttaatttattaatgcaaacagtacctaacaaacccacaggtcctaaactaccaaacctgcattaaaaatttcggttggggcgacctcggagcagaacccaacctccgagcagtacatgctaagacttcaccagtcaaagcgaactactatactcaattgatccaataacttgaccaacggaacaagttaccctagggataacagcgcaatcctattctagagtccatatcaacaatagggtttacgacctcgatgttggatcaggacatcccgatggtgcagccgctattaaaggttcgtttgttcaacgattaaagtcctacgtgatctgagttcagaccggagtaatccaggtcggtttctatctacnttcaaattcctccctgtacgaaaggacaagagaaataaggcctacttcacaaagcgccttcccccgtaaatgatatcatctcaacttagtattatacccacacccacccaagaacagggtttgttaagatggcagagcccggtaatcgcataaaacttaaaactttacagtcagaggttcaattcctcttcttaacaacatacccatggccaacctcctactcctcattgtacccattctaatcgcaatggcattcctaatgcttaccgaacgaaaaattctaggctatatacaactacgcaaaggccccaacgttgtaggcccctacgggctactacaacccttcgctgacgccataaaactcttcaccaaagagcccctaaaacccgccacatctaccatcaccctctacatcaccgccccgaccttagctctcaccatcgctcttctactatgaacccccctccccatacccaaccccctggtcaacctcaacctaggcctcctatttattctagccacctctagcctagccgtttactcaatcctctgatcagggtgagcatcaaactcaaactacgccctgatcggcgcactgcgagcagtagcccaaacaatctcatatgaagtcaccctagccatcattctactatcaacattactaataagtggctcctttaacctctccacccttatcacaacacaagaacacctctgattactcctgccatcatgacccttggccataatatgatttatctccacactagcagagaccaaccgaacccccttcgaccttgccgaaggggagtccgaactagtctcaggcttcaacatcgaatacgccgcaggccccttcgccctattcttcatagccgaatacacaaacattattataataaacaccctcaccactacaatcttcctaggaacaacatatgacgcactctcccctgaactctacacaacatattttgtcaccaagaccctacttctaacctccctgttcttatgaattcgaacagcatacccccgattccgctacgaccaactcatacacctcctatgaaaaaacttcctaccactcaccctagcattacttatatgatatgtctccatacccattacaatctccagcattccccctcaaacctaagaaatatgtctgataaaagagttactttgatagagtaaataataggagcttaaacccccttatttctaggactatgagaatcgaacccatccctgagaatccaaaattctccgtgccacctatcacaccccatcctaaagtaaggtcagctaaataagctatcgggcccataccccgaaaatgttggttatacccttcccgtactaattaatcccctggcccaacccgtcatctactctaccatctttgcaggcacactcatcacagcgctaagctcgcactgattttttacctgagtaggcctagaaataaacatgctagcttttattccagttctaaccaaaaaaataaaccctcgttccacagaagctgccatcaagtatttcctcacgcaagcaaccgcatccataatccttctaatagctatcctcttcaacaatatactctccggacaatgaaccataaccaatactaccaatcaatactcatcattaataatcataatggctatagcaataaaactaggaatagccccctttcacttctgagtcccagaggttacccaaggcacccctctgacatccggcctgcttcttctcacatgacaaaaactagcccccatctcaatcatataccaaatctctccctcactaaacgtaagccttctcctcactctctcaatcttatccatcatagcaggcagttgaggtggattaaaccaaacccagctacgcaaaatcttagcatactcctcaattacccacataggatgaataatagcagttctaccgtacaaccctaacataaccattcttaatttaactatttatattatcctaactactaccgcattcctactactcaacttaaactccagcaccacaaccctactactatctcgcacctgaaacaagctaacatgactaacacccttaattccatccaccctcctctccctaggaggcctgcccccgctaaccggctttttgcccaaatgggccattatcgaagaattcacaaaaaacaatagcctcatcatccccaccatcatagccaccatcaccctccttaacctctacttctacctacgcctaatctactccacctcaatcacactactccccatatctaacaacgtaaaaataaaatgacagtttgaacatacaaaacccaccccattcctccccacactcatcgcccttaccacgctactcctacctatctccccttttatactaataatcttatagaaatttaggttaaatacagaccaagagccttcaaagccctcagtaagttgcaatacttaatttctgtaacagctaaggactgcaaaaccccactctgcatcaactgaacgcaaatcagccactttaattaagctaagcccttactagaccaatgggacttaaacccacaaacacttagttaacagctaagcaccctaatcaactggcttcaatctacttctcccgccgccgggaaaaaaggcgggagaagccccggcaggtttgaagctgcttcttcgaatttgcaattcaatatgaaaatcacctcggagctggtaaaaagaggcctaacccctgtctttagatttacagtccaatgcttcactcagccattttacctcacccccactgatgttcgccgaccgttgactattctctacaaaccacaaagacattggaacactatacctattattcggcgcatgagctggagtcctaggcacagctctaagcctccttattcgagccgagctgggccagccaggcaaccttctaggtaacgaccacatctacaacgttatcgtcacagcccatgcatttgtaataatcttcttcatagtaatacccatcataatcggaggctttggcaactgactagttcccctaataatcggtgcccccgatatggcgtttccccgcataaacaacataagcttctgactcttacctccctctctcctactcctgctcgcatctgctacagtggaggccggagcaggaacaggttgaacagtctaccctcccttagcagggaactactcccaccctggagcctccgtagacctaaccatcttctccttacacctagcaggtgtctcctctatcttaggggccatcaatttcatcacaacaattatcaatataaaaccccctgccataacccaataccaaacgcccctcttcgtctgatccgtcctaatcacagcagtcctacttctcctatctctcccagtcctagctgccggcatcactatactactaacagaccgcaacctcaacaccaccttcttcgaccccgccggaggaggagaccccattctataccaacacctattctgatttttcggtcaccctgaagtttatattcttatcctaccaggcttcggaataatctcccatattgtaacttactactccggaaaaaaagaaccatttggatacataggtatggtctgagctatgatatcaattggcttcctagggtttatcgtgtgagcacaccatatatttacagtaggaatagacgtagacacacgagcatatttcacctccgctaccataatcatcgctatccccaccggcgtcaaagtatttagctgactcgccacactccacggaagcaatatgaaatgatctgctgcagtgctctgagccctaggattcatctttcttttcaccgtaggtggcctgactggcattgtattagcaaactcatcactagacatcgtactacacgacacgtactacgttgtagcccacttccactatgtcctatcaataggagctgtatttgccatcataggaggcttcattcactgatttcccctattctcaggctacaccctagaccaaacctacgccaaaatccatttcactatcatattcatcggcgtaaatctaactttcttcccacaacactttctcggcctatccggaatgccccgacgttactcggactaccccgatgcatacaccacatgaaacatcctatcatctgtaggctcattcatttctctaacagcagtaatattaataattttcatgatttgagaagccttcgcttcgaagcgaaaagtcctaatagtagaagaaccctccataaacctggagtgactatatggatgccccccaccctaccacacattcgaagaacccgtatacataaaatctagacaaaaaaggaaggaatcgaaccccccaaagctggtttcaagccaaccccatggcctccatgactttttcaaaaaggtattagaaaaaccatttcataactttgtcaaagttaaattataggctaaatcctatatatcttaatggcacatgcagcgcaagtaggtctacaagacgctacttcccctatcatagaagagcttatcacctttcatgatcacgccctcataatcattttccttatctgcttcctagtcctgtatgcccttttcctaacactcacaacaaaactaactaatactaacatctcagacgctcaggaaatagaaaccgtctgaactatcctgcccgccatcatcctagtcctcatcgccctcccatccctacgcatcctttacataacagacgaggtcaacgatccctcccttaccatcaaatcaattggccaccaatggtactgaacctacgagtacaccgactacggcggactaatcttcaactcctacatacttcccccattattcctagaaccaggcgacctgcgactccttgacgttgacaatcgagtagtactcccgattgaagcccccattcgtataataattacatcacaagacgtcttgcactcatgagctgtccccacattaggcttaaaaacagatgcaattcccggacgtctaaaccaaaccactttcaccgctacacgaccgggggtatactacggtcaatgctctgaaatctgtggagcaaaccacagtttcatgcccatcgtcctagaattaattcccctaaaaatctttgaaatagggcccgtatttaccctatagcaccccctctaccccctctagagcccactgtaaagctaacttagcattaaccttttaagttaaagattaagagaaccaacacctctttacagtgaaatgccccaactaaatactaccgtatggcccaccataattacccccatactccttacactattcctcatcacccaactaaaaatattaaacacaaactaccacctacctccctcaccaaagcccataaaaataaaaaattataacaaaccctgagaaccaaaatgaacgaaaatctgttcgcttcattcattgcccccacaatcctaggcctacccgccgcagtactgatcattctatttccccctctattgatccccacctccaaatatctcatcaacaaccgactaatcaccacccaacaatgactaatcaaactaacctcaaaacaaatgataaccatacacaacactaaaggacgaacctgatctcttatactagtatccttaatcatttttattgccacaactaacctcctcggactcctgcctcactcatttacaccaaccacccaactatctataaacctagccatggccatccccttatgagcgggcgcagtgattataggctttcgctctaagattaaaaatgccctagcccacttcttaccacaaggcacacctacaccccttatccccatactagttattatcgaaaccatcagcctactcattcaaccaatagccctggccgtacgcctaaccgctaacattactgcaggccacctactcatgcacctaattggaagcgccaccctagcaatatcaaccattaaccttccctctacacttatcatcttcacaattctaattctactgactatcctagaaatcgctgtcgccttaatccaagcctacgttttcacacttctagtaagcctctacctgcacgacaacacataatgacccaccaatcacatgcctatcatatagtaaaacccagcccatgacccctaacaggggccctctcagccctcctaatgacctccggcctagccatgtgatttcacttccactccataacgctcctcatactaggcctactaaccaacacactaaccatataccaatgatggcgcgatgtaacacgagaaagcacataccaaggccaccacacaccacctgtccaaaaaggccttcgatacgggataatcctatttattacctcagaagtttttttcttcgcaggatttttctgagccttttaccactccagcctagcccctaccccccaattaggagggcactggcccccaacaggcatcaccccgctaaatcccctagaagtcccactcctaaacacatccgtattactcgcatcaggagtatcaatcacctgagctcaccatagtctaatagaaaacaaccgaaaccaaataattcaagcactgcttattacaattttactgggtctctattttaccctcctacaagcctcagagtacttcgagtctcccttcaccatttccgacggcatctacggctcaacattttttgtagccacaggcttccacggacttcacgtcattattggctcaactttcctcactatctgcttcatccgccaactaatatttcactttacatccaaacatcactttggcttcgaagccgccgcctgatactggcattttgtagatgtggtttgactatttctgtatgtctccatctattgatgagggtcttactcttttagtataaatagtaccgttaacttccaattaactagttttgacaacattcaaaaaagagtaataaacttcgccttaattttaataatcaacaccctcctagccttactactaataattattacattttgactaccacaactcaacggctacatagaaaaatccaccccttacgagtgcggcttcgaccctatatcccccgcccgcgtccctttctccataaaattcttcttagtagctattaccttcttattatttgatctagaaattgccctccttttacccctaccatgagccctacaaacaactaacctgccactaatagttatgtcatccctcttattaatcatcatcctagccctaagtctggcctatgagtgactacaaaaaggattagactgaaccgaattggtatatagtttaaacaaaacgaatgatttcgactcattaaattatgataatcatatttaccaaatgcccctcatttacataaatattatactagcatttaccatctcacttctaggaatactagtatatcgctcacacctcatatcctccctactatgcctagaaggaataatactatcgctgttcattatagctactctcataaccctcaacacccactccctcttagccaatattgtgcctattgccatactagtctttgccgcctgcgaagcagcggtgggcctagccctactagtctcaatctccaacacatatggcctagactacgtacataacctaaacctactccaatgctaaaactaatcgtcccaacaattatattactaccactgacatgactttccaaaaaacacataatttgaatcaacacaaccacccacagcctaattattagcatcatccctctactattttttaaccaaatcaacaacaacctatttagctgttccccaaccttttcctccgaccccctaacaacccccctcctaatactaactacctgactcctacccctcacaatcatggcaagccaacgccacttatccagtgaaccactatcacgaaaaaaactctacctctctatactaatctccctacaaatctccttaattataacattcacagccacagaactaatcatattttatatcttcttcgaaaccacacttatccccaccttggctatcatcacccgatgaggcaaccagccagaacgcctgaacgcaggcacatacttcctattctacaccctagtaggctcccttcccctactcatcgcactaatttacactcacaacaccctaggctcactaaacattctactactcactctcactgcccaagaactatcaaactcctgagccaacaacttaatatgactagcttacacaatagcttttatagtaaagatacctctttacggactccacttatgactccccaaagcccatgtcgaagcccccatcgctgggtcaatagtacttgccgcagtactcttaaaactaggcggctatggtataatacgcctcacactcattctcaaccccctgacaaaacacatagcctaccccttccttgtactatccctatgaggcataattataacaagctccatctgcctacgacaaacagacctaaaatcgctcattgcatactcttcaatcagccacatagccctcgtagtaacagccattctcatccaaaccccctgaagcttcaccggcgcagtcattctcataatcgcccacgggcttacatcctcattactattctgcctagcaaactcaaactacgaacgcactcacagtcgcatcataatcctctctcaaggacttcaaactctactcccactaatagctttttgatgacttctagcaagcctcgctaacctcgccttaccccccactattaacctactgggagaactctctgtgctagtaaccacgttctcctgatcaaatatcactctcctacttacaggactcaacatactagtcacagccctatactccctctacatatttaccacaacacaatggggctcactcacccaccacattaacaacataaaaccctcattcacacgagaaaacaccctcatgttcatacacctatcccccattctcctcctatccctcaaccccgacatcattaccgggttttcctcttgtaaatatagtttaaccaaaacatcagattgtgaatctgacaacagaggcttacgaccccttatttaccgagaaagctcacaagaactgctaactcatgcccccatgtctaacaacatggctttctcaacttttaaaggataacagctatccattggtcttaggccccaaaaattttggtgcaactccaaataaaagtaataaccatgcacactactataaccaccctaaccctgacttccctaattccccccatccttaccaccctcgttaaccctaacaaaaaaaactcatacccccattatgtaaaatccattgtcgcatccacctttattatcagtctcttccccacaacaatattcatgtgcctagaccaagaagttattatctcgaactgacactgagccacaacccaaacaacccagctctccctaagcttcaaactagactacttctccataatattcatccctgtagcattgttcgttacatggtccatcatagaattctcactgtgatatataaactcagacccaaacattaatcagttcttcaaatatctactcatcttcctaattaccatactaatcttagttaccgctaacaacctattccaactgttcatcggctgagagggcgtaggaattatatccttcttgctcatcagttgatgatacgcccgagcagatgccaacacagcagccattcaagcaatcctatacaaccgtatcggcgatatcggtttcatcctcgccttagcatgatttatcctacactccaactcatgagacccacaacaaatagcccttctaaacgctaatccaagcctcaccccactactaggcctcctcctagcagcagcaggcaaatcagcccaattaggtctccacccctgactcccctcagccatagaaggccccaccccagtctcagccctactccactcaagcactatagttgtagcaggaatcttcttactcatccgcttccaccccctagcagaaaatagcccactaatccaaactctaacactatgcttaggcgccatcaccactctgttcgcagcagtctgcgcccttacacaaaatgacatcaaaaaaatcgtagccttctccacttcaagtcaactaggactcataatagttacaatcggcatcaaccaaccacacctagcattcctgcacatctgtacccacgccttcttcaaagccatactatttatgtgctccgggtccatcatccacaaccttaacaatgaacaagatattcgaaaaataggaggactactcaaaaccatacctctcacttcaacctccctcaccattggcagcctagcattagcaggaatacctttcctcacaggtttctactccaaagaccacatcatcgaaaccgcaaacatatcatacacaaacgcctgagccctatctattactctcatcgctacctccctgacaagcgcctatagcactcgaataattcttctcaccctaacaggtcaacctcgcttccccacccttactaacattaacgaaaataaccccaccctactaaaccccattaaacgcctggcagccggaagcctattcgcaggatttctcattactaacaacatttcccccgcatcccccttccaaacaacaatccccctctacctaaaactcacagccctcgctgtcactttcctaggacttctaacagccctagacctcaactacctaaccaacaaacttaaaataaaatccccactatgcacattttatttctccaacatactcggattctaccctagcatcacacaccgcacaatcccctatctaggccttcttacgagccaaaacctgcccctactcctcctagacctaacctgactagaaaagctattacctaaaacaatttcacagcaccaaatctccacctccatcatcacctcaacccaaaaaggcataattaaactttacttcctctctttcttcttcccactcatcctaaccctactcctaatcacataacctattcccccgagcaatctcaattacaatatatacaccaacaaacaatgttcaaccagtaactactactaatcaacgcccataatcatacaaagcccccgcaccaataggatcctcccgaatcaaccctgacccctctccttcataaattattcagcttcctacactattaaagtttaccacaaccaccaccccatcatactctttcacccacagcaccaatcctacctccatcgctaaccccactaaaacactcaccaagacctcaacccctgacccccatgcctcaggatactcctcaatagccatcgctgtagtatatccaaagacaaccatcattccccctaaataaattaaaaaaactattaaacccatataacctcccccaaaattcagaataataacacacccgaccacaccgctaacaatcaatactaaacccccataaataggagaaggcttagaagaaaaccccacaaaccccattactaaacccacactcaacagaaacaaagcatacatcattattctcgcacggactacaaccacgaccaatgatatgaaaaaccatcgttgtatttcaactacaagaacaccaatgaccccaatacgcaaaactaaccccctaataaaattaattaaccactcattcatcgacctccccaccccatccaacatctccgcatgatgaaacttcggctcactccttggcgcctgcctgatcctccaaatcaccacaggactattcctagccatgcactactcaccagacgcctcaaccgccttttcatcaatcgcccacattactcgagacgtaaattatggctgaatcatccgctaccttcacgccaatggcgcctcaatattctttatctgcctcttcctacacatcgggcgaggcctatattacggatcatttctctactcagaaacctgaaacatcggcattatcctcctgcttgcaactatagcaacagccttcataggctatgtcctcccgtgaggccaaatatcattctgaggggccacagtaattacaaacttactatccgccatcccatacattgggacagacctagttcaatgaatctgaggaggctactcagtagacagtcccaccctcacacgattctttacctttcacttcatcttgcccttcattattgcagccctagcagcactccacctcctattcttgcacgaaacgggatcaaacaaccccctaggaatcacctcccattccgataaaatcaccttccacccttactacacaatcaaagacgccctcggcttacttctcttccttctctccttaatgacattaacactattctcaccagacctcctaggcgacccagacaattataccctagccaaccccttaaacacccctccccacatcaagcccgaatgatatttcctattcgcctacacaattctccgatccgtccctaacaaactaggaggcgtccttgccctattactatccatcctcatcctagcaataatccccatcctccatatatccaaacaacaaagcataatatttcgcccactaagccaatcactttattgactcctagccgcagacctcctcattctaacctgaatcggaggacaaccagtaagctacccttttaccatcattggacaagtagcatccgtactatacttcacaacaatcctaatcctaataccaactatctccctaattgaaaacaaaatactcaaatgggcctgtccttgtagtataaactaatacaccagtcttgtaaaccggagatgaaaacctttttccaaggacaaatcagagaaaaagtctttaactccaccattagcacccaaagctaagattctaatttaaactattctctgttctttcatggggaagcagatttgggtaccacccaagtattgactcacccatcaacaaccgctatgtatttcgtacattactgccagccaccatgaatattgtacggtaccataaatacttgaccacctgtagtacataaaaacccaatccacatcaaaaccccctccccatgcttacaagcaagtacagcaatcaaccctcaactatcacacatcaactgcaactccaaagccacccctcacccactaggataccaacaaacctacccacccttaacagtacatagtacataaagccatttaccgtacatagcacattacagtcaaatcccttctcgtccccatggatgacccccctcagataggggtcccttgaccaccatcctccgtgaaatcaatatcccgcacaagagtgctactctcctcgctccgggcccataacacttgggggtagctaaagtgaactgtatccgacatctggttcctacttcagggtcataaagcctaaatagcccacacgttccccttaaataagacatcacgatg

SEQ ID NO: 547 - DNA, 16570 bp, Homo sapiens mitochondrial
  3108: "n" refers to a nucleotide at position 3107 of the Cambridge Reference Sequence (CRS, Anderson et al. 1981 Nature 290:457-465), later determined to be absent from the human mtDNA sequence according to the revised CRS (rCRS, Andrews et al. 1999 Nature Genetics 23:147); "n" therefore represents a single nucleotide deletion at a position corresponding to nucleotide 3107 of SEQ ID NO:1 as provided herein.
gatcacaggtctatcaccctattaaccactcacgggagctctccatgcatttggtattttcgtctggggggtgtgcacgcgatagcattgcgagacgctggagccggagcaccttatgtcgcagtatctgtctttgattcctgcctcatcctattatttatcgcacctacgttcaatattacaggcgaacatacttactaaagtgtgttaattaattaatgcttgtaggacataataataacaattgaatgtctgcacagccgctttccacacagacatcataacaaaaaatttccaccaaaccccccctcccccgccttctggccacagcacttaaacacatctctgccaaaccccaaaaacaaagaaccctaacaccagcctaaccagatttcaaattttatcttttggcggtatgcacttttaacagtcaccccccaactaacacattattttcccctcccactcccatactactaatctcatcaatacaaccctcgcccatcctacccaacacacacacaccgctgctaaccccataccccgaaccaaccaaaccccaaagacaccccccacagtttatgtagcttacctcctcaaagcaatacactgaaaatgtttagacgggctcacatcaccccataaacaaataggtttggtcctagcctttctattagctcttagtaagattacacatgcaagcatccccgttccagtgagttcaccctctaaatcaccacgatcaaaagggacaagcatcaagcacgcagcaatgcagctcaaaacgcttagcctagccacacccccacgggaaacagcagtgattaacctttagcaataaacgaaagtttaactaagctatactaaccccagggttggtcaatttcgtgccagccaccgcggtcacacgattaacccaagtcaatagaagccggcgtaaagagtgttttagatcaccccctccccaataaagctaaaactcacctgagttgtaaaaaactccagttgacacaaaatagactacgaaagtggctttaacatatctgaacacacaatagctaagacccaaactgggattagataccccactatgcttagccctaaacctcaacagttaaatcaacaaaactgctcgccagaacactacgagccacagcttaaaactcaaaggacctggcggtgcttcatacccctctagaggagcctgttctgtaatcgataaaccccgatcaacctcaccacctcttgctcagcctatataccgccatcttcagcaaaccctgatgaaggctacaaagtaagcgcaagtacccacgtaaagacgttaggtcaaggtgtagcccatgaggtggcaagaaatgggctacattttctaccccagaaaactacgatagcccttatgaaacttaagggtcgaaggtggatttagcagtaaactgagagtagagtgcttagttgaacagggccctgaagcgcgtacacaccgcccgtcaccctcctcaagtatacttcaaaggacatttaactaaaacccctacgcatttatatagaggagacaagtcgtaacatggtaagtgtactggaaagtgcacttggacgaaccagagtgtagcttaacacaaagcacccaacttacacttaggagatttcaacttaacttgaccgctctgagctaaacctagccccaaacccactccaccttactaccagacaaccttagccaaaccatttacccaaataaagtataggcgatagaaattgaaacctggcgcaatagatatagtaccgcaagggaaagatgaaaaattatagccaagcataatatagcaaggactaacccctataccttctgcataatgaattaactagaaataactttgcaaggagagccaaagctaagacccccgaaaccagacgagctacctaagaacagctaaaagagcacacccgtctatgtagcaaaatagtgggaagatttataggtagaggcgacaaacctaccgagcctggtgatagctggttgtccaagatagaatcttagttcaactttaaatttgcccacagaaccctctaaatccccttgtaaatttaactgttagtccaaagaggaacagctctttggacactaggaaaaaaccttgtagagagagtaaaaaatttaacacccatagtaggcctaaaagcagccaccaattaagaaagcgttcaagctcaacacccactacctaaaaaatcccaaacatataactgaactcctcacacccaattggaccaatctatcaccctatagaagaactaatgttagtataagtaacatgaaaacattctcctccgcataagcctgcgtcagattaaaacactgaactgacaattaacagcccaatatctacaatcaaccaacaagtcattattaccctcactgtcaacccaacacaggcatgctcataaggaaaggttaaaaaaagtaaaaggaactcggcaaatcttaccccgcctgtttaccaaaaacatcacctctagcatcaccagtattagaggcaccgcctgcccagtgacacatgtttaacggccgcggtaccctaaccgtgcaaaggtagcataatcacttgttccttaaatagggacctgtatgaatggctccacgagggttcagctgtctcttacttttaaccagtgaaattgacctgcccgtgaagaggcgggcatgacacagcaagacgagaagaccctatggagctttaatttattaatgcaaacagtacctaacaaacccacaggtcctaaactaccaaacctgcattaaaaatttcggttggggcgacctcggagcagaacccaacctccgagcagtacatgctaagacttcaccagtcaaagcgaactactatactcaattgatccaataacttgaccaacggaacaagttaccctagggataacagcgcaatcctattctagagtccatatcaacaatagggtttacgacctcgatgttggatcaggacatcccgatggtgcagccgctattaaaggttcgtttgttcaacgattaaagtcctacgtgatctgagttcagaccggagtaatccaggtcggtttctatctacnttcaaattcctccctgtacgaaaggacaagagaaataaggcctacttcacaaagcgccttcccccgtaaatgatatcatctcaacttagtattatacccacacccacccaagaacagggtttgttaagatggcagagcccggtaatcgcataaaacttaaaactttacagtcagaggttcaattcctcttcttaacaacatacccatggccaacctcctactcctcattgtacccattctaatcgcaatggcattcctaatgcttaccgaacgaaaaattctaggctatatacaactacgcaaaggccccaacgttgtaggcccctacgggctactacaacccttcgctgacgccataaaactcttcaccaaggagcccctaaaacccgccacatctaccatcaccctctacatcaccgccccgaccttagctctcaccatcgctcttctactatgaacccccctccccatacccaaccccctggtcaacctcaacctaggcctcctatttattctagccacctctagcctagccgtttactcaatcctctgatcagggtgagcatcaaactcaaactacgccctgatcggcgcactgcgagcagtagcccaaacaatctcatatgaagtcaccctagccatcattctactatcaacattactaataagtggctcctttaacctctccacccttatcacaacacaagaacacctctgattactcctgccatcatgacccttggccataatatgatttatctccacactagcagagaccaaccgaacccccttcgaccttgccgaaggggagtccgaactagtctcaggcttcaacatcgaatacgccgcaggccccttcgccctattcttcatagccgaatacacaaacattattataataaacaccctcaccactacaatcttcctaggaacaacatatgacgcactctcccctgaactctacacaacatattttgtcaccaagaccctacttctaacctccctgttcttatgaattcgaacagcatacccccgattccgctacgaccaactcatacacctcctatgaaaaaacttcctaccactcaccctagcattacttatatgatatgtctccatacccattacaatctccagcattccccctcaaacctaagaaatatgtctgataaaagagttactttgatagagtaaataataggagcttaaacccccttatttctaggactatgagaatcgaacccatccctgagaatccaaaattctccgtgccacctatcacaccccatcctaaagtaaggtcagctaaataagctatcgggcccataccccgaaaatgttggttatacccttcccgtactaattaatcccctggcccaacccgtcatctactctaccatctttgcaggcacactcatcacagcgctaagctcgcactgattttttacctgagtaggcctagaaataaacatgctagcttttattccagttctaaccaaaaaaataaaccctcgttccacagaagctgccatcaagtatttcctcacgcaagcaaccgcatccataatccttctaatagctatcctcttcaacaatatactctccggacaatgaaccataaccaatactaccaatcaatactcatcattaataatcataatggctatagcaataaaactaggaatagccccctttcacttctgagtcccagaggttacccaaggcacccctctgacatccggcctgcttcttctcacatgacaaaaactagcccccatctcaatcatataccaaatctctccctcactaaacgtaagccttctcctcactctctcaatcttatccatcatagcaggcagttgaggtggattaaaccaaacccagctacgcaaaatcttagcatactcctcaattacccacataggatgaataatagcagttctaccgtacaaccctaacataaccattcttaatttaactatttatattatcctaactactaccgcattcctactactcaacttaaactccagcaccacgaccctactactatctcgcacctgaaacaagctaacatgactaacacccttaattccatccaccctcctctccctaggaggcctgcccccgctaaccggctttttgcccaaatgggccattatcgaagaattcacaaaaaacaatagcctcatcatccccaccatcatagccaccatcaccctccttaacctctacttctacctacgcctaatctactccacctcaatcacactactccccatatctaacaacgtaaaaataaaatgacagtttgaacatacaaaacccaccccattcctccccacactcatcgcccttaccacgctactcctacctatctccccttttatactaataatcttatagaaatttaggttaaatacagaccaagagccttcaaagccctcagtaagttgcaatacttaatttctgtaacagctaaggactgcaaaaccccactctgcatcaactgaacgcaaatcagccactttaattaagctaagcccttactagaccaatgggacttaaacccacaaacacttagttaacagctaagcaccctaatcaactggcttcaatctacttctcccgccgccgggaaaaaaggcgggagaagccccggcaggtttgaagctgcttcttcgaatttgcaattcaatatgaaaatcacctcggagctggtaaaaagaggcctaacccctgtctttagatttacagtccaatgcttcactcagccattttacctcacccccactgatgttcgccgaccgttgactattctctacaaaccacaaagacattggaacactatacctattattcggcgcatgagctggagtcctaggcacagctctaagcctccttattcgagccgagctgggccagccaggcaaccttctaggtaacgaccacatctacaacgttatcgtcacagcccatgcatttgtaataatcttcttcatagtaatacccatcataatcggaggctttggcaactgactagttcccctaataatcggtgcccccgatatggcgtttccccgcataaacaacataagcttctgactcttacctccctctctcctactcctgctcgcatctgctatagtggaggccggagcaggaacaggttgaacagtctaccctcccttagcagggaactactcccaccctggagcctccgtagacctaaccatcttctccttacacctagcaggtgtctcctctatcttaggggccatcaatttcatcacaacaattatcaatataaaaccccctgccataacccaataccaaacgcccctcttcgtctgatccgtcctaatcacagcagtcctacttctcctatctctcccagtcctagctgctggcatcactatactactaacagaccgcaacctcaacaccaccttcttcgaccccgccggaggaggagaccccattctataccaacacctattctgatttttcggtcaccctgaagtttatattcttatcctaccaggcttcggaataatctcccatattgtaacttactactccggaaaaaaagaaccatttggatacataggtatggtctgagctatgatatcaattggcttcctagggtttatcgtgtgagcacaccatatatttacagtaggaatagacgtagacacacgagcatatttcacctccgctaccataatcatcgctatccccaccggcgtcaaagtatttagctgactcgccacactccacggaagcaatatgaaatgatctgctgcagtgctctgagccctaggattcatctttcttttcaccgtaggtggcctgactggcattgtattagcaaactcatcactagacatcgtactacacgacacgtactacgttgtagctcacttccactatgtcctatcaataggagctgtatttgccatcataggaggcttcattcactgatttcccctattctcaggctacaccctagaccaaacctacgccaaaatccatttcactatcatattcatcggcgtaaatctaactttcttcccacaacactttctcggcctatccggaatgccccgacgttactcggactaccccgatgcatacaccacatgaaacatcctatcatctgtaggctcattcatttctctaacagcagtaatattaataattttcatgatttgagaagccttcgcttcgaagcgaaaagtcctaatagtagaagaaccctccataaacctggagtgactatatggatgccccccaccctaccacacattcgaagaacccgtatacataaaatctagacaaaaaaggaaggaatcgaaccccccaaagctggtttcaagccaaccccatggcctccatgactttttcaaaaaggtattagaaaaaccatttcataactttgtcaaagttaaattataggctaaatcctatatatcttaatggcacatgcagcgcaagtaggtctacaagacgctacttcccctatcatagaagagcttatcacctttcatgatcacgccctcataatcattttccttatctgcttcctagtcctgtatgcccttttcctaacactcacaacaaaactaactaatactaacatctcagacgctcaggaaatagaaaccgtctgaactatcctgcccgccatcatcctagtcctcatcgccctcccatccctacgcatcctttacataacagacgaggtcaacgatccctcccttaccatcaaatcaattggccaccaatggtactgaacctacgagtacaccgactacggcggactaatcttcaactcctacatacttcccccattattcctagaaccaggcgacctgcgactccttgacgttgacaatcgagtagtactcccgattgaagcccccattcgtataataattacatcacaagacgtcttgcactcatgagctgtccccacattaggcttaaaaacagatgcaattcccggacgtctaaaccaaaccactttcaccgctacacgaccgggggtatactacggtcaatgctctgaaatctgtggagcaaaccacagtttcatgcccatcgtcctagaattaattcccctaaaaatctttgaaatagggcccgtatttaccctatagcaccccctctaccccctctagagcccactgtaaagctaacttagcattaaccttttaagttaaagattaagagaaccaacacctctttacagtgaaatgccccaactaaatactaccgtatggcccaccataattacccccatactccttacactattcctcatcacccaactaaaaatattaaacacaaactaccacctacctccctcaccaaagcccataaaaataaaaaattataacaaaccctgagaaccaaaatgaacgaaaatctgttcgcttcattcattgcccccacaatcctaggcctacccgccgcagtactgatcattctatttccccctctattgatccccacctccaaatatctcatcaacaaccgactaatcaccacccaacaatgactaatcaaactaacctcaaaacaaatgataaccatacacaacactaaaggacgaacctgatctcttatactagtatccttaatcatttttattgccacaactaacctcctcggactcctgcctcactcatttacaccaaccacccaactatctataaacctagccatggccatccccttatgagcgggcgcagtgattataggctttcgctctaagattaaaaatgccctagcccacttcttaccacaaggcacacctacaccccttatccccatactagttattatcgaaaccatcagcctactcattcaaccaatagccctggccgtacgcctaaccgctaacattactgcaggccacctactcatgcacctaattggaagcaccaccctagcaatatcaaccattaaccttccctctacacttatcatcttcacaattctaattctactgactatcctagaaatcgctgtcgccttaatccaagcctacgttttcacacttctagtaagcctctacctgcacgacaacacataatgacccaccaatcacatgcctatcatatagtaaaacccagcccatgacccctaacaggggccctctcagccctcctaatgacctccggcctagccatgtgatttcacttccactccataacgctcctcatactaggcctactaaccaacacactaaccatataccaatgatggcgcgatgtaacacgagaaagcacataccaaggccaccacacaccacctgtccaaaaaggccttcgatacgggataatcctatttattacctcagaagtttttttcttcgcaggatttttctgagccttttaccactccagcctagcccctaccccccaattaggagggcactggcccccaacaggcatcaccccgctaaatcccctagaagtcccactcctaaacacatccgtattactcgcatcaggagtatcaatcacctgagctcaccatagtctaatagaaaacaaccgaaaccaaataattcaagcactgctcattacaattttactgggtctctattttaccctcctacaagcctcagagtacttcgagtctcccttcaccatttccgacggcatctacggctcaacattttttgtagccacaggcttccacggacttcacgtcattattggctcaactttcctcactatctgcctcatccgccaactaatatttcactttacatccaaacatcactttggcttcgaagccgccgcctgatactggcattttgtagatgtggtttgactatttctgtatgtctccatctattgatgagggtcttactcttttagtataaatagtaccgttaacttccaattaactagttttgacaacattcaaaaaagagtaataaacttcgccttaattttaataatcaacaccctcctagccttactactaataattattacattttgactaccacaactcaacggctacatagaaaaatccaccccttacgagtgcggcttcgaccctatatcccccgcccgcgtccctttctccataaaattcttcttagtagctattaccttcttattatttgatctagaaattgccctccttttacccctaccatgagccctacaaacaactaacctgccactaatagttatgtcatccctcttattaatcatcatcctagccctaagtctggcctatgagtgactacaaaaaggattagactgagccgaattggtatatagtttaaacaaaacgaatgatttcgactcattaaattatgataatcatatttaccaaatgcccctcatttacataaatattatactagcatttaccatctcacttctaggaatactagtatatcgctcacacctcatgtcctccctactatgcctagaaggaataatactatcgctgttcattatagctactctcataaccctcaacacccactccctcttagccaatattgtgcctattgccatactagtctttgccgcctgcgaagcagcggtgggcctagccctactagtctcaatctccaacacatatggcctagactacgtacataacctaaacctactccaatgctaaaactaatcgtcccaacaattatattactaccactgacatgactttccaaaaaacacataatttgaatcaacacaaccacccacagcctaattattagcatcatccctctactattttttaaccaaatcaacaacaacctatttagctgttccccaaccttttcctccgaccccctaacaacccccctcctaatactaactacctgactcctgcccctcacaatcatggcaagccaacgccacttatccagtgaaccactatcacgaaaaaaactctacctctctatactaatctccctacaaatctccttaattataacattcacagccacagaactaatcatattttatatcttcttcgaaaccacacttatccccaccttggctatcatcacccgatgaggcaaccagccagaacgcctgaacgcaggcacatacttcctattctacaccctagtaggctcccttcccctactcatcgcactaatttacactcacaacaccctaggctcactaaacattctactactcaccctcactgcccaagaactatcaaactcctgagccaacaacttaatatgactagcttacacaatagcttttatagtaaagatacctctttacggactccacttatgactccctaaagcccatgtcgaagcccccatcgctgggtcaatagtacttgccgcagtactcttgaagctaggcggctatggtataatacgcctcacactcattctcaaccccctgacaaaacacatagcctaccccttccttgtactatccctatgaggcataattataacaagctccatctgcctacgacaaacagacctaaaatcgctcattgcatactcttcaatcagccacatagccctcgtagtaacagccattctcatccaaaccccctgaagcttcaccggcgcagtcattctcataatcgcccacggacttacatcctcattactattctgcctagcaaactcaaactacgaacgcactcacagtcgcatcataatcctctctcaaggacttcaaactctactcccactaatagctttttgatgacttctagcaagcctcgctaacctcgccttaccccccactattaacctactgggagaactctctgtgctagtaaccacattctcctgatcaaatatcactctcctacttacaggactcaacatactagtcacagccctatactccctctacatatttaccacaacacaatggggctcactcacccaccacattaacaacataaaaccctcattcacacgagaaaacaccctcatgttcatacacctatcccccattctcctcctatccctcaaccccgacatcattaccgggttttcctcttgtaaatatagtttaaccaaaacatcagattgtgaatctgacaacagaggctcacgaccccttatttaccgagaaagctcacaagaactgctaactcatgcccccatgtctaacaacatggctttctcaacttttaaaggataacagctatccattggtcttaggccccaagaattttggtgcaactccaaataaaagtaataaccatgcacactactataaccaccctaaccctaacttccctaattccccccatccttaccaccctcgttaaccctaacaaaaaaaactcatacccccattatgtaaaatccattgtcgcatccacctttattatcagtctcttccccacaacaatattcatgtgcctagaccaagaagttattatctcgaactgacactgagccacaacccaaacaacccagctctccctaagcttcaaactagactacttctccataatattcatccctgtagcattgttcgttacatggtccatcatagaattctcactgtgatatataaactcagacccaaacattaatcagttcttcaaatatctactcatcttcctaattaccatactaatcttagttaccgctaacaacctattccaactgttcatcggctgagagggcgtaggaattatatccttcttgctcatcagttgatgatacgcccgagcagatgccaacacagcagccattcaagcaatcctatacaaccgtatcggcgatatcggtttcatcctcgccttagcatgatttatcctacactccaactcatgagacccacaacaaatagcccttctaaacgccaatccaagcctcaccccactactaggcctcctcctagcagcagcaggcaaatcagcccaattaggtctccacccctgactcccctcagccatagaaggccccaccccagtctcagccctactccactcaagcactatagttgtagcaggaatcttcttactcatccgcttccaccccctagcagaaaatagcccactaatccaaactctaacactatgcttaggcgctatcaccactctgttcgcagcagtctgcgcccttacacaaaatgacatcaaaaaaatcgtagccttctccacttcaagtcaactaggactcataatagttacaatcggcatcaaccaaccacacctagcattcctgcacatctgtacccacgccttcttcaaagccatactatttatgtgctccgggtccatcatccacaaccttaacaatgaacaagatattcgaaaaataggaggactactcaaaaccatacctctcacttcaacctccctcaccattggcagcctagcattagcaggaatacctttcctcacaggtttctactccaaagaccacatcatcgaaaccgcaaacatatcatacacaaacgcctgagccctatctattactctcatcgctacctccctgacaagcgcctatagcactcgaataattcttctcaccctaacaggtcaacctcgcttccccacccttactaacattaacgaaaataaccccaccctactaaaccccattaaacgcctggcagccggaagcctattcgcaggatttctcattactaacaacatttcccccgcatcccccttccaaacaacaatccccctctacctaaaactcacagccctcgctgtcactttcctaggacttctaacagccctagacctcaactacctaaccaacaaacttaaaataaaatccccactatgcacattttatttctccaacatactcggattctaccctagcatcacacaccgcacaatcccctatctaggccttcttacgagccaaaacctgcccctactcctcctagacctaacctgactagaaaagctattacctaaaacaatttcacagcaccaaatctccacctccatcatcacctcaacccaaaaaggcataattaaactttacttcctctctttcttcttcccactcatcctaaccctactcctaatcacataacctattcccccgagcaatttcaattacaatatatacaccaacaaacaatgttcaaccagtaactactactaatcaacgcccataatcatacaaagcccccgcaccaataggatcctcccgaatcaaccctgacccctctccttcataaattattcagcttcctacactattaaagtttaccacaaccaccaccccatcatactctttcacccacagcaccaatcctacctccatcgctaaccccactaaaacactcaccaagacctcaacccctgacccccatgcctcaggatactcctcaatagccatcgctgtagtatatccaaagacaaccatcattccccctaaataaattaaaaaaactattaaacccatataacctcccccaaaattcagaataataacacacccgaccacaccgctaacaatcaatactaaacccccataaataggagaaggcttagaagaaaaccccacaaaccccattactaaacccacactcaacagaaacaaagcatacatcattattctcgcacggactacaaccacgaccaatgatatgaaaaaccatcgttgtatttcaactacaagaacaccaatgaccccaatacgcaaaattaaccccctaataaaattaattaaccactcactcatcgacctccccaccccatccaacatctccgcatgatgaaacttcggctcactccttggcgcctgcctgatcctccaaatcaccacaggactattcctagccatgcactactcaccagacgcctcaaccgccttttcatcaatcgcccacatcactcgagacgtaaattatggctgaatcatccgctaccttcacgccaatggcgcctcaatattctttatctgcctcttcctacacatcgggcgaggcctatattacggatcatttctctactcagaaacctgaaacatcggcattatcctcctgcttgcaactatagcaacagccttcataggctatgtcctcccgtgaggccaaatatcattctgaggggccacagtaattacaaacttactatccgccatcccatacattgggacagacctagttcaatgaatctgaggaggctactcagtagacagtcccaccctcacacgattctttacctttcacttcatcttgcccttcattattgcagccctagcagcactccacctcctattcttgcacgaaacgggatcaaacaaccccctaggaatcacctcccattccgataaaatcaccttccacccttactacacaatcaaagacgccctcggcttacttctcttccttctctccttaatgacattaacactattctcaccagacctcctaggcgacccagacaattataccctagccaaccccttaaacacccctccccacatcaagcccgaatgatatttcctattcgcctacacaattctccgatccgtccctaacaaactaggaggcgtccttgccctattactatccatcctcatcctagcaataatccccatcctccatatatccaaacaacaaagcataatatttcgcccactaagccaatcactttattgactcctagccgcagacctcctcattctaacctgaatcggaggacaaccagtaagctacccttttaccatcattggacaagtagcatccgtactatacttcacaacaatcctaatcctaataccaactatctccctaattgaaaacaaaatactcaaatgggcctgtccttgtagtataaactaatacaccagtcttgtaagccggagatgaaaacctttttccaaggacaaatcagagaaaaagtctttaactccaccattagcacccaaagctaagattctaatttaaactattctctgttctttcatggggaagcagatttgggtaccacccaagtattgactcacccatcaacaaccgctatgtatttcgtacattactgccagccaccatgaatattgtacggtaccataaatacttgaccacctgtagtacataaaaacccaatccacatcaaaaccccctccccatgcttacaagcaagtacagcaatcaacctccaactatcatacatcaactgcaactccaaagccacccctcacccactaggataccaacaaacctacccacccttaacagtacatagcacataaagccatttaccgtacatagcacattacagtcaaatcccttctcgtccccatggatgacccccctcagataggggtcccttgaccaccatcctccgtgaaatcaatatcccgcacaagagtgctactctcctcgctccgggcccataacacttgggggtagctaaagtgaactgtatccgacatctggttcctacttcagggccataaagcctaaatagcccacacgttccccttaaataagacatcacgatg

SEQ ID NO: 548 - DNA, 16568 bp, Homo sapiens mitochondrial
  3106: "n" refers to a nucleotide at position 3107 of the Cambridge Reference Sequence (CRS, Anderson et al. 1981 Nature 290:457-465), later determined to be absent from the human mtDNA sequence according to the revised CRS (rCRS, Andrews et al. 1999 Nature Genetics 23:147); "n" therefore represents a single nucleotide deletion at a position corresponding to nucleotide 3107 of SEQ ID NO:1 as provided herein.
gatcacaggtctatcaccctattaaccactcacgggagctctccatgcatttggtattttcgtctggggggtgtgcacgcgatagcattgcgagacgctggagccggagcaccctatgtcgcagtatctgtctttgattcctgcctcatcctattatttatcgcacctacgttcaatattacaggcgaacatacttactaaagtgtgttaattaattaatgcttgtaggacataataataacaattgaatgtctgcacagccgctttccacacagacatcataacaaaaaatttccaccaaaccccccctcccccgccttctggccacagcacttaaacacatctctgccaaaccccaaaaacaaagaaccctaacaccagcctaaccagatttcaaattttatcttttggcggtatgcacttttaacagtcaccccccaactaacacattattttcccctcccactcccatactactaatctcatcaatacaacccccgcccatcctacccagcacacacaccgctgctaaccccataccccgaaccaaccaaaccccaaagacaccccccacagtttatgtagcttacctcctcaaagcaatacactgaaaatgtttagacgggctcacatcaccccataaacaaataggtttggtcctagcctttctattagctcttagtaagattacacatgcaagcatccccgttccagtgagttcaccctctaaatcaccacgatcaaaagggacaagcatcaagcacgcagcaatgcagctcaaaacgcttagcctagccacacccccacgggaaacagcagtgattaacctttagcaataaacgaaagtttaactaagctatactaaccccagggttggtcaatttcgtgccagccaccgcggtcacacgattaacccaagtcaatagaagccggcgtaaagagtgttttagatcaccccctccccaataaagctaaaactcacctgagttgtaaaaaactccagttgacacaaaatagactacgaaagtggctttaacatatctgaacacacaatagctaagacccaaactgggattagataccccactatgcttagccctaaacctcaacagttaaatcaacaaaactgctcgccagaacactacgagccacagcttaaaactcaaaggacctggcggtgcttcatatccctctagaggagcctgttctgtaatcgataaaccccgatcaacctcaccacctcttgctcagcctatataccgccatcttcagcaaaccctgatgaaggctacaaagtaagcgcaagtacccacgtaaagacgttaggtcaaggtgtagcccatgaggtggcaagaaatgggctacattttctaccccagaaaactacgatagcccttatgaaacttaagggtcgaaggtggatttagcagtaaactgagagtagagtgcttagttgaacagggccctgaagcgcgtacacaccgcccgtcaccctcctcaagtatacttcaaaggacatttaactaaaacccctacgcatttatatagaggagacaagtcgtaacatggtaagtgtactggaaagtgcacttggacgaaccagagtgtagcttaacacaaagcacccaacttacacttaggagatttcaacttaacttgaccgctctgagctaaacctagccccaaacccactccaccttactaccagacaaccttagccaaaccatttacccaaataaagtataggcgatagaaattgaaacctggcgcaatagatatagtaccgcaagggaaagatgaaaaattataaccaagcataatatagcaaggactaacccctataccttctgcataatgaattaactagaaataactttgcaaggagagccaaagctaagacccccgaaaccagacgagctacctaagaacagctaaaagagcacacccgtctatgtagcaaaatagtgggaagatttataggtagaggcgacaaacctaccgagcctggtgatagctggttgtccaagatagaatcttagttcaactttaaatttgcccacagaaccctctaaatccccttgtaaatttaactgttagtccaaagaggaacagctctttggacactaggaaaaaaccttgtagagagagtaaaaaatttaacacccatagtaggcctaaaagcagccaccaattaagaaagcgttcaagctcaacacccactacctaaaaaatcccaaacatataactgaactcctcacacccaattggaccaatctatcaccctatagaagaactaatgttagtataagtaacatgaaaacattctcctccgcataagcctgcgtcagattaaaacactgaactgacaattaacagcccaatatctacaatcaaccaacaagtcattattaccctcactgtcaacccaacacaggcatgctcataaggaaaggttaaaaaaagtaaaaggaactcggcaaatcttaccccgcctgtttaccaaaaacatcacctctagcatcaccagtattagaggcaccgcctgcccagtgacacatgtttaacggccgcggtaccctaaccgtgcaaaggtagcataatcacttgttccttaaatagggacctgtatgaatggctccacgagggttcagctgtctcttacttttaaccagtgaaattgacctgcccgtgaagaggcgggcataacacagcaagacgagaagaccctatggagctttaatttattaatgcaaacagtacctaacaaacccacaggtcctaaactaccaaacctgcattaaaaatttcggttggggcgacctcggagcagaacccaacctccgagcagtacatgctaagacttcaccagtcaaagcgaactactatactcaattgatccaataacttgaccaacggaacaagttaccctagggataacagcgcaatcctattctagagtccatatcaacaatagggtttacgacctcgatgttggatcaggacatcccgatggtgcagccgctattaaaggttcgtttgttcaacgattaaagtcctacgtgatctgagttcagaccggagtaatccaggtcggtttctatctacnttcaaattcctccctgtacgaaaggacaagagaaataaggcctacttcacaaagcgccttcccccgtaaatgatatcatctcaacttagtattatacccacacccacccaagaacagggtttgttaagatggcagagcccggtaatcgcataaaacttaaaactttacagtcagaggttcaattcctcttcttaacaacatacccatggccaacctcctactcctcattgtacccattctaatcgcaatggcattcctaatgcttaccgaacgaaaaattctaggctatatacaactacgcaaaggccccaacgttgtaggcccctacgggctactacaacccttcgctgacgccataaaactcttcaccaaagagcccctaaaacccgccacatctaccatcaccctctacatcaccgccccgaccttagctctcaccatcgctcttctactatgaacccccctccccatacccaaccccctggtcaacctcaacctaggcctcctatttattctagccacctctagcctagccgtttactcaatcctctgatcagggtgagcatcaaactcaaactacgccctgatcggcgcactgcgagcagtagcccaaacaatctcatatgaagtcaccctagccatcattctactatcaacattactaataagtggctcctttaacctctccacccttatcacaacacaagaacacctctgattactcctgccatcatgacccttggccataatatgatttatctccacactagcagagaccaaccgaacccccttcgaccttgccgaaggggagtccgaactagtctcaggcttcaacatcgaatacgccgcaggccccttcgccctattcttcatagccgaatacataaacattattataataaacaccctcaccactgcaatcttcctaggaacaacatatgacgcactctcccctgaactctacacaacatattttgtcaccaagaccctacttctaacctccctgttcttatgaattcgaacagcatacccccgattccgctacgaccaactcatacacctcctatgaaaaaacttcctaccactcaccctagcattacttatatgatatgtctccatacccattacaatctccagcattccccctcaaacctaagaaatatgtctgataaaagagttactttgatagagtaaataataggagcttaaacccccttatttctaggactatgagaatcgaacccatccctgagaatccaaaattctccgtgccacctatcacaccccatcctaaagtaaggtcagctaaataagctatcgggcccataccccgaaaatgttggttatacccttcccgtactaattaatcccctggcccaacccgtcatctactctaccatctttgcaggcacactcatcacagcgctaagctcgcactgattttttacctgagtaggcctagaaataaacatgctagcttttattccagttctaaccaaaaaaataaaccctcgttccacagaagctgccatcaagtatttcctcacgcaagcaaccgcatccataatccttctaatagctatcctcttcaacaatatactctccggacaatgaaccataaccaatactaccaatcaatactcatcattaataatcataatggctatagcaataaaactaggaatagccccctttcacttctgagtcccagaggttacccaaggcacccctctgacatccggcctgcttcttctcacatgacaaaaactagcccccatctcaatcatataccaaatctctccctcactaaacgtaagccttctcctcactctctcaatcttatccatcatagcaggcagttgaggtggattaaaccaaacccagctacgcaaaatcctagcatactcctcaattacccacataggatgaataatagcagttctaccgtacaaccctaacataaccattcttaatttaactatttatattatcctaactactaccgcattcctactactcaacttaaactccagcaccacgaccctactactatctcgcacctgaaacaagctaacatgactaacacccttaattccatccaccctcctctccctaggaggcctgcccccgctaaccggctttttgcccaaatgggccattatcgaagaattcacaaaaaacaatagcctcatcatccccaccatcatagccaccatcaccctccttaacctctacttctacctacgcctaatctactccacctcaatcacactactccccatatctaacaacgtaaaaataaaatgacagtttgaacatacaaaacccaccccattcctccccacactcatcgcccttaccacgctactcctacctatctccccttttatactaataatcttatagaaatttaggttaaatacagaccaagagccttcaaagccctcagtaagttgcaatacttaatttctgtaacagctaaggactgcaaaaccccactctgcatcaactgaacgcaaatcagccactttaattaagctaagcccttactagaccaatgggacttaaacccacaaacacttagttaacagctaagcaccctaatcaactggcttcaatctacttctcccgccgccgggaaaaaaggcgggagaagccccggcaggtttgaagctgcttcttcgaatttgcaattcaatatgaaaatcacctcggagctggtaaaaagaggcctaacccctgtctttagatttacagtccaatgcttcactcagccattttacctcacccccactgatgttcgccgaccgttgactattctctacaaaccacaaagacattggaacactatacctattattcggcgcatgagctggagtcctaggcacagctctaagcctccttattcgagccgagctgggccagccaggcaaccttctaggtaacgaccacatctacaacgttatcgtcacagcccatgcatttgtaataatcttcttcatagtaatacccatcataatcggaggctttggcaactgactagttcccctaataatcggtgcccccgatatggcgtttccccgcataaacaacataagcttctgactcttacctccctctctcctactcctgctcgcatctgctatagtggaggccggagcaggaacaggttgaacagtctaccctcccttagcagggaactactcccaccctggagcctccgtagacctaaccatcttctccttacacctagcaggtgtctcctctatcttaggggccatcaatttcatcacaacaattatcaatataaaaccccctgccataacccaataccaaacgcccctcttcgtctgatccgtcctaatcacagcagtcctacttctcctatctctcccagtcctagctgctggcatcactatactactaacagaccgcaacctcaacaccaccttcttcgaccccgccggaggaggagaccccattctataccaacacctattctgatttttcggtcaccctgaagtttatattcttatcctaccaggcttcggaataatctcccatattgtaacttactactccggaaaaaaagaaccatttggatacataggtatggtctgagctatgatatcaattggcttcctagggtttatcgtgtgagcacaccatatatttacagtaggaatagacgtagacacacgagcatatttcacctccgctaccataatcatcgctatccccaccggcgtcaaagtatttagctgactcgccacactccacggaagcaatatgaaatgatctgctgcagtgctctgagccctaggattcatctttcttttcaccgtaggtggcctgactggcattgtattagcaaactcatcactagacatcgtactacacgacacgtactacgttgtagcccacttccactatgtcctatcaataggagctgtatttgccatcataggaggcttcattcactgatttcccctattctcaggctacaccctagaccaaacctacgccaaaatccatttcactatcatattcatcggcgtaaatctaactttcttcccacaacactttctcggcctatccggaatgccccgacgttactcggactaccccgatgcatacaccacatgaaacatcctatcatctgtaggctcattcatttctctaacagcagtaatattaataattttcatgatttgagaagccttcgcttcgaagcgaaaagtcctaatagtagaagaaccctccataaacctggagtgactatatggatgccccccaccctaccacacattcgaagaacccgtatacataaaatctagacaaaaaaggaaggaatcgaaccccccaaagctggtttcaagccaaccccatggcctccatgactttttcaaaaaggtattagaaaaaccatttcataactttgtcaaagttaaattataggctaaatcctatatatcttaatggcacatgcagcgcaagtaggtctacaagacgctacttcccctatcatagaagagcttatcacctttcatgatcacgccctcataatcattttccttatctgcttcctagtcctgtatgcccttttcctaacactcacaacaaaactaactaatactaacatctcagacgctcaggaaatagaaaccgtctgaactatcctgcccgccatcatcctagtcctcatcgccctcccatccctacgcatcctttacataacagacgaggtcaacgatccctcccttaccatcaaatcaattggccaccaatggtactgaacctacgagtacaccgactacggcggactaatcttcaactcctacatacttcccccattattcctagaaccaggcgacctgcgactccttgacgttgacaatcgagtagtactcccgattgaagcccccattcgtataataattacatcacaagacgtcttgcactcatgagctgtccccacattaggcttaaaaacagatgcaattcccggacgtctaaaccaaaccactttcaccgctacacgaccgggggtatactacggtcaatgctctgaaatctgtggagcaaaccacagtttcatgcccatcgtcctagaattaattcccctaaaaatctttgaaatagggcccgtatttaccctataacaccccctctaccccctctagagcccactgtaaagctaacttagcattaaccttttaagttaaagattaagagaaccaacacctctttacagtgaaatgccccaactaaatactaccgtatggcccaccataattacccccatactccttacactattcctcatcacccaactaaaaatattaaacacaaactaccacctacctccctcaccaaagcccataaaaataaaaaattataacaaaccctgagaaccaaaatgaacgaaaatctgttcgcttcattcattgcccccacaatcctaggcctacccgccgcagtactgatcattctatttccccctctattgatccccacctccaaatatctcatcaacaaccgactaatcaccacccaacaatgactaatcaaactaacctcaaaacaaatgataaccatacacaacactaaaggacgaacctgatctcttatactagtatccttaatcatttttattgccacaactaacctcctcggactcctgcctcactcatttacaccaaccacccaactatctataaacctagccatggccatccccttatgagcgggcgcagtgattataggctttcgctctaagattaaaaatgccctagcccacttcttaccacaaggcacacctacaccccttatccccatactagttattatcgaaaccatcagcctactcattcaaccaatagccctggccgtacgcctaaccgctaacattactgcaggccacctactcatgcacctaattggaagcgccaccctagcaatatcaaccattaaccttccctctacacttatcatcttcacaattctaattctactaactatcctagaaatcgctgtcgccttaatccaagcctacgttttcacacttctagtaagcctctacctgcacgacaacacataatgacccaccaatcacatgcctatcatatagtaaaacccagcccatgacccctaacaggggccctctcagccctcctaatgacctccggcctagccatgtgatttcacttccactccataacgctcctcatactaggcctactaaccaacacactaaccatataccaatgatggcgcgatgtaacacgagaaagcacataccaaggccaccacacaccacctgtccaaaaaggccttcgatacgggataatcctatttattacctcagaagtttttttcttcgcaggatttttctgagccttttaccactccagcctagcccctaccccccaattaggagggcactggcccccaacaggcatcaccccgctaaatcccctagaagtcccactcctaaacacatccgtattactcgcatcaggagtatcaatcacctgagctcaccatagtctaatagaaaacaaccgaaaccaaataattcaagcactgcttattacaattttactgggtctctattttaccctcctacaagcctcagagtacttcgagtctcccttcaccatttccgacggcatctacggctcaacattttttgtagccacaggcttccacggacttcacgtcattattggctcaactttcctcactatctgcttcatccgccaactaatatttcactttacatccaaacatcactttggcttcgaagccgccgcctgatactggcattttgtagatgtggtttgactatttctgtatgtctccatctattgatgagggtcttactcttttagtataaatagtaccgttaacttccaattaactagttttgacaacgttcaaaaaagagtaataaacttcgccttaattttaataatcaacaccctcctagccttactactaataattattacattttgactaccacaactcaacggctacatagaaaaatccaccccttacgagtgcggcttcgaccctatatcccccgcccgcgtccctttctccataaaattcttcttagtagctattaccttcttattatttgatctagaaattgccctccttttacccctaccatgagccctacaaacaactaacctgccactaatagttatgtcatccctcttattaatcatcatcctagccctaagtctggcctatgagtgactacaaaaaggattagactgaaccgaattggtatatagtttaaacaaaacgaatgatttcgactcattaaattatgataatcatatttaccaaatgcccctcatttacataaatattatactagcatttaccatctcacttctaggaatactagtatatcgctcacacctcatatcctccctactatgcctagaaggaataatactatcgctgttcattatagctactctcataaccctcaacacccactccctcttagccaatattgtgcctattgccatactagtctttgccgcctgcgaagcagcggtgggcctagccctactagtctcaatctccaacacatatggcctagactacgtacataacctaaacctactccaatgctaaaactaatcgtcccaacaattatattactaccactgacatgactttccaaaaaacacataatttgaatcaacacaaccacccacagcctaattattagcatcatccctctactattttttaaccaaatcaacaacaacctatttagctgttccccaaccttttcctccgaccccctaacaacccccctcctaatactaactacctgactcctacccctcacaatcatggcaagccaacgccacttatccagtgaaccactatcacgaaaaaaactctacctctctatactaatctccctacaaatctccttaattataacattcacagccacagaactaatcatattttatatcttcttcgaaaccacacttatccccaccttggctatcatcacccgatgaggcaaccagccagaacgcctgaacgcaggcacatacttcctattctacaccctagtaggctcccttcccctactcatcgcactaatttacactcacaacaccctaggctcactaaacattctactactcactctcactgcccaagaactatcaaactcctgagccaacaacttaatatgactagcttacacaatagcttttatagtaaagatacctctttacggactccacttatgactccctaaagcccatgtcgaagcccccatcgctgggtcaatagtacttgccgcagtactcttaaaactaggcggctatggtataatacgcctcacactcattctcaaccccctgacaaaacacatagcctaccccttccttgtactatccctatgaggcataattataacaagctccatctgcctacgacaaacagacctaaaatcgctcattgcatactcttcaatcagccacatagccctcgtagtaacagccattctcatccaaaccccctgaagcttcaccggcgcagtcattctcataatcgcccacgggcttacatcctcattactattctgcctagcaaactcaaactacgaacgcactcacagtcgcatcataatcctctctcaaggacttcaaactctactcccactaatagctttttgatgacttctagcaagcctcgctaacctcgccttaccccccactattaacctactgggagaactctctgtgctagtaaccacgttctcctgatcaaatatcactctcctacttacaggactcaacatactagtcacagccctatactccctctacatatttaccacaacacaatggggctcactcacccaccacattaacaacataaaaccctcattcacacgagaaaacaccctcatgttcatacacctatcccccattctcctcctatccctcaaccccgacatcattaccgggttttcctcttgtaaatatagtttaaccaaaacatcagattgtgaatctgacaacagaggcttacgaccccttatttaccgagaaagctcacaagaactgctaactcatgcccccatgtctaacaacatggctttctcaacttttaaaggataacagctatccattggtcttaggccccaaaaattttggtgcaactccaaataaaagtaataaccatgcacactactataaccaccctaaccctgacttccctaattccccccatccttaccaccctcgttaaccctaacaaaaaaaactcatacccccattatgtaaaatccattgtcgcatccacctttattatcagtctcttccccacaacaatattcatgtgcctagaccaagaagttattatctcgaactgacactgagccacaacccaaacaacccagctctccctaagcttcaaactagactacttctccataatattcatccctgtagcattgttcgttacatggtccatcatagaattctcactgtgatatataaactcagacccaaacattaatcagttcttcaaatatctactcatcttcctaattaccatactaatcttagttaccgctaacaacctattccaactgttcatcggctgagagggcgtaggaattatatccttcttgctcatcagttgatgatacgcccgagcagatgccaacacagcagccattcaagcaatcctatacaaccgtatcggcgatatcggtttcatcctcgccttagcatgatttatcctacactccaactcatgagacccacaacaaatagcccttctaaacgctaatccaagcctcaccccactactaggcctcctcctagcagcagcaggcaaatcagcccaattaggtctccacccctgactcccctcagccatagaaggccccaccccagtctcagccctactccactcaagcactatagttgtagcaggaatcttcttactcatccgcttccaccccctagcagaaaatagcccactaatccaaactctaacactatgcttaggcgctatcaccactctgttcgcagcagtctgcgcccttacacaaaatgacatcaaaaaaatcgtagccttctccacttcaagtcaactaggactcataatagttacaatcggcatcaaccaaccacacctagcattcctgcacatctgtacccacgccttcttcaaagccatactatttatgtgctccgggtccatcatccacaaccttaacaatgaacaagatattcgaaaaataggaggactactcaaaaccatacctctcacttcaacctccctcaccattggcagcctagcattagcaggaatacctttcctcacaggtttctactccaaagaccacatcatcgaaaccgcaaacatatcatacacaaacgcctgagccctatctattactctcatcgctacctccctgacaagcgcctatagcactcgaataattcttctcaccctaacaggtcaacctcgcttccccacccttactaacattaacgaaaataaccccaccctactaaaccccattaaacgcctggcagccggaagcctattcgcaggatttctcattactaacaacatttcccccgcatcccccttccaaacaacaatccccctctacctaaaactcacagccctcgctgtcactttcctaggacttctaacagccctagacctcaactacctaaccaacaaacttaaaataaaatccccactatgcacattttatttctccaacatactcggattctaccctagcatcacacaccgcacaatcccctatctaggccttcttacgagccaaaacctgcccctactcctcctagacctaacctgactagaaaagctattacctaaaacaatttcacagcaccaaatctccacctccatcatcacctcaacccaaaaaggcataattaaactttacttcctctctttcttcttcccactcatcctaaccctactcctaatcacataacctattcccccgagcaatctcaattacaatatatacaccaacaaacaatgttcaaccagtaactactactaatcaacgcccataatcatacaaagcccccgcaccaataggatcctcccgaatcaaccctgacccctctccttcataaattattcagcttcctacactattaaagtttaccacaaccaccaccccatcatactctttcacccacagtaccaatcctacctccatcgctaaccccactaaaacactcaccaagacctcaacccctgacccccatgcctcaggatactcctcaatagccatcgctgtagtatatccaaagacaaccatcattccccctaaataaattaaaaaaactattaaacccatataacctcccccaaaattcagaataataacacacccgaccacaccgctaacaatcaatgctaaacccccataaataggagaaggcttagaagaaaaccccacaaaccccattactaaacccacactcaacagaaacaaagcatacatcattattctcgcacggactacaaccacgaccaatgatatgaaaaaccatcgttgtatttcaactacaagaacaccaatgaccccaatacgcaaaactaaccccctaataaaattaattaaccactcattcatcgacctccccaccccatccaacatctccgcatgatgaaacttcggctcactccttggcgcctgcctgatcctccaaatcaccacaggactattcctagccatgcactactcaccagacgcctcaaccgccttttcatcaatcgcccacatcactcgagacgtaaattatggctgaatcatccgctaccttcacgccaatggcgcctcaatattctttatctgcctcttcctacacatcgggcgaggcctatattacggatcatttctctactcagaaacctgaaacatcggcattatcctcctgcttgcaactatagcaacagccttcataggctatgtcctcccgtgaggccaaatatcattctgaggagccacagtaattacaaacttactatccgccatcccatacattgggacagacctagttcaatgaatctgaggaggctactcagtagacagtcccaccctcacacgattctttacctttcacttcatcttgcccttcattattgcagccctagcagcactccacctcctattcttgcacgaaacgggatcaaacaaccccctaggaatcacctcccattccgataaaatcaccttccacccttactacacaatcaaagacgccctcggcttacttctcttccttctctccttaatgacattaacactattctcaccagacctcctaggcgacccagacaattataccctagccaaccccttaaacacccctccccacatcaagcccgaatgatatttcctattcgcctacacaattctccgatccgtccctaacaaactaggaggcgtccttgccctattactatccatcctcatcctagcaataatccccatcctccatatatccaaacaacaaagcataatatttcgcccactaagccaatcactttattgactcctagccgcagacctcctcattctaacctgaatcggaggacaaccagtaagctacccttttaccatcattggacaagtagcatccgtactatacttcacaacaatcctaatcctaataccaactatctccctaattgaaaacaaaatactcaaatgggcctgtccttgtagtataaactaatacaccagtcttgtaaaccggagatgaaaacctttttccaaggacaaatcagagaaaaagtctttaactccaccattagcacccaaagctaagattctaatttaaactattctctgttctttcatggggaagcagatttgggtaccacccaagtattgactcacccatcaacaaccgctatgtatttcgtacattactgccagccaccatgaatattgtacggtaccataaatacttgaccacctgtagtacataaaaacccaatccacatcaaaaccccctccccatgcttacaagcaagtacagcaatcaaccctcaactatcacacatcaactgcaactccaaagccacccctcacccactaggataccaacaaacctacccacccttaacagtacatagtacataaagccatttaccgtacatagcacattacagtcaaatcccttctcgtccccatggatgacccccctcagataggggtcccttgaccaccatcctccgtgaaatcaatatcccgcacaagagtgctactctcctcgctccgggcccataacacttgggggtagctaaagtgaactgtatccgacatctggttcctacttcagggtcataaagcctaaatagcccacacgttccccttaaataagacatcacgatg

SEQ ID NO: 549 - DNA, 16571 bp, Homo sapiens mitochondrial
  3109: "n" refers to a nucleotide at position 3107 of the Cambridge Reference Sequence (CRS, Anderson et al. 1981 Nature 290:457-465), later determined to be absent from the human mtDNA sequence according to the revised CRS (rCRS, Andrews et al. 1999 Nature Genetics 23:147); "n" therefore represents a single nucleotide deletion at a position corresponding to nucleotide 3107 of SEQ ID NO:1 as provided herein.
gatcacaggtctatcaccctattaaccactcacgggagctctccatgcatttggtattttcgtctggggggtgtgcacgcgatagcattgcgagacgctggagccggagcaccctatgtcgcagtatctgtctttgattcctgcctcattctattatttatcgcacctacgttcaatattacaggcgaacatacttactaaagtgtgttaattaattaatgcttgtaggacataataataacaattgaatgtctgcacagccgctttccacacagacatcataacaaaaaatttccaccaaaccccccctcccccccgcttctggccacagcacttaaacacatctctgccaaaccccaaaaacaaagaaccctaacaccagcctaaccagatttcaaattttatcttttggcggtatgcacttttaacagtcaccccccaactaacacattattttcccctcccactcccatactactaatctcatcaatacaacccccgcccatcctacccagcacacacacaccgctgctaaccccataccccgaaccaaccaaaccccaaagacaccccccacagtttatgtagcttacctcctcaaagcaatacactgaaaatgtttagacgggctcacatcaccccataaacaaataggtttggtcctagcctttctattagctcttagtaagattacacatgcaagcatccccgttccagtgagttcaccctctaaatcaccacgatcaaaagggacaagcatcaagcacgcagcaatgcagctcaaaacgcttagcctagccacacccccacgggaaacagcagtgattaacctttagcaataaacgaaagtttaactaagctatactaaccccagggttggtcaatttcgtgccagccaccgcggtcacacgattaacccaagtcaatagaagccggcgtaaagagtgttttagatcaccccctccccaataaagctaaaactcacctgagttgtaaaaaactccagttgacacaaaatagactacgaaagtggctttaacatatctgaacacacaatagctaagacccaaactgggattagataccccactatgcttagccctaaacctcaacagttaaatcaacaaaactgctcgccagaacactacgagccacagcttaaaactcaaaggacctggcggtgcttcatatccctctagaggagcctgttctgtaatcgataaaccccgatcaacctcaccacctcttgctcagcctatataccgccatcttcagcaaaccctgatgaaggctacaaagtaagcgcaagtacccacgtaaagacgttaggtcaaggtgtagcccatgaggtggcaagaaatgggctacattttctaccccagaaaactacgatagcccttatgaaacttaagggtcgaaggtggatttagcagtaaactgagagtagagtgcttagttgaacagggccctgaagcgcgtacacaccgcccgtcaccctcctcaagtatacttcaaaggacatttaactaaaacccctacgcatttatatagaggagacaagtcgtaacatggtaagtgtactggaaagtgcacttggacgaaccagagtgtagcttaacacaaagcacccaacttacacttaggagatttcaacttaacttgaccgctctgagctaaacctagccccaaacccactccaccttactaccagacaaccttagctaaaccatttacccaaataaagtataggcgatagaaattgaaacctggcgcaatagatatagtaccgcaagggaaagatgaaaaattataaccaagcataatatagcaaggactaacccctataccttctgcataatgaattaactagaaataactttgcaaggagagccaaagctaagacccccgaaaccagacgagctacctaagaacagctaaaagagcacacccgtctatgtagcaaaatagtgggaagatttataggtagaggcgacaaacctaccgagcctggtgatagctggttgtccaagatagaatcttagttcaactttaaatttgcccacagaaccctctaaatccccttgtaaatttaactgttagtccaaagaggaacagctctttggacactaggaaaaaaccttgtagagagagtaaaaaatttaacacccatagtaggcctaaaagcagccaccaattaagaaagcgttcaagctcaacacccactacctaaaaaatcccaaacatataactgaactcctcacacccaattggaccaatctatcaccctatagaagaactaatgttagtataagtaacatgaaaacattctcctccgcataagcctgcgtcagattaaaacactgaactgacaattaacagcccaatatctacaatcaaccaacaagtcattattaccctcactgtcaacccaacacaggcatgctcataaggaaaggttaaaaaaagtaaaaggaactcggcaaatcttaccccgcctgtttaccaaaaacatcacctctagcatcaccagtattagaggcaccgcctgcccagtgacacatgtttaacggccgcggtaccctaaccgtgcaaaggtagcataatcacttgttccttaaatagggacctgtatgaatggctccacgagggttcagctgtctcttacttttaaccagtgaaattgacctgcccgtgaagaggcgggcatgacacagcaagacgagaagaccctatggagctttaatttattaatgcaaacagtacctaacaaacccacaggtcctaaactaccaaacctgcattaaaaatttcggttggggcgacctcggagcagaacccaacctccgagcagtacatgctaagacttcaccagtcaaagcgaactactatactcaattgatccaataacttgaccaacggaacaagttaccctagggataacagcgcaatcctattctagagtccatatcaacaatagggtttacgacctcgatgttggatcaggacatcccgatggtgcagccgctattaaaggttcgtttgttcaacgattaaagtcctacgtgatctgagttcagaccggagtaatccaggtcggtttctatctacnttcaaattcctccctgtacgaaaggacaagagaaataaggcctacttcacaaagcgccttcccccgtaaatgatatcatctcaacttagcattatacccacacccacccaagaacagggtttgttaagatggcagagcccggtaatcgcataaaacttaaaactttacagtcagaggttcaattcctcttcttaacaacatacccatggccaacctcctactcctcattgtacccattctaatcgcaatggcattcctaatgcttaccgaacgaaaaattctaggctatatacaactacgcaaaggccccaacgttgtaggcccctacgggctactacaacccttcgctgacgccataaaactcttcaccaaagagcccctaaaacccgccacatctaccatcaccctctacatcaccgccccgaccttagctctcaccatcgctcttctactatgaacccccctccccatacccaaccccctggtcaacctcaacctaggcctcctatttattctagccacctctagcctagccgtttactcaatcctctgatcagggtgagcatcaaactcaaactacgccctgatcggcgcactgcgagcagtagcccaaacaatctcatatgaagtcaccctagccatcattctactatcaacattactaataagtggctcctttaacctctccacccttatcacaacacaagaacacctctgattactcctgccatcatgacccttggccataatatgatttatctccacactagcagagaccaaccgaacccccttcgaccttgccgaaggggagtccgaactagtctcaggcttcaacatcgaatacgccgcaggccccttcgccctattcttcatagccgaatacacaaacattattataataaacaccctcaccactacaatcttcctaggaacaacatatgacgcactctcccctgaactctacacaacatattttgtcaccaagaccctacttctaacctccctgttcttatgaattcgaacagcatacccccgattccgctacgaccaactcatacacctcctatgaaaaaacttcctaccactcaccctagcattacttatatgatatgtctccatacccattacaatctccagcattccccctcaaacctaagaaatatgtctgataaaagagttactttgatagagtaaataataggagcttaaacccccttatttctaggactatgagaatcgaacccatccctgagaatccaaaattctccgtgccacctatcacaccccatcctaaagtaaggtcagctaaataagctatcgggcccataccccgaaaatgttggttatacccttcccgtactaattaatcccctggcccaacccgtcatctactctaccatctttgcaggcacactcatcacagcgctaagctcgcactgattttttacctgagtaggcctagaaataaacatgctagcttttattccagttctaaccaaaaaaataaaccctcgttccacagaagctgccatcaagtatttcctcacgcaagcaaccgcatccataatccttctaatagctatcctcttcaacaatatactctccggacaatgaaccataaccaatactaccaatcaatactcatcattaataatcataatggctatagcaataaaactaggaatagccccctttcacttctgagtcccagaggttacccaaggcacccctctgacatccggcctgcttcttctcacatgacaaaaactagcccccatctcaatcatataccaaatctctccctcactaaacgtaagccttctcctcactctctcaatcttatccatcatagcaggcagttgaggtggattaaaccaaacccagctacgcaaaatcttagcatactcctcaattacccacataggatgaataatagcagttctaccgtacaaccctaacataaccattcttaatttaactatttatattatcctaactactaccgcattcctactactcaacttaaactccagcaccacgaccctactactatctcgcacctgaaacaagctaacatgactaacacccttaattccatccaccctcctctccctaggaggcctgcccccgctaaccggctttttgcccaaatgggccattatcgaagaattcacaaaaaacaatagcctcatcatccccaccatcatagccaccatcaccctccttaacctctacttctacctacgcctaatctactccacctcaatcacactactccccatatctaacaacgtaaaaataaaatgacagtttgaacatacaaaacccaccccattcctccccacactcatcgcccttaccacgctactcctacctatctccccttttatactaataatcttatagaaatttaggttaaatacagaccaagagccttcaaagccctcagtaagttgcaatacttaatttctgtaacagctaaggactgcaaaaccccactctgcatcaactgaacgcaaatcagccactttaattaagctaagcccttactagaccaatgggacttaaacccacaaacacttagttaacagctaagcaccctaatcaactggcttcaatctacttctcccgccgccgggaaaaaaggcgggagaagccccggcaggtttgaagctgcttcttcgaatttgcaattcaatatgaaaatcacctcggagctggtaaaaagaggcctaacccctgtctttagatttacagtccaatgcttcactcagccattttacctcacccccactgatgttcgccgaccgttgactattctctacaaaccacaaagacattggaacactatacctattattcggcgcatgagctggagtcctaggcacagctctaagcctccttattcgagccgagctgggccagccaggcaaccttctaggtaacgaccacatctacaacgttatcgtcacagcccatgcatttgtaataatcttcttcatagtaatacccatcataatcggaggctttggcaactgactagttcccctaataatcggtgcccccgatatggcgtttccccgcataaacaacataagcttctgactcttacctccctctctcctactcctgctcgcatctgctatagtggaggccggagcaggaacaggttgaacagtctaccctcccttagcagggaactactcccaccctggagcctccgtagacctaaccatcttctccttacacctagcaggtgtctcctctatcttaggggccatcaatttcatcacaacaattatcaatataaaaccccctgccataacccaataccaaacgcccctcttcgtctgatccgtcctaatcacagcagtcctacttctcctatctctcccagtcctagctgctggcatcactatactactaacagaccgcaacctcaacaccaccttcttcgaccccgccggaggaggagaccccattctataccaacacctattctgatttttcggtcaccctgaagtttatattcttatcctaccaggcttcggaataatctcccatattgtaacttactactccggaaaaaaagaaccatttggatacataggtatggtctgagctatgatatcaattggcttcctagggtttatcgtgtgagcacaccatatatttacagtaggaatagacgtagacacacgagcatatttcacctccgctaccataatcatcgctatccccaccggcgtcaaagtatttagctgactcgccacactccacggaagcaatatgaaatgatctgctgcagtgctctgagccctaggattcatctttcttttcaccgtaggtggcctgactggcattgtattagcaaactcatcactagacatcgtactacacgacacgtactacgttgtagctcacttccactatgtcctatcaataggagctgtatttgccatcataggaggcttcattcactgatttcccctattctcaggctacaccctagaccaaacctacgccaaaatccatttcactatcatattcatcggcgtaaatctaactttcttcccacaacactttctcggcctatccggaatgccccgacgttactcggactaccccgatgcatacaccacatgaaacatcctatcatctgtaggctcattcatttctctaacagcagtaatattaataattttcatgatttgagaagccttcgcttcgaagcgaaaagtcctaatagtagaagaaccctccataaacctggagtgactatatggatgccccccaccctaccacacattcgaagaacccgtatacataaaatctagacaaaaaaggaaggaatcgaaccccccaaagctggtttcaagccaaccccatggcctccatgactttttcaaaaaggtattagaaaaaccatttcataactttgtcaaagttaaattataggctaaatcctatatatcttaatggcacatgcagcgcaagtaggtctacaagacgctacttcccctatcatagaagagcttatcacctttcatgatcacgccctcataatcattttccttatctgcttcctagtcctgtatgcccttttcctaacactcacaacaaaactaactaatactaacatctcagacgctcaggaaatggaaaccgtctgaactatcctgcccgccatcatcctagtcctcatcgccctcccatccctacgcatcctttacataacagacgaggtcaacgatccctcccttaccatcaaatcaattggccaccaatggtactgaacctacgagtacaccgactacggcggactaatcttcaactcctacatacttcccccattattcctagaaccaggcgacctgcgactccttgacgttgacaatcgagtagtactcccgattgaagcccccattcgtataataattacatcacaagacgtcttgcactcatgagctgtccccacattaggcttaaaaacagatgcaattcccggacgtctaaaccaaaccactttcaccgctacacgaccgggggtatactacggtcaatgctctgaaatctgtggagcaaaccacagtttcatgcccatcgtcctagaattaattcccctaaaaatctttgaaatagggcccgtatttaccctatagcaccccctctaccccctctagagcccactgtaaagctaacttagcattaaccttttaagttaaagattaagagaaccaacacctctttacagtgaaatgccccaactaaatactaccgtatggcccaccataattacccccatactccttacactattcctcatcacccaactaaaaatattaaacacaaactaccacctacctccctcaccaaagcccataaaaataaaaaattataacaaaccctgagaaccaaaatgaacgaaaatctgttcgcttcattcattgcccccacaatcctaggcctacccgccgcagtactgatcattctatttccccctctattgatccccacctccaaatatctcatcaacaaccgactaatcaccacccaacaatgactaatcaaactaacctcaaaacaaatgataaccatacacaacactaaaggacgaacctgatctcttatactagtatccttaatcatttttattgccacaactaacctcctcggactcctgcctcactcatttacaccaaccacccaactatctataaacctagccatggccatccccttatgagcgggcgcagtgattataggctttcgctctaagattaaaaatgccctagcccacttcttaccacaaggcacacctacaccccttatccccatactagttattatcgaaaccatcagcctactcattcaaccaatagccctggccgtacgcctaaccgctaacattactgcaggccacctactcatgcacctaattggaagcgccaccctagcaatatcaaccattaaccttccctctacacttatcatcttcacaattctaattctactgactatcctagaaatcgctgtcgccttaatccaagcctacgttttcacacttctagtaagcctctacctgcacgacaacacataatgacccaccaatcacatgcctatcatatagtaaaacccagcccatgacccctaacaggggccctctcagccctcctaatgacctccggcctagccatgtgatttcacttccactccataacgctcctcatactaggcctactaaccaacacactaaccatataccaatgatggcgcgatgtaacacgagaaagcacataccaaggccaccacacaccacctgtccaaaaaggccttcgatacgggataatcctatttattacctcagaaatttttttcttcgcaggatttttctgagccttttaccactccagcctagcccctaccccccaattaggagggcactggcccccaacaggcatcaccccgctaaatcccctagaagtcccactcctaaacacatccgtattactcgcatcaggagtatcaatcacctgagctcaccatagtctaatagaaaacagccgaaaccaaataattcaagcactgcttattacaattttactgggtctctattttaccctcctacaagcctcagagtacttcgagtctcccttcaccatttccgacggcatctacggctcaacattttttgtagccacaggcttccacggacttcacgtcattattggctcaactttcctcactatctgcttcatccgccaactaatatttcactttacatccaaacatcactttggcttcgaagccgccgcctgatactggcattttgtagatgtggtttgactatttctgtatgtctccatctattgatgagggtcttactcttttagtataaatagtaccgttaacttccaattaactagttttgacaacattcaaaaaagagtaataaacttcgccttaattttaataatcaacaccctcctagccttactactaataattattacattttgactaccacaactcaacggctacatagaaaaatccaccccttacgagtgcggcttcgaccctatatcccccgcccgcgtccctttctccataaaattcttcttagtagctattaccttcttattatttgatctagaaattgccctccttttacccctaccatgagccctacaaacaactaacctgccactaatagttatgtcatccctcttattaatcatcatcctagccctaagtctggcctatgagtgactacaaaaaggattagactgaaccgaattggtatatagtttaaacaaaacgaatgatttcgactcattaaattatgataatcatatttaccaaatgcccctcatttacataaatattatactagcatttaccatctcacttctaggaatactagtatatcgctcacacctcatatcctccctactatgcctagaaggaataatactatcgctgttcattatagctactctcataaccctcaacacccactccctcttagccaatattgtgcctattgccatactagtctttgccgcctgcgaagcagcggtgggcctagccctactagtctcaatctccaacacatatggcctagactacgtacataacctaaacctactccaatgctaaaactaatcgtcccaacaattatattactaccactgacatgactttccaaaaaacacataatttgaatcaacacaaccacccacagcctaattattagcatcatccctctactattttttaaccaaatcaacaacaacctatttagctgttccccaaccttttcctccgaccccctaacaacccccctcctaatactaactacctgactcctacccctcacaatcatggcaagccaacgccacttatccagtgaaccactatcacgaaaaaaactctacctctctatactaatctccctacaaatctccttaattataacattcacagccacagaactaatcatattttatatcttcttcgaaaccacacttatccccaccttggctatcatcacccgatgaggcaaccagccagaacgcctgaacgcaggcacatacttcctattctacaccctagtaggctcccttcccctactcatcgcactaatttacactcacaacaccctaggctcactaaacattctactactcactctcactgcccaagaactatcaaactcctgagccaacaacttaatatgactagcttacacaatagcttttatagtaaagatacctctttacggactccacttatgactccctaaagcccatgtcgaagcccccatcgctgggtcaatagtacttgccgcagtactcttgaaactaggcggctatggtataatacgcctcacactcattctcaaccccctgacaaaacacatagcctaccccttccttgtactatccctatgaggcataattataacaagctccatctgcctacgacaaacagacctaaaatcgctcattgcatactcttcaatcagccacatagccctcgtagtgacagccattctcatccaaaccccctgaagcttcaccggcgcagtcattctcataatcgcccacggacttacatcctcattactattctgcctagcaaactcaaactacgaacgcactcacagtcgcatcataatcctctctcaaggacttcaaactctactcccactaatagctttttgatgacttctagcaagcctcgctaacctcgccttaccccccactattaacctactgggagaactctctgtgctagtaaccacgttctcctgatcaaatatcactctcctacttacaggactcaacatactagtcacagccctatactccctctacatatttaccacaacacaatggggctcactcacccaccacattaacaacataaaaccctcattcacacgagaaaacaccctcatgttcatacacctatcccccattctcctcctatccctcaaccccgacatcattaccgggttttcctcttgtaaatatagtttaaccaaaacatcagattgtgaatctgacaacagaggcttacgaccccttatttaccgagaaagctcacaagaactgctaactcatgcccccatgtctaacaacatggctttctcaacttttaaaggataacagctatccattggtcttaggccccaagaattttggtgcaactccaaataaaagtaataaccatgcacactactataaccaccctaaccctaacttccctaattccccccatccttaccaccctcgttaaccctaacaaaaaaaactcatacccccattatgtaaaatccattgtcgcatccacctttattatcagtctcttccccacaacaatattcatgtgcctagaccaagaagttattatctcgaactgacactgagccacaacccaaacaacccagctctccctaagcttcaaactagactacttctccataatattcatccctgtagcattgttcgttacatggtccgtcatagaattctcactgtgatatataaactcagacccaaacattaatcagttcttcaaatatctactcatcttcctaattaccatactaatcttagttaccgctaacaacctattccaactgttcatcggctgagagggcgtaggaattatatccttcttgctcatcagttgatgatacgcccgagcagatgccaacacagcagccattcaagcaatcctatacaaccgtatcggcgatatcggtttcatcctcgccttagcatgatttatcctacactccaactcatgagacccacaacaaatagcccttctaaacgctaatccaagcctcaccccactactaggcctcctcctagcagcagcaggcaaatcagcccaattaggtctccacccctgactcccctcagccatagaaggccccaccccagtctcagccctactccactcaagcactatagttgtagcaggaatcttcttactcatccgcttccaccccctagcagaaaatagcccactaatccaaactctaacactatgcttaggcgctatcaccactctgttcgcagcagtctgcgcccttacacaaaatgacatcaaaaaaatcgtagccttctccacttcaagtcaactaggactcataatagttacaatcggcatcaaccaaccacacctagcattcctgcacatctgtacccacgccttcttcaaagccatactatttatgtgctccgggtccatcatccacaaccttaacaatgaacaagatattcgaaaaataggaggactactcaaaaccatacctctcacttcaacctccctcaccattggcagcctagcattagcaggaatacctttcctcacaggtttctactccaaagaccacatcatcgaaaccgcaaacatatcatacacaaacgcctgagccctatctattactctcatcgctacctccctgacaagcgcctatagcactcgaataatccttctcaccctagcaggtcgacctcgcttccccacccttactaacattaacgaaaataaccccaccctactaaaccccattaaacgcctggcagccggaagcctattcgcaggatttctcattactaacaacatttcccccgcatcccccttccaaacaacaatccccctctacctaaaactcacagccctcgctgtcactttcctaggacttctaacagccctagacctcaactacctaaccaacaaacttaaaataaaatccccactatgcacattttatttctccaacatactcggattctaccctagcatcacacaccgcacaatcccctatctaggccttcttacgagccaaaacctgcccctactcctcctagacctaacctgactagaaaagctattacctaaaacaatttcacagcaccaaatctccacctccatcatcacctcaacccaaaaaggcataattaaactttacttcctctctttcttcttcccactcatcctaaccctactcctaatcacataacctattcccccgagcaatctcaattacaatatacacaccaacaaacaatgttcaaccagtaactactactaatcaacgcccataatcatacaaagcccccgcaccaataggatcctcccgaatcaaccctgacccctctccttcataaattattcagcttcctacactattaaagtttaccacaaccaccaccccatcatactctttcacccacagcaccaatcctacctccatcgctaaccccactaaaacactcaccaagacctcaacccctgacccccatgcctcaggatactcctcaatagccatcgctgtagtatatccaaagacaaccatcattccccctaaataaattaaaaaaactattaaacccatataacctcccccaaaattcagaataataacacacccgaccacaccgctaacaatcaatactaaacccccataaataggagaaggcttagaagaaaaccccacaaaccccattactaaacccacactcaacagaaacaaagcatacatcattattctcgcacggactacaaccacgaccaatgatatgaaaaaccatcgttgtatttcaactacaagaacgccaatgaccccaatacgcaaaattaaccccctaataaaattaattaaccactcattcatcgacctccccaccccatccaacatctccgcatgatgaaacttcggctcactccttggcgcctgcctgatcctccaaatcaccacaggactattcctagccatgcactactcaccagacgcctcaaccgccttttcatcaatcgcccacatcactcgagacgtaaattatggctgaatcatccgctaccttcacgccaatggcgcctcaatattctttatctgcctcttcctacacatcgggcgaggcctatattacggatcatttctctactcagaaacctgaaacatcggcattatcctcctgcttgcaactatagcaacagccttcataggctatgtcctcccgtgaggccaaatatcattctgaggggccacagtaattacaaacttactatccgccatcccatacattgggacagacctagttcaatgaatctgaggaggctactcagtagacagtcccaccctcacacgattctttacctttcacttcatcttgcccttcattattgcagccctagcagcactccacctcctattcttgcacgaaacgggatcaaacaaccccctaggaatcacctcccattccgataaaatcaccttccacccttactacacaatcaaagacgccctcggcttacttctcttccttctctccttaatgacattaacactattctcaccagacctcctaggcgacccagacaattataccctagccaaccccttaaacacccctccccacatcaagcccgaatgatatttcctattcgcctacacaattctccgatccgtccctaacaaactaggaggcgtccttgccctattactatccatcctcatcctagcaataatccccatcctccatatatccaaacaacaaagcataatatttcgcccactaagccaatcactttattgactcctagccgcagacctcctcattctaacctgaatcggaggacaaccagtaagctacccttttaccatcattggacaagtagcatccgtactatacttcacaacaatcctaatcctaataccaactatctccctaattgaaaacaaaatactcaaatgggcctgtccttgtagtataaactaatacaccagtcttgtaaaccggaaatgaaaacctttttccaaggacaaatcagagaaaaagtctttaactccaccattagcacccaaagctaagattctaatttaaactattctctgttctttcatggggaagcagatttgggtaccacccaagtattgactcacccatcaacaaccgctatgtatttcgtacattactgccagccaccatgaatattgtacggtaccataaatacttgaccacctgtagtacataaaaacccaatccacatcaaaaccccccccccatgcttacaagcaagtacagcaatcaaccctcaactatcacacatcaactgcaactccaaagccacccctcacccattaggataccaacaaacctacccacccttaacagtacatagtacataaagccatttaccgtacatagcacattacagtcaaatcccttctcgtccccatggatgacccccctcagataggggtcccttgaccaccatcctccgtgaaatcaatatcccgcacaagagtgctactctcctcgctccgggcccataacacttgggggtagctaaagtgaactgtatccgacatctggttcctacttcagggccataaagcctaaatagcccacacgttccccttaaataagacatcacgatg

SEQ ID NO: 550 - DNA, 16572 bp, Homo sapiens mitochondrial
  3110: "n" refers to a nucleotide at position 3107 of the Cambridge Reference Sequence (CRS, Anderson et al. 1981 Nature 290:457-465), later determined to be absent from the human mtDNA sequence according to the revised CRS (rCRS, Andrews et al. 1999 Nature Genetics 23:147); "n" therefore represents a single nucleotide deletion at a position corresponding to nucleotide 3107 of SEQ ID NO:1 as provided herein.
gatcacaggtctatcaccctattaaccactcacgggagctctccatgcatttggtattttcgtctggggggtatgcacgcgatagcattgcgagacgctggagccggagcaccctatgtcgcagtatctgtctttgattcctgcctcatcctattatttatcgcacctacgttcaatattacaggcgaacatacttactaaagtgtgttaattaattaatgcttgtaggacataataataacaattgaatgtctgcacagccgctttccacacagacatcataacaaaaaatttccaccaaaccccccctcccccgccttctggccacagcacttaaacacatctctgccaaaccccaaaaacaaagaaccctaacaccagcctaaccagatttcaaattttatcttttggcggtatgcacttttaacagtcaccccccaactaacacattattttcccctcccactcccatactactaatctcatcaatacaacccccgcccatcctacccagcacacacacaccacgctgctaaccccataccccgaaccaaccaaaccccaaagacaccccccacagtttatgtagcttacctcctcaaagcaatacactgaaaatgtttagacgggctcacatcaccccataaacaaataggtttggtcctagcctttctattagctcttagtaagattacacatgcaagcatccccgttccagtgagttcaccctctaaatcaccacgatcaaaagggacaagcatcaagcacgcagcaatgcagctcaaaacgcttagcctagccacacccccacgggaaacagcagtgattaacctttagcaataaacgaaagtttaactaagctatactaaccccagggttggtcaatttcgtgccagccaccgcggtcacacgattaacccaagtcaatagaagccggcgtaaagagtgttttagatcaccccctccccaataaagctaaaactcacctgagttgtaaaaaactccagttgacacaaaatagactacgaaagtggctttaacatatctgaacacacaatagctaagacccaaactgggattagataccccactatgcttagccctaaacctcaacagttaaatcaacaaaactgctcgccagaacactacgagccacagcttaaaactcaaaggacctggcggtgcttcatatccctctagaggagcctgttctgtaatcgataaaccccgatcaacctcaccacctcttgctcagcctatataccgccatcttcagcaaaccctgatgaaggctacaaagtaagcgcaagtacccacgtaaagacgttaggtcaaggtgtagcccatgaggtggcaagaaatgggctacattttctaccccagaaaactacgatagcccttatgaaacttaagggtcgaaggtggatttagcagtaaactgagagtagagtgcttagttgaacagggccctgaagcgcgtacacaccgcccgtcaccctcctcaagtatacttcaaaggacatttaactaaaacccctacgcatttatatagaggagacaagtcgtaacatggtaagtgtactggaaagtgcacttggacgaaccagagtgtagcttaacacaaagcacccaacttacacttaggagatttcaacttaacttgaccgctctgagctaaacctagccccaaacccactccaccttactaccagacaaccttagccaaaccatttacccaaataaagtataggcgatagaaattgaaacctggcgcaatagatatagtaccgcaagggaaagatgaaaaattataaccaagcataatatagcaaggactaacccctataccttctgcataatgaattaactagaaataactttgcaaggagagccaaagctaagacccccgaaaccagacgagctacctaagaacagctaaaagagcacacccgtctatgtagcaaaatagtgggaagatttataggtagaggcgacaaacctaccgagcctggtgatagctggttgtccaagatagaatcttagttcaactttaaatttgcccacagaaccctctaaatccccttgtaaatttaactgttagtccaaagaggaacagctctttggacactaggaaaaaaccttgtagagagagtaaaaaatttaacacccatagtaggcctaaaagcagccaccaattaagaaagcgttcaagctcaacacccactacctaaaaaatcccaaacatataactgaactcctcacacccaattggaccaatctatcaccctatagaagaactaatgttagtataagtaacatgaaaacattctcctccgcataagcctgcgtcagattaaaacactgaactgacaattaacagcccaatatctacaatcaaccaacaagtcattattaccctcactgtcaacccaacacaggcatgctcataaggaaaggttaaaaaaagtaaaaggaactcggcaaatcttaccccgcctgtttaccaaaaacatcacctctagcatcaccagtattagaggcaccgcctgcccagtgacacatgtttaacggccgcggtaccctaaccgtgcaaaggtagcataatcacttgttccttaaatagggacctgtatgaatggctccacgagggttcagctgtctcttacttttaaccagtgaaattgacctgcccgtgaagaggcgggcataacacagcaagacgagaagaccctatggagctttaatttattaatgcaaacagtacctaacaaacccacaggtcctaaactaccaaacctgcattaaaaatttcggttggggcgacctcggagcagaacccaacctccgagcagtacatgctaagacttcaccagtcaaagcgaactactatactcaattgatccaataacttgaccaacggaacaagttaccctagggataacagcgcaatcctattctagagtccatatcaacaatagggtttacgacctcgatgttggatcaggacatcccaatggtgcagccgctattaaaggttcgtttgttcaacgattaaagtcctacgtgatctgagttcagaccggagtaatccaggtcggtttctatctacnttcaaattcctccctgtacgaaaggacaagagaaataaggcctacttcacaaagcgccttcccccgtaaatgatatcatctcaacttagtattatacccacacccacccaagaacagggtttgttaagatggcagagcccggtaatcgcataaaacttaaaactttacagtcagaggttcaattcctcttcttaacaacatacccatggccaacctcctactcctcattgtacccattctaatcgcaatggcattcctaatgcttaccgaacgaaaaattctaggctatatacaactacgcaaaggccccaacgttgtaggcccctacgggctactacaacccttcgctgacgccataaaactcttcaccaaagagcccctaaaacccgccacatctaccatcaccctctacatcaccgccccgaccttagctctcaccatcgctcttctactatgaacccccctccccatacccaaccccctggtcaacctcaacctaggcctcctatttattctagccacctctagcctagccgtttactcaatcctctgatcagggtgagcatcaaactcaaactacgccctgatcggcgcactgcgagcagtagcccaaacaatctcatatgaagtcaccctagccatcattctactatcaacattactaataagtggctcctttaacctctccacccttatcacaacacaagaacacctctgattactcctgccatcatgacccttggccataatatgatttatctccacactagcagagaccaaccgaacccccttcgaccttgccgaaggggagtccgaactagtctcaggcttcaacatcgaatacgccgcaggccccttcgccctattcttcatagccgaatacacaaacattattataataaacaccctcaccactacaatcttcctaggaacaacatatgacgcactctcccctgaactctacacaacatattttgtcaccaagaccctacttctaacctccctgttcttatgaattcgaacagcatacccccgattccgctacgaccaactcatacacctcctatgaaaaaacttcctaccactcaccctagcattacttatatgatatgtctccatacccattacaatctccagcattccccctcaaacctaagaaatatgtctgataaaagagttactttgatagagtaaataataggagcttaaacccccttatttctaggactatgagaatcgaacccatccctgagaatccaaaattctccgtgccacctatcacaccccatcctaaagtaaggtcagctaaataagctatcgggcccataccccgaaaatgttggttatacccttcccgtactaattaatcccctggcccaacccgtcatctactctaccatctttgcaggcacactcatcacagcgctaagctcgcactgattttttacctgagtaggcctagaaataaacatgctagcttttattccagttctaaccaaaaaaataaaccctcgttccacagaagctgccatcaagtatttcctcacgcaagcaaccgcatccataatccttctaatagctatcctcttcaacaatatactctccggacaatgaaccataaccaatactaccaatcaatactcatcattaataatcataatggctatagcaataaaactaggaatagccccctttcacttctgagtcccagaggttacccaaggcacccctctgacatccggcctgcttcttctcacatgacaaaaactagcccccatctcaatcatataccaaatctctccctcactaaacgtaagccttctcctcactctctcaatcttatccatcatagcaggcagttgaggtggattaaaccaaacccagctacgcaaaatcttagcatactcctcaattacccacataggatgaataatagcagttctaccgtacaaccctaacataaccattcttaatttaactatttatattatcctaactactaccgcattcctactactcaacttaaactccagcaccacgaccctactactatctcgcacctgaaacaagctaacatgactaacacccttaattccatccaccctcctctccctaggaggcctgcccccgctaaccggctttttgcccaaatgggccattatcgaagaattcacaaaaaacaatagcctcatcatccccaccatcatagccaccatcaccctccttaacctctacttctacctacgcctaatctactccacctcaatcacactactccccatatctaacaacgtaaaaataaaatgacagtttgaacatacaaaacccaccccattcctccccacactcatcgcccttaccacgctactcctacctatctccccttttatactaataatcttatagaaatttaggttaaatacagaccaagagccttcaaagccctcagtaagttgcaatacttaatttctgtaacagctaaggactgcaaaaccccactctgcatcaactgaacgcaaatcagccactttaattaagctaagcccttactagaccaatgggacttaaacccacaaacacttagttaacagctaagcaccctaatcaactggcttcaatctacttctcccgccgccgggaaaaaaggcgggagaagccccggcaggtttgaagctgcttcttcgaatttgcaattcaatatgaaaatcacctcggagctggtaaaaagaggcctaacccctgtctttagatttacagtccaatgcttcactcagccattttacctcacccccactgatgttcgccgaccgttgactattctctacaaaccacaaagacattggaacactatacctattattcggcgcatgagctggagtcctaggcacagctctaagcctccttattcgagccgagctgggccagccaggcaaccttctaggtaacgaccacatctacaacgttatcgtcacagcccatgcatttgtaataatcttcttcatagtaatacccatcataatcggaggctttggcaactgactagttcccctaataatcggtgcccccgatatggcgtttccccgcataaacaacataagcttctgactcttacctccctctctcctactcctgctcgcatctgctatagtggaggccggagcagggacaggttgaacagtctaccctcccttagcagggaactactcccaccctggagcctccgtagacctaaccatcttctccttacacctagcaggtgtctcctctatcttaggggccatcaatttcatcacaacaattatcaatataaaaccccctgccataacccaataccaaacgcccctcttcgtctgatccgtcctaatcacagcagtcctacttctcctatctctcccagtcctagctgctggcatcactatactactaacagaccgcaacctcaacaccaccttcttcgaccccgccggaggaggagaccccattctataccaacacctattctgatttttcggtcaccctgaagtttatattcttatcctaccaggcttcggaataatctcccatattgtaacttactactccggaaaaaaagaaccatttggatacataggtatggtctgagctatgatatcaattggcttcctagggtttatcgtgtgagcacaccatatatttacagtaggaatagacgtagacacacgagcatatttcacctccgctaccataatcatcgctatccccaccggcgtcaaagtatttagctgactcgccacactccacggaagcaatatgaaatgatctgctgcagtgctctgagccctaggattcatctttcttttcaccgtaggtggcctgactggcattgtattagcaaactcatcactagacatcgtactacacgacacgtactacgttgtagcccacttccactatgtcctatcaataggagctgtatttgccatcataggaggcttcattcactgatttcccctattctcaggctacaccctagaccaaacctacgccaaaatccatttcactatcatattcatcggcgtaaatctaactttcttcccacaacactttctcggcctatccggaatgccccgacgttactcggactaccccgatgcatacaccacatgaaacatcctatcatctgtaggctcattcatttctctaacagcagtaatattaataattttcatgatttgagaagccttcgcttcgaagcgaaaagtcctaatagtagaagaaccctccataaacctggagtgactatatggatgccccccaccctaccacacattcgaagaacccgtatacataaaatctagacaaaaaaggaaggaatcgaaccccccaaagctggtttcaagccaaccccatggcctccatgactttttcaaaaaggtattagaaaaaccatttcataactttgtcaaagttaaattataggctaaatcctatatatcttaatggcacatgcagcgcaagtaggtctacaagacgctacttcccctatcatagaagagcttatcacctttcatgatcacgccctcataatcattttccttatctgcttcctagtcctgtatgcccttttcctaacactcacaacaaaactaactaatactaacatctcagacgctcaggaaatagaaaccgtctgaactatcctgcccgccatcatcctagtcctcatcgccctcccatccctacgcatcctttacataacagacgaggtcaacgatccctcccttaccatcaaatcaattggccaccaatggtactgaacctacgagtacaccgactacggcggactaatcttcaactcctacatacttcccccattattcctagaaccaggcgacctgcgactccttgacgttgacaatcgagtagtactcccgattgaagcccccattcgtataataattacatcacaagacgtcttgcactcatgagctgtccccacattaggcttaaaaacagatgcaattcccggacgtctaaaccaaaccactttcaccgctacacgaccgggggtatactacggtcaatgctctgaaatctgtggagcaaaccacagtttcatgcccatcgtcctagaattaattcccctaaaaatctttgaaatagggcccgtatttaccctatagcaccccctctaccccctctagagcccactgtaaagctaacttagcattaaccttttaagttaaagattaagagaaccaacacctctttacagtgaaatgccccaactaaatactaccgtatggcccaccataattacccccatactccttacactattcctcatcacccaactaaaaatattaaacacaaactaccacctacctccctcaccaaagcccataaaaataaaaaattataacaaaccctgagaaccaaaatgaacgaaaatctgttcgcttcattcattgcccccacaatcctaggcctacccgccgcagtactgatcattctatttccccctctattgatccccacctccaaatatctcatcaacaaccgactaatcaccacccaacaatgactaatcaaactaacctcaaaacaaatgataaccatacacaacactaaaggacgaacctgatctcttatactagtatccttaatcatttttattgccacaactaacctcctcggactcctgcctcactcatttacaccaaccacccaactatctataaacctagccatggccatccccttatgagcgggcgcagtgattataggctttcgctctaagattaaaaatgccctagcccacttcttaccacaaggcacacctacaccccttatccccatactagttattatcgaaaccatcagcctactcattcaaccaatagccctggccgtacgcctaaccgctaacattactgcaggccacctactcatgcacctaattggaagcgccaccctagcaatatcaaccattaaccttccctctacacttatcatcttcacaattctaattctactgactatcctagaaatcgctgtcgccttaatccaagcctacgttttcacacttctagtaagcctctacctgcacgacaacacataatgacccaccaatcacatgcctatcatatagtaaaacccagcccatgacccctaacaggggccctctcagccctcctaatgacctccggcctagccatgtgatttcacttccactccataacgctcctcatactaggcctactaaccaacacactaaccatataccaatgatggcgcgatgtaacacgagaaagcacataccaaggccaccacacaccacctgtccaaaaaggccttcgatacgggataatcctatttattacctcagaagtttttttcttcgcaggatttttctgagccttttaccactccagcctagcccctaccccccaattaggagggcactggcccccaacaggcatcaccccgctaaatcccctagaagtcccactcctaaacacatccgtattactcgcatcaggagtatcaatcacctgagctcaccatagtctaatagaaaacaaccgaaaccaaataattcaagcactgcttattacaattttactgggtctctattttaccctcctacaagcctcagagtacttcgagtctcccttcaccatttccgacggcatctacggctcaacattttttgtagccacaggcttccacggacttcacgtcattattggctcaactttcctcactatctgcttcatccgccaactaatatttcactttacatccaaacatcactttggcttcgaagccgccgcctgatactggcattttgtagatgtggtttgactatttctgtatgtctccatctattgatgagggtcttactcttttagtataaatagtaccgttaacttccaattaactagttttgacaacattcaaaaaagagtaataaacttcgccttaattttaataatcaacaccctcctagccttactactaataattattacattttgactaccacaactcaacggctacatagaaaaatccaccccttacgagtgcggcttcgaccctatatcccccgcccgcgtccctttctccataaaattcttcttagtagctattaccttcttattatttgatctagaaattgccctccttttacccctaccatgagccctacaaacaactaacctgccactaatagttatgtcatccctcttattaatcatcatcctagccctaagtctggcctatgagtgactacaaaaaggattagactgaaccgaattggtatatagtttaaacaaaacgaatgatttcgactcattaaattatgataatcatatttaccaaatgcccctcatttacataaatattatactagcatttaccatctcacttctaggaatactagtatatcgctcacacctcatatcctccctactatgcctagaaggaataatactatcgctgttcattatagctactctcataaccctcaacacccactccctcttagccaatattgtgcctattgccatactagtctttgccgcctgcgaagcagcggtgggcctagccctactagtctcaatctccaacacatatggcctagactacgtacataacctaaacctactccaatgctaaaactaatcgtcccaacaattatattactaccactgacatgactttccaaaaaacacataatttgaatcaacacaaccacccacagcctaattattagcatcatccctctactattttttaaccaaatcaacaacaacctatttagctgttccccaaccttttcctccgaccccctaacaacccccctcctaatactaactacctgactcctacccctcacaatcatggcaagccaacgccacttatccagtgaaccactatcacgaaaaaaactctacctctctatactaatctccctacaaatctccttaattataacattcacagccacagaactaatcatattttatatcttcttcgaaaccacacttatccccaccttggctatcatcacccgatgaggcaaccagccagaacgcctgaacgcaggcacatacttcctattctacaccctagtaggctcccttcccctactcatcgcactaatttacactcacaacaccctaggctcactaaacattctactactcactctcactgcccaagaactatcaaactcctgagccaacaacttaatatgactagcttacacaatagcttttatagtaaagatacctctttacggactccacttatgactccctaaagcccatgtcgaagcccccatcgctgggtcaatagtacttgccgcagtactcttaaaactaggcggctatggtataatacgcctcacactcattctcaaccccctgacaaaacacatagcctaccccttccttgtactatccctatgaggcataattataacaagctccatctgcctacgacaaacagacctaaaatcgctcattgcatactcttcaatcagccacatagccctcgtagtaacagccattctcatccaaaccccctgaagcttcaccggcgcagtcattctcataatcgcccacgggcttacatcctcattactattctgcctagcaaactcaaactacgaacgcactcacagtcgcatcataatcctctctcaagggcttcaaactctactcccactaatagctttttgatgacttctagcaagcctcgctaacctcgccttaccccccactattaacctactgggagaactctctgtgctagtaaccacgttctcctgatcaaatatcactctcctacttacaggactcaacatactagtcacagccctatactccctctacatatttaccacaacacaatggggcccactcacccaccacattaacaacataaaaccctcattcacacgagaaaacaccctcatgttcatacacctatcccccattctcctcctatccctcaaccccgacatcattaccgggttttcctcttgtaaatatagtttaaccaaaacatcagattgtgaatctgacaacagaggcttacgaccccttatttaccgagaaagctcacaagaactgctaactcatgcccccatgtctaacaacatggctttctcaacttttaaaggataacagctatccattggtcttaggccccaaaaattttggtgcaactccaaataaaagtaataaccatgcacactactataaccaccctaaccctgacttccctaattccccccatccttaccaccctcgttaaccctaacaaaaaaaactcatacccccattatgtaaaatccattgtcgcatccacctttattatcagtctcttccccacaacaatattcatgtgcctagaccaagaagttattatctcgaactgacactgagccacaacccaaacaacccagctctccctaagcttcaaactagactacttctccataatattcatccctgtagcattgttcgttacatggtccatcatagaattctcactgtgatatataaactcagacccaaacattaatcagttcttcaaatatctactcatcttcctaattaccatactaatcttagttaccgctaacaacctattccaactgttcatcggctgagagggcgtaggaattatatccttcttgctcatcagttgatgatacgcccgagcagatgccaacacagcagccattcaagcaatcctatacaaccgtatcggcgatatcggtttcatcctcgccttagcatgatttatcctacactccaactcatgagacccacaacaaatagcccttctaaacgctaatccaagcctcaccccactactaggcctcctcctagcagcagcaggcaaatcagcccaattaggtctccacccttgactcccctcagccatagaaggccccaccccagtctcagccctactccactcaagcactatagttgtagcaggaatcttcttactcatccgcttccaccccctagcagaaaatagcccactaatccaaactctaacactatgcttaggcgctatcaccactctgttcgcagcagtctgcgcccttacacaaaatgacatcaaaaaaatcgtagccttctccacttcaagtcaactaggactcataatagttacaatcggcatcaaccaaccacacctagcattcctgcacatctgtacccacgccttcttcaaagccatactatttatgtgctccgggtccatcatccacaaccttaacaatgaacaagatattcgaaaaataggaggactactcaaaaccatacctctcacttcaacctccctcaccattggcagcctagcattagcaggaatacctttcctcacaggtttctactccaaagaccacatcatcgaaaccgcaaacatatcatacacaaacgcctgagccctatctattactctcatcgctacctccctgacaagcgcctatagcactcgaataattcttctcaccctaacaggtcaacctcgcttccccacccttactaacattaacgaaaataaccccaccctactaaaccccattaaacgcctgacagccggaagcctattcgcaggatttctcattactaacaacatttcccccgcatcccccttccaaacaacaatccccctctacctaaaactcacagccctcgctgtcactttcctaggacttctaacagccctagacctcaactacctaaccaacaaacttaaaataaaatccccactatgcacattttatttctccaacatactcggattctaccctagcatcacacaccgcacaatcccctatctaggccttcttacgagccaaaacctgcccctactcctcctagacctaacctgactagaaaagctattacctaaaacaatttcacagcaccaaatctccacctccatcatcacctcaacccaaaaaggcataattaaactttacttcctctctttcttcttcccactcatcctaaccctactcctaatcacataacctattcccccgagcaatctcaattacaatatatacaccaacaaacaatgttcaaccagtaactactactaatcaacgcccataatcatacaaagcccccgcaccaataggatcctcccgaatcaaccctgacccctctccttcataaattattcagcttcctacactattaaagtttaccacaaccaccaccccatcatactctttcacccacagcaccaatcctacctccatcgctaaccccactaaaacactcaccaagacctcaacccctgacccccatgcctcaggatactcctcaatagccatcgctgtagtatatccaaagacaaccatcattccccctaaataaattaaaaaaactattaaacccatataacctcccccaaaattcagaataataacacacccgaccacaccgctaacaatcaatactaaacccccataaataggagaaggcttagaagaaaaccccacaaaccccattactaaacccacactcaacagaaacaaagcatacatcattattctcgcacggactacaaccacgaccaatgatatgaaaaaccatcgttgtatttcaactacaagaacaccaatgaccccaatacgcaaaactaaccccctaataaaattaattaaccactcattcatcgacctccccaccccatccaacatctccgcatgatgaaacttcggctcactccttggcgcctgcctaatcctccaaatcaccacaggactattcctagccatgcactactcaccagacgcctcaaccgccttttcatcaatcgcccacatcactcgagacgtaaattatggctgaatcatccgctaccttcacgccaatggcgcctcaatattctttatctgcctcttcctacacatcgggcgaggcctatattacggatcatttctctactcagaaacctgaaacatcggcattatcctcctgcttgcaactatagcaacagccttcataggctatgtcctcccgtgaggccaaatatcattctgaggggccacagtaattacaaacttactatccgccatcccatacattgggacagacctagttcaatgaatctgaggaggctactcagtagacagtcccaccctcacacgattctttacctttcacttcatcttgcccttcattattgcagccctagcagcactccacctcctattcttgcacgaaacgggatcaaacaaccccctaggaatcacctcccattccgataaaatcaccttccacccttactacacaatcaaagacgccctcggcttacttctcttccttctctccttaatgacattaacactattctcaccagacctcctaggcgacccagacaattataccctagccaaccccttaaacacccctccccacatcaagcccgaatgatatttcctattcgcctacacaattctccgatccgtccctaacaaactaggaggcgtccttgccctattactatccatcctcatcctagcaataatccccatcctccatatatccaaacaacaaagcataatatttcgcccactaagccaatcactttattgactcctagccgcagacctcctcattctaacctgaatcggaggacaaccagtaagctacccttttaccatcattggacaagtagcatccgtactatacttcacaacaatcctaatcctaataccaactatctccctaattgaaaacaaaatactcaaatgggcctgtccttgtagtataaactaatacaccagtcttgtaaaccggagatgaaaacctttttccaaggacaaatcagagaaaaagtctttaactccaccattagcacccaaagctaagattctaatttaaactattctctgttctttcatggggaagcagatttgggtaccacccaagtattgactcacccatcaacaaccgctatgtatttcgtacattactgccagccaccatgaatattgtacggtaccataaatacttgaccacctgtagtacataaaaacccaatccacatcaaaaccccctccccatgcttacaagcaagtacagcaatcaaccctcaactatcacacatcaactgcaactccaaagccacccctcacccactaggataccaacaaacctacccacccttaacagtacatagtacataaagccatttaccgtacatagcacattacagtcaaatcccttctcgtccccatggatgacccccctcagataggggtcccttgaccaccatcctccgtgaaatcaatatcccgcacaagagtgctactctcctcgctccgggcccataacacttgggggtagctaaagtgaactgtatccgacatctggttcctacttcagggccataaagcctaaatagcccacacgttccccttaaataagacatcacgatg

SEQ ID NO: 551 - DNA, 16570 bp, Homo sapiens mitochondrial
  3108: "n" refers to a nucleotide at position 3107 of the Cambridge Reference Sequence (CRS, Anderson et al. 1981 Nature 290:457-465), later determined to be absent from the human mtDNA sequence according to the revised CRS (rCRS, Andrews et al. 1999 Nature Genetics 23:147); "n" therefore represents a single nucleotide deletion at a position corresponding to nucleotide 3107 of SEQ ID NO:1 as provided herein.
gatcacaggtctatcaccctattaaccactcacgggagctctccatgcatttggtattttcgtctggggggtgtgcacgcgatagcattgcgagacgctggagccggagcaccctatgtcgcagtatctgtctttgattcctgcctcatcctattatttatcgcacctacgttcaatattacaggcgaacatacttactaaagtgtgttaattaattaatgcttgtaggacataataataacaattgaatgtctgcacagccgctttccacacagacatcataacaaaaaatttccaccaaaccccccctcccccgccttctggccacagcacttaaacacatctctgccaaaccccaaaaacaaagaaccctaacaccagcctaaccagatttcaaattttatcttttggcggtatgcacttttaacagtcaccccccaactaacacattattttcccctcccactcccatactactaatctcatcaatacaacccccgcccatcctacccagcacacacacaccgctgctaaccccataccccgaaccaaccaaaccccaaagacaccccccacagtttatgtagcttacctcctcaaagcaatacactgaaaatgtttagacgggctcacatcaccccataaacaaataggtttggtcctagcctttctattagctcttagtaagattacacatgcaagcatccccattccagtgagttcaccctctaaatcaccacgatcaaaagggacaagcatcaagcacgcagcaatgcagctcaaaacgcttagcctagccacacccccacgggaaacagcagtgattaacctttagcaataaacgaaagtttaactaagctatactaaccccagggttggtcaatttcgtgccagccaccgcggtcacacgattaacccaagtcaatagaagccggcgtaaagagtgttttagatcaccccctccccaataaagctaaaactcacctgagttgtaaaaaactccagttgacacaaaatagactacgaaagtggctttaacatatctgaacacacaatagctaagacccaaactgggattagataccccactatgcttagccctaaacctcaacagttaaatcaacaaaactgctcgccagaacactacgagccacagcttaaaactcaaaggacctggcggtgcttcatatccctctagaggagcctgttctgtaatcgataaaccccgatcaacctcaccacctcttgctcagcctatataccgccatcttcagcaaaccctgatgaaggctacaaagtaagcgcaagtacccacgtaaagacgttaggtcaaggtgtagcccatgaggtggcaagaaatgggctacattttctaccccagaaaactacgatagcccttatgaaacttaagggtcgaaggtggatttagcagtaaactgagagtagagtgcttagttgaacagggccctgaagcgcgtacacaccgcccgtcaccctcctcaagtatacttcaaaggacatttaactaaaacccctacgcatttatatagaggagacaagtcgtaacatggtaagtgtactggaaagtgcacttggacgaaccagagtgtagcttaacacaaagcacccaacttacacttaggagatttcaacttaacttgaccgctctgagctaaacctagccccaaacccactccaccttactaccagacaaccttagccaaaccatttacccaaataaagtataggcgatagaaattgaaacctggcgcaatagatatagtaccgcaagggaaagatgaaaaattataaccaagcataatatagcaaggactaacccctataccttctgcataatgaattaactagaaataactttgcaaggagaaccaaagctaagacccccgaaaccagacgagctacctaagaacagctaaaagagcacacccgtctatgtagcaaaatagtgggaagatttataggtagaggcgacaaacctaccgagcctggtgatagctggttgtccaagatagaatcttagttcaactttaaatttgcccacagaaccctctaaatccccttgtaaatttaactgttagtccaaagaggaacagctctttggacactaggaaaaaaccttgtagagagagtaaaaaatttaacacccatagtaggcctaaaagcagccaccaattaagaaagcgttcaagctcaacacccactacctaaaaaatcccaaacatataactgaactcctcacacccaattggaccaatctatcaccctatagaagaactaatgttagtataagtaacatgaaaacattctcctccgcataagcctgcgtcagattaaaacactgaactgacaattaacagcccaatatctacaatcaaccaacaagtcattattaccctcactgtcaacccaacacaggcatgctcataaggaaaggttaaaaaaagtaaaaggaactcggcaaatcttaccccgcctgtttaccaaaaacatcacctctagcatcaccagtattagaggcaccgcctgcccagtgacacatgtttaacggccgcggtaccctaaccgtgcaaaggtagcataatcacttgttccttaaatagggacctgtatgaatggctccacgagggttcagctgtctcttacttttaaccagtgaaattgacctgcccgtgaagaggcgggcatgacacagcaagacgagaagaccctatggagctttaatttattaatgcaaacagtacctaacaaacccacaggtcctaaactaccaaacctgcattaaaaatttcggttggggcgacctcggagcagaacccaacctccgagcagcacatgctaagacttcaccagtcaaagcgaactactatactcaattgatccaataacttgaccaacggaacaagttaccctagggataacagcgcaatcctattctagagtccatatcaacaatagggtttacgacctcgatgttggatcaggacatcccgatggtgcagccgctattaaaggttcgtttgttcaacgattaaagtcctacgtgatctgagttcagaccggagtaatccaggtcggtttctatctacnttcaaattcctccctgtacgaaaggacaagagaaataaggcctacttcacaaagcgccttcccccgtaaatgatatcatctcaacttagtattatacccacacccacccaagaacagggtttgttaagatggcagagcccggtaatcgcataaaacttaaaactttacagtcagaggttcaattcctcttcttaacaacatacccatggccaacctcctactcctcattgtacccattctaatcgcaatggcattcctaatgcttaccgaacgaaaaattctaggctatatacaactacgcaaaggccccaacgttgtaggcccctacgggctactacaacccttcgctgacgccataaaactcttcaccaaagagcccctaaaacccgccacatctaccatcaccctctacatcaccgccccgaccttagctctcaccatcgctcttctactatgaacccccctccccatacccaaccccctggtcaacctcaacctaggcctcctatttattctagccacctctagcctagccgtttactcaatcctctgatcagggtgagcatcaaactcaaactacgccctgatcggcgcactgcgagcagtagcccaaacaatctcatatgaagtcaccctagccatcattctactatcaacattactaataagtggctcctttaacctctccacccttatcacaacacaagaacacctctgattactcctgccatcatgacccttggccataatatgatttatctccacactagcagagaccaaccgaacccccttcgaccttgccgaaggggagtccgaactagtctcaggcttcaacatcgaatacgccgcaggccccttcgccctattcttcatagccgaatacacaaacattattataataaacaccctcaccactacaatcttcctaggaacaacatatgacgcactctcccctgaactctacacaacatattttgtcaccaagaccctacttctaacctccctgttcttatgaattcgaacagcatacccccgattccgctacgaccaactcatacacctcctatgaaaaaacttcctaccactcaccctagcattacttatatgacatgtctccatacccattacaatctccagcattccccctcaaacctaagaaatatgtctgataaaagagttactttgatagagtaaataataggagcttaaacccccttatttctaggactatgagaatcgaacccatccctgagaatccaaaattctccgtgccacctatcacaccccatcctaaagtaaggtcagctaaataagctatcgggcccataccccgaaaatgttggttatacccttcccgtactaattaatcccctggcccaacccgtcatctactctaccatctttgcaggcacactcatcacagcgctaagctcgcactgattttttacctgagtaggcctagaaataaacatgctagcttttattccagttctaaccaaaaaaataaaccctcgttccacagaagctgccatcaagtatttcctcacgcaagcaaccgcatccataatccttctaatagccatcctcttcaacaatatactctccggacaatgaaccataaccaatactaccaatcaatactcatcattaataatcataatggctatagcaataaaactaggaatagccccctttcacttctgagtcccagaggttacccaaggcacccctctgacatccggcctgcttcttctcacatgacaaaaactagcccccatctcaatcatataccaaatctctccctcactagacgtaagccttctcctcactctctcaatcttatccatcatagcaggcagttgaggtggattaaaccaaacccagctacgcaaaatcttagcatactcctcaattacccacataggatgaataatagcagttctaccgtacaaccctaacataaccattcttaatttaactatttatattatcctaactactaccgcattcctactactcaacttaaactccagcaccacgaccctactactatctcgcacctgaaacaagctaacatgactaacacccttaattccatccaccctcctctccctaggaggcctgcccccgctaaccggctttttgcccaaatgggccattatcgaagaattcacaaaaaacaatagcctcatcatccccaccatcatagccaccatcaccctccttaacctctacttctacctacgcctaatctactccacctcaatcacactactccccatatctaacaacgtaaaaataaaatgacagtttgaacatacaaaacccaccccattcctccccacactcatcgcccttaccacgctactcctacctatctccccttttatactaataatcttatagaaatttaggttaaatacagaccaagagccttcaaagccctcagtaagttgcaatacttaatttctgtaacagctaaggactgcaaaaccccactctgcatcaactgaacgcaaatcagccactttaattaagctaagcccttactagaccaatgggacttaaacccacaaacacttagttaacagctaagcaccctaatcaactggcttcaatctacttctcccgccgccgggaaaaaaggcgggagaagccccggcaggtttgaagctgcttcttcgaatttgcaattcaatatgaaaatcacctcggagctggtaaaaagaggcctaacccctgtctttagatttacagtccaatgcttcactcagccattttacctcacccccactgatgttcgccgaccgttgactattctctacaaaccacaaagacattggaacactatacctattattcggcgcatgagctggagtcctaggcacagctctaagcctccttattcgagccgagctgggccagccaggcaaccttctaggtaacgaccacatctacaacgttatcgtcacagcccatgcatttgtaataatcttcttcatagtaatacccatcataatcggaggctttggcaactgactagttcccctaataatcggtgcccccgatatggcgtttccccgcataaacaacataagcttctgactcttacctccctctctcctactcctgctcgcatctgctatagtggaggccggagcaggaacaggttgaacagtctaccctcccttagcagggaactactcccaccctggagcctccgtagacctaaccatcttctccttacacctagcaggtgtctcctctatcttaggggccatcaatttcatcacaacaattatcaatataaaaccccctgccataacccaataccaaacgcccctcttcgtctgatccgtcctaatcacagcagtcctacttctcctatctctcccagtcctagctgctggcatcactatactactaacagaccgcaacctcaacaccaccttcttcgaccccgccggaggaggagaccccattctataccaacacctattctgatttttcggtcaccctgaagtttatattcttatcctaccaggcttcggaataatctcccatattgtaacttactactccggaaaaaaagaaccatttggatacataggtatggtctgagctatgatatcaattggcttcctagggtttatcgtgtgagcacaccatatatttacagtaggaatagacgtagacacacgagcatatttcacctccgctaccataatcatcgctatccccaccggcgtcaaagtatttagctgactcgccacactccacggaagcaatatgaaatgatctgctgcagtgctctgagccctaggattcatctttcttttcaccgtaggtggcctgactggcattgtattagcaaactcatcactagacatcgtactacacgacacgtactacgtcgtagctcacttccactatgtcctatcaataggagctgtatttgccatcataggaggcttcattcactgatttcccctattctcaggctacaccctagaccaaacctacgccaaaatccatttcactatcatattcatcggcgtaaatctaactttcttcccacaacactttctcggcctatccggaatgccccgacgttactcggactaccccgatgcatacaccacatgaaacatcctatcatctgtaggctcattcatttctctaacagcagtaatattaataattttcatgatttgagaagccttcgcttcgaagcgaaaagtcctaatagtagaagaaccctccataaacctggagtgactatatggatgccccccaccctaccacacattcgaagaacccgtatacataaaatctagacaaaaaaggaaggaatcgaaccccccaaagctggtttcaagccaaccccatggcctccatgactttttcaaaaaggtattagaaaaaccatttcataactttgtcaaagttaaattataggctaaatcctatatatcttaatggcacatgcagcgcaagtaggtctacaagacgctacttcccctatcatagaagagcttatcacctttcatgatcacgccctcataatcattttccttatctgcttcctagtcctgtatgcccttttcctaacactcacaacaaaactaactaatactaacatctcagacgctcaggaaatagaaaccgtctgaactatcctgcccgccatcatcctagtcctcatcgccctcccatccctacgcatcctttacataacagacgaggtcaacgatccctcccttaccatcaaatcaattggccaccaatggtactgaacctacgagtacaccgactacggcggactaatcttcaactcctacatacttcccccattattcctagaaccaggcgacctgcgactccttgacgttgacaatcgagtagtactcccgattgaagcccccattcgtataataattacatcacaagacgtcttgcactcatgagctgtccccacattaggcttaaaaacagatgcaattcccggacgtctaaaccaaaccactttcaccgctacacgaccgggggtatactacggtcaatgctctgaaatctgtggagcaaaccacagtttcatgcccatcgtcctagaattaattcccctaaaaatctttgaaatagggcccgtatttaccctatagcaccccctctaccccctctagagcccactgtaaagctaacttagcattaaccttttaagttaaagattaagagaaccaacacctctttacagtgaaatgccccaactaaatactaccgtatggcccaccataattacccccatactccttacactattcctcatcacccaactaaaaatattaaacacaaactaccacctacctccctcaccaaagcccataaaaataaaaaattataacaaaccctgagaaccaaaatgaacgaaaatctgttcgcttcattcattgcccccacaatcctaggcctacccgccgcagtactgatcattctatttccccctctattgatccccacctccaaatatctcatcaacaaccgactaatcaccacccaacaatgactaatcaaactaacctcaaaacaaataataaccatacacaacactaaaggacgaacctgatctcttatactagtatccttaatcatttttattgccacaactaacctcctcggactcctgcctcactcatttacaccaaccacccaactatctataaacctagccatggccatccccttatgagcgggcgcagtgattataggctttcgctctaagattaaaaatgccctagcccacttcttaccacaaggcacacctacaccccttatccccatactagttattatcgaaaccatcagcctactcattcaaccaatagccctggccgtacgcctaaccgctaacattactgcaggccacctactcatgcacctaattggaagcgccaccctagcaatatcaaccattaaccttccctctacacttatcatcttcacaattctaattctactgactatcctagaaatcgctgtcgccttaatccaagcctacgttttcacacttctagtaagcctctacctgcacgacaacacataatgacccaccaatcacatgcctatcatatagtaaaacccagcccatgacccctaacaggggccctctcagccctcctaatgacctccggcctagccatgtgatttcacttccactccataacgctcctcatactaggcctactaaccaacacactaaccatataccaatgatggcgcgatgtaacacgagaaagcacataccaaggccaccacacaccacctgtccaaaaaggccttcgatacgggataatcctatttattacctcagaagtttttttcttcgcaggatttttctgagccttttaccactccagcctagcccctaccccccaattaggagggcactggcccccaacaggcatcaccccgctaaatcccctagaagtcccactcctaaacacatccgtattactcgcatcaggagtatcaatcacctgagctcaccatagtctaatagaaaacaaccgaaaccaaataattcaagcactgcttattacaattttactgggtctctattttaccctcctacaagcctcagagtacttcgagtctcccttcaccatttccgacggcatctacggctcaacattttttgtagccacaggcttccacggacttcacgtcattattggctcaactttcctcactatctgcttcatccgccaactaatatttcactttacatccaaacatcactttggcttcgaagccgccgcctgatactggcattttgtagatgtggtttgactatttctgtatgtctccatctattgatgagggtcttactcttttagtataaatagtaccgttaacttccaattaactagttttgacaacattcaaaaaagagtaataaacttcgccttaattttaataatcaacaccctcctagccttactactaataattattacattttgactaccacaactcaacggctacatagaaaaatccaccccttacgagtgcggcttcgaccctatatcccccgcccgcgtccctttctccataaaattcttcttagtagctattaccttcttattatttgatctagaaattgccctccttttacccctaccatgagccctacaaacaactaacctgccactaatagttatgtcatccctcttattaatcatcatcctagccctaagtctggcctatgagtgactacaaaaaggattagactgaaccgaattggtatatagtttaaacaaaacgaatgatttcgactcattaaattatgataatcatatctaccaaatgcccctcatttacataaatattatactagcatttaccatctcacttctaggaatactagtatatcgctcacacctcatatcctccctactatgcctagaaggaataatactatcgctgttcattatagctactctcataaccctcaacacccactccctcttagccaatattgtgcctattgccatactagtctttgccgcctgcgaagcagcggtgggcctagccctactagtctcaatctccaacacatatggcctagactacgtacataacctaaacctactccaatgctaaaactaatcgtcccaacaattatattactaccactgacatgactttccaaaaaacacataatttgaatcaacacaaccacccacagcctaattattagcatcatccctctactattttttaaccaaatcaacaacaacctatttagctgttccccaaccttttcctccgaccccctaacaacccccctcctaatactaactacctgactcctacccctcacaatcatggcaagccaacgccacttatccagtgaaccactatcacgaaaaaaactctacctctctatactaatctccctacaaatctccttaattataacattcacagccacagaactaatcatattttatatcttcttcgaaaccacacttatccccaccttggctatcatcacccgatgaggcaaccagccagaacgcctgaacgcaggcacatacttcctattctacaccctagtaggctcccttcccctactcatcgcactgatttacactcacaacaccctaggctcactaaacattctactactcactctcactgcccaagaactatcaaactcctgagccaacaacttaatatgactagcttacacaatagcttttatagtaaagatacctctttacggactccacttatgactccctaaagcccatgtcgaagcccccatcgctgggtcaatagtacttgccgcagtactcttaaaactaggcggctatggtataatacgcctcacactcattctcaaccccctgacaaaacacatagcctaccccttccttgtactatccctatgaggcataattataacaagctccatctgcctacgacaaacagacctaaaatcgctcattgcatactcttcaatcagccacatagccctcgtagtaacagccattctcatccaaaccccctgaagcttcaccggcgcagtcattctcataatcgcccacggacttacatcctcattactattctgcctagcaaactcaaactacgaacgcactcacagtcgcatcataatcctctctcaaggacttcaaactctgctcccactaatagctttttgatgacttctagcaagcctcgctaacctcgccttaccccccactattaacctactgggagaactctctgtgctagtaaccacgttctcctgatcaaatatcactctcctacttacaggactcaacatactagtcacagccctatactccctctacatatttaccacaacacaatggggctcactcacccaccacattaacaacataaaaccctcattcacacgagaaaacaccctcatgttcatacacctatcccccattctcctcctatccctcaaccccgacatcattaccgggttttcctcttgtaaatatagtttaaccaaaacatcagattgtgaatctgacaacagaggcttacgaccccttatttaccgagaaagctcacaagaactgctaactcatgcccccatgtctaacaacatggctttctcaacttttaaaggataacagctatccattggtcttaggccccaaaaattttggtgcaactccaaataaaagtaataaccatgcacactactataaccaccctaaccctgacttccctaattccccccatccttaccaccctcgttaaccctaacaaaaaaaactcatacccccattatgtaaaatccattgtcgcatccacctttattatcagtctcttccccacaacaatattcatgtgcctagaccaagaagttattatctcgaactgacactgagccacaacccaaacaacccagctctccctaagcttcaaactagactacttctccataatattcatccctgtagcattgttcgttacatggtccatcatagaattctcactgtgatatataaactcagacccaaacattaatcagttcttcaaatatctactcatcttcctaattaccatactaatcttagttaccgctaacaacctattccaactgttcatcggctgagagggcgtaggaattatatccttcttgctcatcagttgatgatacgcccgagcagatgccaacacagcagccattcaagcaatcctatacaaccgtatcggcgatatcggtttcatcctcgccttagcatgatttatcctacactccaactcatgagacccacaacaaatagcccttctaaacgctaatccaagcctcaccccactactaggcctcctcctagcagcagcaggcaaatcagcccaattaggtctccacccctgactcccctcagccatagaaggccccaccccagtctcagccctactccactcaagcactatagttgtagcaggaatcttcttactcatccgcttccaccccctagcagaaaatagcccactaatccaaactctaacactatgcttaggcgctatcaccactctgttcgcagcagtctgcgcccttacacaaaatgacatcaaaaaaatcgtagccttctccacttcaagtcaactaggactcataatagttacaatcggcatcaaccaaccacacctagcattcctgcacatctgtacccacgccttcttcaaagccatactatttatgtgctccggatccatcatccacaaccttaacaatgaacaagatattcgaaaaataggaggactactcaaaaccatacctctcacttcaacctccctcaccattggcagcctagcattagcaggaatacctttcctcacaggtttctactccaaagaccacatcatcgaaaccgcaaacatatcatacacaaacgcctgagccctatctattactctcatcgctacctccctgacaagcgcctatagcactcgaataattcttctcaccctaacaggtcaacctcgcttccccacccttactaacattaacgaaaataaccccaccctactaaaccccattaaacgcctggcagccggaagcctattcgcaggatttctcattactaacaacatttcccccgcatcccccttccaaacaacaatccccctctacctaaaactcacagccctcgctgtcactttcctaggacttctaacagccctagacctcaactacctaaccaacaaacttaaaataaaatccccactatgcacattttatttctccaacatactcggattctaccctagcatcacacaccgcacaatcccctatctaggccttctcacgagccaaaacctgcccctactcctcctagacctaacctgactagaaaagctattacctaaaacaatttcacagcaccaaatctccacctccatcatcacctcaacccaaaaaggcataattaaactttacttcctctctttcttcttcccactcatcctaaccctactcctaatcacataacctattcccccgagcaatctcaattacaatatatacaccaacaaacaatgttcaaccagtaactactactaatcaacgcccatagtcatacaaagcccccgcaccaataggatcctcccgaatcaaccctgacccctctccttcataaattattcagcttcctacactattaaagtttaccacaaccaccaccccatcatactctttcacccacagcaccaatcctacctccatcgctaaccccactaaaacactcaccaagacctcaacccctgacccccatgcctcaggatactcctcaatagccatcgctgtagtatatccaaagacaaccatcattccccctaaataaattaaaaaaactattaaacccatataacctcccccaaaattcagaataataacacacccgaccacaccgctaacaatcaatactaaacccccataaataggagaaggcttagaagaaaaccccacaaaccccattactaaacccacactcaacagaaacaaagcatacatcattattctcgcacgggctacaaccacgaccaatgatatgaaaaaccatcgttgtatttcaactacaagaacaccaatgaccccaatacgcaaaattaaccccctaataaaattaattaaccactcattcatcgacctccccaccccatccaacatctccgcatgatgaaacttcggctcactccttggcgcctgcctgatcctccaaatcaccacaggactattcctagccatacactactcaccagacgcctcaaccgccttttcatcaatcgcccacatcactcgagacgtaaattatggctgaatcatccgctaccttcacgccaatggcgcctcaatattctttatctgcctcttcctacacatcgggcgaggcctatattacggatcatttctctactcagaaacctgaaacatcggcattatcctcctgcttgcaactatagcaacagccttcataggctatgtcctcccgtgaggccaaatatcattctgaggggccacagtaattacaaacttactatccgccatcccatacattgggacagacctagttcaatgaatctgaggaggctactcagtagacagtcccaccctcacacgattctttacctttcacttcatcttgcccttcattattgcagccctagcagcactccacctcctattcttgcacgaaacgggatcaaacaaccccctaggaatcacctcccattccgataaaatcaccttccacccttactacacaatcaaagacgccctcggcttacttctcttcattctctccttaatgacattaacactattctcaccagacctcctaggcgacccagacaattataccctagccaaccccttaaacacccctccccacatcaagcccgaatgatatttcctattcgcctacacaattctccgatccgtccctaacaagctaggaggcgtccttgccctattactatccatcctcatcctagcaataatccccatcctccatatatccaaacaacaaagcataatatttcgcccactaagccaatcactttattgactcctagccgcagacctcctcattctaacctgaatcggaggacaaccagtaagctacccttttaccatcattggacaagtagcatccgtactatacttcacaacaatcctaatcctaataccaactatctccctaattgaaaacaaaatactcaaatgggcctgtccttgtagtataaactaatacaccagtcttgtaaaccgaagatgaaaacctttttccaaggacaaatcagagaaaaagtctttaactccaccattagcacccaaagctaagattctaatttaaactattctctgttctttcatggggaagcagatttgggtaccacccaagtattgactcacccatcaacaaccgctatgtatttcgtacattactgccagccaccatgaatattgcacggtaccataaatacttgaccacctgtagtacataaaaacccaatccacatcaaaaccccctccccatgcttacaagcaagtacagcaatcaaccctcaactatcacacatcaactgcaactccaaagccacccctcacccactaggataccaacaaacctacccatctttaacagtacatagtacataaagccatttaccgtacatagcacattacagtcaaatcccttctcgtccccatggatgacccccctcagataggggtcccttgaccaccatcctccgtgaaatcaatatcccgcacaagagtgctactctcctcgctccgggcccataacacttgggggtagctaaagtgaactgtatccgacatctggttcctacttcagggccataaagcctaaatagcccacacgttccccttaaataagacatcacgatg

SEQ ID NO: 552 - DNA, 16575 bp, Homo sapiens mitochondrial
  3113: "n" refers to a nucleotide at position 3107 of the Cambridge Reference Sequence (CRS, Anderson et al. 1981 Nature 290:457-465), later determined to be absent from the human mtDNA sequence according to the revised CRS (rCRS, Andrews et al. 1999 Nature Genetics 23:147); "n" therefore represents a single nucleotide deletion at a position corresponding to nucleotide 3107 of SEQ ID NO:1 as provided herein.
gatcacaggtctatcaccctattaaccactcacgggagctctccatgcatttggtattttcgtctggggggtgtgcacgcgatagcattgcgagacgctggagccggagcaccctatgtcgcagtatctgtctttgattcctgcctcatcctattatttatcgcacctacgttcaatattacaggcgaacatacttaccaaaccgtgttaattaattaatgcttgtaggacataataataacaattgaacgtctgcacagccgctttccacacagacatcataacaaaaaatttccaccaaaccccccctcccccgccttctggccacagcacttaaacacatctctgccaaaccccaaaaacaaagaaccctaacaccagcctaaccagatttcaaattttatcttttggcggtatgcacttttaacagtcaccccccaactaacacattattttctccctcccactcccatactactaatctcatcaatacaacccccgcccatcctacccagcacacacacaccgctgctaaccccataccccgaaccaaccaaaccccaaagacaccccccacccccagtttatgtagcttacctcctcaaagcaatacactgaaaatgtttagacgggctcacatcaccccataaacaaataggtttggtcctagcctttctattagctcttagtaagattacacatgcaagcatccccgttccagtgagttcaccctctaaatcaccacgatcaaaagggacaagcatcaagcacgcagcaatgcagctcaaaacgcttagcctagccacacccccacgggaaacagcagtgattaacctttagcaataaacgaaagtttaactaagctatactaaccccagggttggtcaatttcgtgccagccaccgcggtcacacgattaacccaagtcaatagaagccggcgtaaagagtgttttagatcaccccctccccaataaagctaaaactcacctgagttgtaaaaaactccagttgacacaaaatagactacgaaagtggctttaacatatctgaacacacaatagctaagacccaaactgggattagataccccactatgcttagccctaaacctcaacagttaaatcaacaaaactgctcgccagaacactacgagccacagcttaaaactcaaaggacctggcggtgcttcatatccctctagaggagcctgttctgtaatcgataaaccccgatcaacctcaccacctcttgctcagcctatataccgccatcttcagcaaaccctgatgaaggctacaaagtaagcgcaagtacccacgtaaagacgttaggtcaaggtgtagcccatgaggtggcaagaaatgggctacattttctaccccagaaaactacgatagcccttatgaaacttaagggtcgaaggtggatttagcagtaaactgagagtagagtgcttagttgaacagggccctgaagcgcgtacacaccgcccgtcaccctcctcaagtatacttcaaaggacatttaactaaaacccctacgcatttatatagaggagacaagtcgtaacatggtaagtgtactggaaagtgcacttggacgaaccagagtgtagcttaacacaaagcacccaacttacacttaggagatttcaacttaacttgaccgctctgagctaaacctagccccaaacccactccaccttactaccagacaaccttaaccaaaccatttacccaaataaagtataggcgatagaaattgaaacctggcgcaatagatatagtaccgcaagggaaagatgaaaaattataaccaagcataatatagcaaggactaacccctataccttctgcataatgaattaactagaaataactttgcaaggagagccaaagctaagacccccgaaaccagacgagctacctaagaacagctaaaagagcacacccgtctatgtagcaaaatagtgggaagatttataggtagaggcgacaaacctaccgagcctggtgatagctggttgtccaagatagaatcttagttcaactttaaatttgcccacagaaccctctaaatccccttgtaaatttaactgttagtccaaagaggaacagctctttggacactaggaaaaaaccttgtagagagagtaaaaaatttaacacccatagtaggcctaaaagcagccaccaattaagaaagcgttcaagctcaacacccactacctaaaaaatcccaaacatataactgaactcctcacacccaattggaccaatctatcaccctatagaagaactaatgttagtataagtaacatgaaaacattctcctccgcataagcctgcgtcagattaaaacactgaactgacaattaacagcccaatatctacaatcaaccaacaagtcattattaccctcactgtcaacccaacacaggcatgctcataaggaaaggttaaaaaaagtaaaaggaactcggcaaatcttaccccgcctgtttaccaaaaacatcacctctagcatcaccagtattagaggcaccgcctgcccagtgacacatgtttaacggccgcggtaccctaaccgtgcaaaggtagcataatcacttgttccttaaatagggacctgtatgaatggctccacgagggttcagctgtctcttacttttaaccagtgaaattgacctgcccgtgaagaggcgggcatgacacagcaagacgagaagaccctatggagctttaatttattaatgcaaacagtacctaacaaacccacaggtcctaaactaccaaacctgcattaaaaatttcggttggggcgacctcggagcagaacccaacctccgagcagtacatgctaagacttcaccagtcaaagcgaactactatactcaattgatccaataacttgaccaacggaacaagttaccctagggataacagcgcaatcctattctagagtccatatcaacaatagggtttacgacctcgatgttggatcaggacatcccgatggtgcagccgctattaaaggttcgtttgttcaacgattaaagtcctacgtgatctgagttcagaccggagtaatccaggtcggtttctatctacnttcaaattcctccctgtacgaaaggacaagagaaataaggcctacttcacaaagcgccttcccccgtaaatgatatcatctcaacttagtattatacccacacccacccaagaacagggtttgttaagatggcagagcccggtaatcgcataaaacttaaaactttacagtcagaggttcaattcctcttcttaacaacatacccatggccaacctcctactcctcattgtacccattctaatcgcaatggcattcctaatgcttaccgaacgaaaaattctaggctatatacaactacgcaaaggccccaacgttgtaggcccctacgggctactacagcccttcgctgacgccataaaactcttcaccaaagagcccctaaaacccgccacatctaccatcaccctctacatcaccgccccgaccttagctctcaccatcgctcttctactatgaacccccctccccatacccaaccccctggtcaacctcaacctaggcctcctatttattctagccacctctagcctagccgtttactcaatcctctgatcagggtgagcatcaaactcaaactacgccctgatcggcgcactgcgagcagtagcccaaacaatctcatatgaagtcaccctagccatcattctactatcaacattactaataagtggctcctttaacctctccacccttatcacaacacaagaacacctctgattactcctgccatcatgacccttggccataatatgatttatctccacactagcagagaccaaccgaacccccttcgaccttgccgaaggggagtccgaactagtctcaggcttcaacatcgaatacgccgcaggccccttcgccctattcttcatagccgaatatacaaacattattataataaacaccctcaccactacaatcttcctaggaacaacatatgacgcactctcccctgaactctacacaacatattttgtcaccaagaccctacttctaacctccctgttcttatgaattcgaacagcatacccccgattccgctacgaccaactcatacacctcctatgaaaaaacttcctaccactcaccctagcattacttatatgatatgtctccatacccattacaatctccagcattccccctcaaacctaagaaatatgtctgataaaagagttactttgatagagtaaataataggagcttaaacccccttatttctaggactatgagaatcgaacccatccctgagaatccaaaattctccgtgccacctatcacaccccatcctaaagtaaggtcagctaaataagctatcgggcccataccccgaaaatgttggttatacccttcccgtactaattaatcccctggcccaacccgtcatctactctaccatctttgcaggcacactcatcactgcgctaagctcgcactgattttttacctgagtaggcctagaaataaacatgctagcttttattccagttctaaccaaaaaaataaaccctcgttccacagaagctgccatcaagtatttcctcacgcaagcaaccgcatccataatccttctaatagctatcctcttcaacaatatactctccggacaatgaaccataaccaatactaccaatcaatactcatcattaataatcataatggctatagcaataaaactaggaatagccccctttcacttctgagtcccagaggttacccaaggcacccctctgacatccggcctgcttcttctcacatgacaaaaactagcccccatctcaatcatataccaaatctctccctcactaaacgtaagccttctcctcactctctcaatcttatccatcatagcaggcagttgaggtggattaaaccaaacccagctacgcaaaatcttagcatactcctcaattacccacataggatgaataatagcagttctaccgtacaaccctaacataaccattcttaatttaactatttatattatcctaactactaccgcattcctactactcaacttaaactccagcaccacgaccctactactatctcgcacctgaaacaagctaacatgactaacacccttaattccatccaccctcctctccctaggaggcctgcccccgctaaccggctttttgcccaaatgggccattatcgaagaattcacaaaaaacaatagcctcatcatccccaccatcatagccaccatcaccctccttaacctctacttctacctacgcctaatctactccacctcaatcacactactccccatatctaacaacgtaaaaataaaatgacagtttgaacatacaaaacccaccccattcctccccacactcatcgcccttaccacgctactcctacctatctccccttttatactaataatcttatagaaatttaggttaaatacagaccaagagccttcaaagccctcagtaagttgcaatacttaatttctgtaacagctaaggactgcaaaaccccactctgcatcaactgaacgcaaatcagccactttaattaagctaagcccttactagaccaatgggacttaaacccacaaacacttagttaacagctaagcaccctaatcaactggcttcaatctacttctcccgccgccgggaaaaaaggcgggagaagccccggcaggtttgaagctgcttcttcgaatttgcaattcaatatgaaaatcacctcggagctggtaaaaagaggcctaacccctgtctttagatttacagtccaatgcttcactcagccattttacctcacccccactgatgttcgccgaccgttgactattctctacaaaccacaaagacattggaacactatacctattattcggcgcatgagctggagtcctaggcacagctctaagcctccttattcgagccgagctgggccagccaggcaaccttctaggtaacgaccacatctacaacgttatcgtcacagcccatgcatttgtaataatcttcttcatagtaatacccatcataatcggaggctttggcaactgactagttcccctaataatcggtgcccccgatatggcgtttccccgcataaacaacataagcttctgactcttacctccctctctcctactcctgctcgcatctgctatagtggaggccggagcaggaacaggttgaacagtctaccctcccttagcagggaactactcccaccctggagcctccgtagacctaaccatcttctccttacacctagcaggtgtctcctctatcttaggggccatcaatttcatcacaacaattatcaatataaaaccccctgccataacccaataccaaacgcccctcttcgtctgatccgtcctaatcacagcagtcctacttctcctatctctcccagtcctagctgctggcatcactatactactaacagaccgcaacctcaacaccaccttcttcgaccccgccggaggaggagaccccattctataccaacacctattctgatttttcggtcaccctgaagtttatattcttatcctaccaggcttcggaataatctcccatattgtaacttactactccggaaaaaaagaaccatttggatacataggtatggtctgagctataatatcaattggcttcctagggtttatcgtgtgagcacaccatatatttacagtaggaatagacgtagacacacgagcatatttcacctccgctaccataatcatcgctatccccaccggcgtcaaagtatttagctgactcgccacactccacggaagcaatatgaaatgatctgctgcagtgctctgagccctaggattcatctttcttttcaccgtaggtggcctgactggcattgtattagcaaactcatcactagacatcgtactacacgacacgtactacgttgtagctcacttccactatgtcctatcaataggagctgtatttgccatcataggaggcttcattcactgatttcccctattctcaggctacaccctagaccaaacctacgccaaaatccatttcactatcatattcatcggcgtaaatctaactttcttcccacaacactttctcggcctatccggaatgccccgacgttactcggactaccccgatgcatacaccacatgaaacatcctatcatctgtaggctcattcatttctctaacagcagtaatattaataattttcatgatttgagaagccttcgcttcgaagcgaaaagtcctaatagtagaagaaccctccataaacctggagtgactatatggatgccccccaccctaccacacattcgaagaacccgtatacataaaatctagacaaaaaaggaaggaatcgaaccccccaaagctggtttcaagccaaccccatggcctccatgactttttcaaaaaggtattagaaaaaccatttcataactttgtcaaagttaaattataggctaaatcctatatatcttaatggcacatgcagcgcaagtaggtctacaagacgctacttcccctatcatagaagagcttatcacctttcatgatcacgccctcataatcattttccttatctgcttcctagtcctgtatgcccttttcctaacactcacaacaaaactaactaatactaacatctcagacgctcaggaaatagaaaccgtctgaactatcctgcccgccatcatcctagtcctcatcgccctcccatccctacgcatcctttacataacagacgaggtcaacgatccctcccttaccatcaaatcaattggccaccaatggtactgaacctacgagtacaccgactacggcggactaatcttcaactcctacatacttcccccattattcctagaaccaggcgacctgcgactccttgacgttgacaatcgagtagtactcccgattgaagcccccattcgtataataattacatcacaagacgtcttgcactcatgagctgtccccacattaggcttaaaaacagatgcaattcccggacgtctaaaccaaaccactttcaccgctacacgaccgggggtatactacggtcaatgctctgaaatctgtggagcaaaccacagtttcatgcccatcgtcctagaattaattcccctaaaaatctttgaaataggacccgtatttaccctatagcaccccctctaccccctctagagcccactgtaaagctaacttagcattaaccttttaagttaaagattaagagaaccaacacctctttacagtgaaatgccccaactaaatactaccgtatggcccaccataattacccccatactccttacactattcctcatcacccaactaaaaatattaaacacaaactaccacctacctccctcaccaaagcccataaaaataaaaaattataacaaaccctgagaaccaaaatgaacgaaaatctgttcgcttcattcattgcccccacaatcctaggcctacccgccgcagtactgatcattctatttccccctctatttatccccacctccaaatatctcatcaacaaccgactaatcaccacccaacaatgactaatcaaactaacctcaaaacaaatgataaccatacacaacactaaaggacgaacctgatctcttatactagtatccttaatcatttttattgccacaactaacctcctcggactcctgcctcactcatttacaccaaccacccaactatctataaacctagccatggccatccccttatgagcgggcgcagtgattataggctttcgctctaagattaaaaatgccctagcccacttcttaccacaaggcacacctacaccccttatccccatactagttattatcgaaaccatcagcctactcattcaaccaatagccctggccgtacgcctaaccgctaacattactgcaggccacctactcatgcacctaattggaagcgccaccctagcaatatcaaccattaaccttccctctacacttatcatcttcacaattctaattctactgactatcctagaaatcgctgtcgccttaatccaagcctacgttttcacacttctagtaagcctctacctgcacgacaacacataatgacccaccaatcacatgcctatcatatagtaaaacccagcccatgacccctaacaggggccctctcagccctcctaatgacctccggcctagccatgtgatttcacttccactccataacgctcctcatactaggcctactaaccaacacactaaccatataccaatgatggcgcgatgtaacacgagaaagcacataccaaggccaccacacaccacctgtccaaaaaggccttcgatacgggataatcctatttattacctcagaagtttttttcttcgcaggatttttctgagccttttaccactccagcctagcccctaccccccaattaggagggcactggcccccaacaggcatcaccccgctaaatcccctagaagtcccactcctaaacacatccgtattactcgcatcaggagtatcaatcacctgagctcaccatagtctaatagaaaacaaccgaaaccaaataattcaagcactgcttattacaattttactgggtctctattttaccctcctacaagcctcagagtacttcgagtctcccttcaccatttccgacggcatctacggctcaacattttttgtagccacaggcttccacggacttcacgtcattattggctcaactttcctcactatctgcttcatccgccaactaatatttcactttacatccaaacatcactttggcttcgaagccgccgcctgatactggcattttgtagatgtagtttgactatttctgtatgtctccatctattgatgagggtcttactcttttagtataaatagtaccgttaacttccaattaactagctttgacaacattcaaaaaagagtaataaacttcgccttaattttaataatcaacaccctcctagccttactactaataattattacattttgactaccacaactcaacggctacatagaaaaatccaccccttacgagtgcggcttcgaccctatatcccccgcccgcgtccctttctccataaaattcttcttagtagctatcaccttcttattatttgatctagaaattgccctccttttacccctaccatgagccctacaaacaactaacctgccactaatagttatgtcatccctcttattaatcatcatcctagccctaagtctggcctatgagtgactacaaaaaggattagactgagccgaattggtatatagtttaaacaaaacgaatgatttcgactcattaaattatgataatcatatttaccaaatgcccctcatttacataaatattatactagcatttaccatctcacttctaggaatactagtatatcgctcacacctcatatcctccctactatgcctagaaggaataatactatcgctgttcattatagctactctcataaccctcaacacccactccctcttagccaatattgtgcctattgccatactagtctttgccgcctgcgaagcagcggtgggcctagccctactagtctcaatctccaacacatatggcctagactacgtacataacctaaacctactccaatgctaaaactaatcgtcccaacaattatattactaccactgacatgactttccaaaaaacacataatttgaatcaacacaaccacccacagcctaattattagcatcatccctctactattttttaaccaaatcaacaacaacctatttagctgctccccaaccttttcctccgaccccctaacaacccccctcctaatactaactacctgactcctacccctcacaatcatggcaagccaacgccacttatccagtgaaccactatcacgaaaaaaactctacctctctatactaatctccctacaaatctccttaattataacattcacagccacagaactaatcatattttatatcttcttcgaaaccacacttatccccaccttggctatcatcacccgatgaggcaaccagccagaacgcctgaacgcaggcacatacttcctattctacaccctagtaggctcccttcccctactcatcgcactaatttacactcacaacaccctaggctcactaaacattctactactcactctcactgcccaagaactatcaaactcctgagccaacaacttaatatgactagcttacacaatagcttttatagtaaagatacctctttacggactccacttatgactccctaaagcccatgtcgaagcccccatcgctgggtcaatagtacttgccgcagtactcttaaaactaggcggctatggtataatacgcctcacactcattctcaaccccctgacaaaacacatagcctaccccttccttgtactatccctatgaggcataattataacaagctccatctgcctacgacaaacagacctaaaatcgctcattgcatactcttcaatcagccacatagccctcgtagtaacagccattctcatccaaaccccctgaagcttcaccggcgcagtcattctcataatcgcccacggacttacatcctcattactattctgcctagcaaactcaaactacgaacgcactcacagtcgcatcataatcctctctcaaggacttcaaactctactcccactaatagctttttgatgacttctagcaagcctcgctaacctcgccttaccccccactattaacctactgggagaactctctgtgctagtaaccacgttctcctgatcaaatatcactctcctacttacaggactcaacatactagtcacagccctatactccctctacatatttaccacaacacaatggggctcactcacccaccacattaacaacataaaaccctcattcacacgagaaaacaccctcatgttcatacacctatcccccattctcctcctatccctcaaccccgacatcattaccgggttttcctcttgtaaatatagtttaaccaaaacatcagattgtgaatctgacaacagaggcttacgaccccttatttaccgagaaagctcacaagaactgctaactcatgcccccatgtctaacaacatggctttctcaacttttaaaggataacagctatccattggtcttaggccccaaaaattttggtgcaactccaaataaaagtaataaccatgcacactactataaccaccctaaccctgacttccctaattccccccatccttaccaccctcgttaaccctaacaaaaaaaactcatacccccattatgtaaaatccattgtcgcatccacctttattatcagtctcttccccacaacaatattcatatgcctagaccaagaagttattatctcgaactgacactgagccacaacccaaacaacccagctctccctaagcttcaaactagactacttctccataatattcatccctgtagcattgttcgttacatggtccatcatagaattctcactgtgatatataaactcagacccaaacattaatcagttcttcaaatatctactcattttcctaattaccatactaatcttagttaccgctaacaacctattccaactgttcatcggctgagagggcgtaggaattatatccttcttgctcatcagttgatgatacgcccgagcagatgccaacacagcagccattcaagcaatcctatacaaccgtatcggcgatatcggtttcatcctcgccttagcatgatttatcctacactccaactcatgagacccacaacaaatagcccttctaaacgctaatccaagcctcaccccactactaggcctcctcctagcagcagcaggcaaatcagcccaattaggtctccacccctgactcccctcagccatagaaggccccaccccagtctcagccctactccactcaagcactatagttgtagcaggaatcttcttactcatccgcttccaccccctagcagaaaatagcccactaatccaaactctaacactatgcttaggcgctatcaccactctgttcgcagcagtctgcgcccttacacaaaatgacatcaaaaaaatcgtagccttctccacttcaagtcaactaggactcataatagttacaatcggcatcaaccaaccacacctagcattcctgcacatctgtacccacgccttcttcaaagccatactatttatgtgctccgggtccatcatccacaaccttaacaatgaacaagatattcgaaaaataggaggactactcaaaaccatacctctcacttcaacctccctcaccattggcagcctagcattagcaggaatacctttcctcacaggtttctactccaaagaccacatcatcgaaaccgcaaacatatcatacacaaacgcctgagccctatctattactctcatcgctacctccctgacaagcgcctatagcactcgaataattcttctcaccctaacaggtcaacctcgcttccccacccttactaacattaacgaaaataaccccaccctactaaaccccattaaacgcctggcagccggaagcctattcgcaggatttctcattactaacaacatttcccccgcatcccccttccaaacaacagtccccctctacctaaaactcacagccctcgctgtcactttcctaggacttctaacagccctagacctcaactacctaaccaacaaacttaaaataaaatccccactatgcacattttatttctccaacatactcggattctaccctagcatcacacaccgcacaatcccctatctaggccttcttacgagccaaaacctgcccctactcctcctagacctaacctgactagaaaagctattacctaaaacaatttcacagcaccaaatctccacctccatcatcacctcaacccaaaaaggcataattaaactttacttcctctctttcttcttcccactcatcctaaccctactcctaatcacataacctattcccccgagcaatctcaattacaatatacacaccaacaaacaatgttcaaccagtaactactactaatcaacgcccataatcatacaaagcccccgcaccaataggatcctcccgaatcaaccctgacccctctccttcataaattattcagcttcctacactattaaagtttaccacaaccaccaccccatcatactctttcacccacagcaccaatcctacctccatcgctaaccccactaaaacactcaccaagacctcaacccctgacccccatgcctcaggatactcctcaatagccatcgctgtagtatatccaaagacaaccatcattccccctaaataaattaaaaaaactattaaacccatataacctcccccaaaattcagaataataacacacccgaccacaccgctaacaatcaatactaaacccccataaataggagaaggcttagaagaaaaccccacaaaccccattactaaacccacactcaacagaaacaaagcatacatcattattctcgcacggactacaaccacgaccaatgatatgaaaaaccatcgttgtatttcaactacaagaacaccaatgaccccaatacgcaaaattaaccccctaataaaattaattaaccactcattcatcgacctccccaccccatccaacatctccgcatgatgaaacttcggctcactccttggcgcctgcctgatcctccaaatcaccacaggactattcctagccatgcactactcaccagacgcctcaaccgccttttcatcaatcgcccacatcactcgagacgtaaattatggctgaatcatccgctaccttcacgccaatggcgcctcaatattctttatctgcctcttcctacacatcggacgaggcctatattacggatcatttctctactcagaaacctgaaacatcggcattatcctcctgcttgcaactatagcaacagccttcataggctatgtcctcccgtgaggccaaatatcattctgaggggccacagtaattacaaacttactatccgccatcccatacattgggacagacctagttcaatgaatctgaggaggctactcagtagacagtcccaccctcacacgattctttacctttcacttcatcttgcccttcattattgcagccctagcagcactccacctcctattcttgcacgaaacgggatcaaacaaccccctaggaatcacctcccattccgataaaatcaccttccacccttactacacaatcaaagacgccctcggcttacttctcttccttctctccttaatgacattaacactattctcaccagacctcctaggcgacccagacaattataccctagccaaccccttaaacacccctccccacatcaagcccgaatgatatttcctattcgcctacacaattctccgatccgtccctaacaaactaggaggcgtccttgccctattactatccatcctcatcctagcaataatccccatcctccatatatccaaacaacaaagcataatatttcgcccactaagccaatcactttattgactcctagccgcagacctcctcattctaacctgaatcggaggacaaccagtaagctacccttttaccatcattggacaagtagcatccgtactatacttcacaacaatcctaatcctaataccaactatctccctaattgaaaacaaaatactcaaatgggcctgtccttgtagtataaactaatacaccagtcttgtaagccggagatgaaaacctttttccaaggacaaatcagagaaaaagtctttaactccaccattagcacccaaagctaagattctaatttaaactattctctgttctttcatggggaagcagatttgggtaccacccaagtattgactcacccatcaacaaccgctatgtatttcgtacattactgccagccaccatgaatattgtacagtaccataaatacttgaccacctgtagtacataaaaacccaacccacatcaaaaccccctccccatgcttacaagcaagtacagcaatcaaccttcaactatcacacatcaactgcaactccaaagccacccctcacccactaggataccaacaaacctacccacccttaacagtacatagcacataaagccatttaccgtacatagcacattacagtcaaatcccttctcgtccccatggatgacccccctcagatagggatcccttgaccaccatcctccgtgaaatcaatatcccgcacaagagtgctactctcctcgctccgggcccataacacttgggggtagctaaagtgaactgtatccgacatctggttcctacttcagggccataaagcctaaatagcccacacgttccccttaaataagacatcacgatg

SEQ ID NO: 553 - DNA, 16570 bp, Homo sapiens mitochondrial
  3108: "n" refers to a nucleotide at position 3107 of the Cambridge Reference Sequence (CRS, Anderson et al. 1981 Nature 290:457-465), later determined to be absent from the human mtDNA sequence according to the revised CRS (rCRS, Andrews et al. 1999 Nature Genetics 23:147); "n" therefore represents a single nucleotide deletion at a position corresponding to nucleotide 3107 of SEQ ID NO:1 as provided herein.
gatcacaggtctatcaccctattaaccactcacgggagctctccatgcatttggtattttcgtctggggggtgtgcacgcgatagcattgcgagacgctggagccggagcaccctatgtcgcagtatctgtctttgattcctgcctcatcctattatttatcgcacctacgttcaatattacaggcgaacatacttactaaagtgtgttaattaattaatgcttgtaggacataataataacaattgaatgtctgcacagccgctttccacacagacatcataacaaaaaatttccaccaaaccccccctcccccgccttctggccacagcacttaaacacatctctgccaaaccccaaaaacaaagaaccctaacaccagcctaaccagatttcaaattttatcttttggcggtatgcacttttaacagtcaccccccaactaacacattattttcccctcccactcccatactactaatctcatcaatacaacccccgcccatcctacccagcacacacacaccgctgctaaccccataccccgaaccaaccaaaccccaaagacaccccccacagtttatgtagcttacctcctcaaagcaatacactgaaaatgtttagacgggctcacatcaccccataaacaaataggtttggtcctagcctttctattagctcttagtaagattacacatgcaagcatccccgttccagtgagttcaccctctaaatcaccacgatcaaaagggacaagcatcaagcacgcagcaatgcagctcaaaacgcttagcctagccacacccccacgggaaacagcagtgattaacctttagcaataaacgaaagtttaactaagctatactaaccccagggttggtcaatttcgtgccagccaccgcggtcacacgattaacccaagtcaatagaagccggcgtaaagagtgttttagatcaccccctccccaataaagctaaaactcacctgagttgtaaaaaactccagttgacacaaaatagactacgaaagtggctttaacatatctgaacacacaatagctaagacccaaactgggattagataccccactatgcttagccctaaacctcaacagttaaatcaacaaaactgctcgccagaacactacgagccacagcttaaaactcaaaggacctggcggtgcttcatatccctctagaggagcctgttctgtaatcgataaaccccgatcaacctcaccacctcttgctcagcctatataccgccatcttcagcaaaccctgatgaaggctacaaagtaagcgcaagtacccacgtaaagacgttaggtcaaggtgtagcccatgaggtggcaagaaatgggctacattttctaccccagaaaactacgatagcccttatgaaacttaagggtcgaaggtggatttagcagtaaactgagagtagagtgcttagttgaacagggccctgaagcgcgtacacaccgcccgtcaccctcctcaagtatacttcaaaggacatttaactaaaacccctacgcatttatatagaggagacaagtcgtaacatggtaagtgtactggaaagtgcacttggacgaaccagagtgtagcttaacacaaagcacccaacttacacttaggagatttcaacttaacttgaccgctctgagctaaacctagccccaaacccactccaccttactaccagacaaccttagccaaaccatttacccaaataaagtataggcgatagaaattgaaacctggcgcaatagatatagtaccgcaagggaaagatgaaaaattataaccaagcataatatagcaaggactaacccctataccttctgcataatgaattaactagaaataactttgcaaggagagccaaagctaagacccccgaaaccagacgagctacctaagaacagctaaaagagcacacccgtctatgtagcaaaatagtgggaagatttataggtagaggcgacaaacctaccgagcctggtgatagctggttgtccaagatagaatcttagttcaactttaaatttgcccacagaaccctctaaatccccttgtaaatttaactgttagtccaaagaggaacagctctttggacactaggaaaaaaccttgtagagagagtaaaaaatttaacacccatagtaggcctaaaagcagccaccaattaagaaagcgttcaagctcaacacccactacctaaaaaatcccaaacatataactgaactcctcacacccaattggaccaatctatcaccctatagaagaactaatgttagtataagtaacatgaaaacattctcctccgcataagcctgcgtcagattaaaacactgaactgacaattaacagcccaatatctacaatcaaccaacaagtcattattaccctcactgtcaacccaacacaggcatgctcataaggaaaggttaaaaaaagtaaaaggaactcggcaaatcttaccccgcctgtttaccaaaaacatcacctctagcatcaccagtattagaggcaccgcctgcccagtgacacatgtttaacggccgcggtaccctaaccgtgcaaaggtagcataatcacttgttccttaaatagggacctgtatgaatggctccacgagggttcagctgtctcttacttttaaccagtgaaattgacctgcccgtgaagaggcgggcataacacagcaagacgagaagaccctatggagctttaatttattaatgcaaacagtacctaacaaacccacaggtcctaaactaccaaacctgcattaaaaatttcggttggggcgacctcggagcagaacccaacctccgagcagtacatgctaagacttcaccagtcaaagcgaactactatactcaattgatccaataacttgaccaacggaacaagttaccctagggataacagcgcaatcctattctagagtccatatcaacaatagggtttacgacctcgatgttggatcaggacatcccaatggtgcagccgctattaaaggttcgtttgttcaacgattaaagtcctacgtgatctgagttcagaccggagtaatccaggtcggtttctatctacnttcaaattcctccctgtacgaaaggacaagagaaataaggcctacttcacaaagcgccttcccccgtaaatgatatcatctcaacttagtattatacccacacccacccaagaacagggtttgttaagatggcagagcccggtaatcgcataaaacttaaaactttacagtcagaggttcaattcctcttcttaacaacatacccatggccaacctcctactcctcattgtacccattctaatcgcaatggcattcctaatgcttaccgaacgaaaaattctaggctatatacaactacgcaaaggccccaacgttgtaggcccctacgggctactacaacccttcgctgacgccataaaactcttcaccaaagagcccctaaaacccgccacatctaccatcaccctctacatcaccgccccgaccttagctctcaccatcgctcttctactatgaacccccctccccatacccaaccccctggtcaacctcaacctaggcctcctatttattctagccacctctagcctagccgtttactcaatcctctgatcagggtgagcatcaaactcaaactacgccctgatcggcgcactgcgagcagtagcccaaacaatctcatatgaagtcaccctagtcatcattctactatcaacattactaataagtggctcctttaacctctccacccttatcacaacacaagaacacctctgattactcctgccatcatgacccttggccataatatgatttatctccacactagcagagaccaaccgaacccccttcgaccttgccgaaggggagtccgaactagtctcaggcttcaacatcgaatacgccgcaggccccttcgccctattcttcatagccgaatacacaaacattattataataaacaccctcaccactacaatcttcctaggaacaacatatgacgcactctcccctgaactctacacaacatattttgtcaccaagaccctacttctaacctccctgttcttatgaattcgaacagcatacccccgattccgctacgaccaactcatacacctcctatgaaaaaacttcctaccactcaccctagcattacttatatgatatgtctccatacccattacaatctccagcattccccctcaaacctaagaaatatgtctgataaaagagttactttgatagagtaaataataggagcttaaacccccttatttctaggactatgagaatcgaacccatccctgagaatccaaaattctccgtgccacctatcacaccccatcctaaagtaaggtcagctaaataagctatcgggcccataccccgaaaatgttggttatacccttcccgtactaattaatcccctggcccaacccgtcatctactctaccatctttgcaggcacactcatcacagcgctaagctcgcactgattttttacctgagtaggcctagaaataaacatgctagcttttattccagttctaaccaaaaaaataaaccctcgttccacagaagctgccatcaagtatttcctcacgcaagcaaccgcatccataatccttctaatagctatcctcttcaacaatatactctccggacaatgaaccataaccaatactaccaatcaatactcatcattaataatcataatggctatagcaataaaactaggaatagccccctttcacttctgagtcccagaggttacccaaggcacccctctgacatccggcctgcttcttctcacatgacaaaaactagcccccatctcaatcatataccaaatctctccctcactaaacgtaagccttctcctcactctctcaatcttatccatcatagcaggcagttgaggtggattaaaccaaacccagctacgcaaaatcttagcatactcctcaattacccacataggatgaataatagcagttctaccgtacaaccctaacataaccattcttaatttaactatttatattatcctaactactaccgcattcctactactcaacttaaactccagcaccacgaccctactactatctcgcacctgaaacaagctaacatgactaacacccttaattccatccaccctcctctccctaggaggcctgcccccgctaaccggctttttgcccaaatgggccattatcgaagaattcacaaaaaacaatagcctcatcatccccaccatcatagccaccatcaccctccttaacctctacttctacctacgcctaatctactccacctcaatcacactactccccatatctaacaacgtaaaaataaaatgacagtttgaacatacaaaacccaccccattcctccccacactcatcgcccttaccacgctactcctacctatctccccttttatactaataatcttatagaaatttaggttaaatacagaccaagagccttcaaagccctcagtaagttgcaatacttaatttctgtaacagctaaggactgcaaaaccccactctgcatcaactgaacgcaaatcagccactttaattaagctaagcccttactagaccaatgggacttaaacccacaaacacttagttaacagctaagcaccctaatcaactggcttcaatctacttctcccgccgccgggaaaaaaggcgggagaagccccggcaggtttgaagctgcttcttcgaatttgcaattcaatatgaaaatcacctcggagctggtaaaaagaggcctaacccctgtctttagatttacagtccaatgcttcactcagccattttacctcacccccactgatgttcgccgaccgttgactattctctacaaaccacaaagacattggaacactatacctattattcggcgcatgagctggagtcctaggcacagctctaagcctccttattcgagccgagctgggccagccaggcaaccttctaggtaacgaccacatctacaacgttatcgtcacagcccatgcatttgtaataatcttcttcatagtaatacccatcataatcggaggctttggcaactgactagttcccctaataatcggtgcccccgatatggcgtttccccgcataaacaacataagcttctgactcttacctccctctctcctactcctgctcgcatctgctatagtggaggccggagcaggaacaggttgaacagtctaccctcccttagcagggaactactcccaccctggagcctccgtagacctaaccatcttctccttacacctagcaggtgtctcctctatcttaggggccatcaatttcatcacaacaattatcaatataaaaccccctgccataacccaataccaaacgcccctcttcgtctgatccgtcctaatcacagcagtcctacttctcctatctctcccagtcctagctgctggcatcactatactactaacagaccgcaacctcaacaccaccttcttcgaccccgccggaggaggagaccccattctataccaacacctattctgatttttcggtcaccctgaagtttatattcttatcctaccaggcttcggaataatctcccatattgtaacttactactccggaaaaaaagaaccatttggatacataggtatggtctgagctatgatatcaattggcttcctagggtttatcgtgtgagcacaccatatatttacagtaggaatagacgtagacacacgagcatatttcacctccgctaccataatcatcgctatccccaccggcgtcaaagtatttagctgactcgccacactccacggaagcaatatgaaatgatctgctgcagtgctctgagccctaggattcatctttcttttcaccgtaggtggcctgactggcattgtattagcaaactcatcactagacatcgtactacacgacacgtactacgttgtagcccacttccactatgtcctatcaataggagctgtatttgccatcataggaggcttcattcactgatttcccctattctcaggctacaccctagaccaaacctacgccaaaatccatttcactatcatattcatcggcgtaaatctaactttcttcccacaacactttctcggcctatccggaatgccccgacgttactcggactaccccgatgcatacaccacatgaaacatcctatcatctgtaggctcattcatttctctaacagcagtaatattaataattttcatgatttgagaagccttcgcttcgaagcgaaaagtcctaatagtagaagaaccctccataaacctggagtgactatatggatgccccccaccctaccacacattcgaagaacccgtatacataaaatctagacaaaaaaggaaggaatcgaaccccccaaagctggtttcaagccaaccccatggcctccatgactttttcaaaaaggtattagaaaaaccatttcataactttgtcaaagttaaattataggctaaatcctatatatcttaatggcacatgcagcgcaagtaggtctacaagacgctacttcccctatcatagaagagcttatcacctttcatgatcacgccctcataatcattttccttatctgcttcctagtcctgtatgcccttttcctaacactcacaacaaaactaactaatactaacatctcagacgctcaggaaatagaaaccgtctgaactatcctgcccgccatcatcctagtcctcatcgccctcccatccctacgcatcctttacataacagacgaggtcaacgatccctcccttaccatcaaatcaattggccaccaatggtactgaacctacgagtacaccgactacggcggactaatcttcaactcctacatacttcccccattattcctagaaccaggcgacctgcgactccttgacgttgacaatcgagtagtactcccgattgaagcccccattcgtataataattacatcacaagacgtcttgcactcatgagctgtccccacattaggcttaaaaacagatgcaattcccggacgtctaaaccaaaccactttcaccgctacacgaccgggggtatactacggtcaatgctctgaaatctgtggagcaaaccacagtttcatgcccatcgtcctagaattaattcccctaaaaatctttgaaatagggcccgtatttaccctatagcaccccctctaccccctctagagcccactgtaaagctaacttagcattaaccttttaagttaaagattaagagaaccaacacctctttacagtgaaatgccccaactaaatactaccgtatggcccaccataattacccccatactccttacactattcctcatcacccaactaaaaatattaaacacaaactaccacctacctccctcaccaaagcccataaaaataaaaaattataacaaaccctgagaaccaaaatgaacgaaaatctgttcgcttcattcattgcccccacaatcctaggcctacccgccgcagtactgatcattctatttccccctctattgatccccacctccaaatatctcatcaacaaccgactaatcaccacccaacaatgactaatcaaactaacctcaaaacaaatgataaccatacacaacactaaaggacgaacctgatctcttatactagtatccttaatcatttttattgccacaactaacctcctcggactcctgcctcactcatttacaccaaccacccaactatctataaacctagccatggccatccccttatgagcgggcgcagtgattataggctttcgctctaagattaaaaatgccctagcccacttcttaccacaaggcacacctacaccccttatccccatactagttattatcgaaaccatcagcctactcattcaaccaatagccctggccgtacgcctaaccgctaacattactgcaggccacctactcatgcacctaattggaagcgccaccctagcaatatcaaccattaaccttccctctacacttatcatcttcacaattctaattctactgactatcctagaaatcgctgtcgccttaatccaagcctacgttttcacacttctagtaagcctctacctgcacgacaacacataatgacccaccaatcacatgcctatcatatagtaaaacccagcccatgacccctaacaggggccctctcagccctcctaatgacctccggcctagccatgtgatttcacttccactccataacgctcctcatactaggcctactaaccaacacactaaccatataccaatgatggcgcgatgtaacacgagaaagcacataccaaggccaccacacaccacctgtccaaaaaggccttcgatacgggataatcctatttattacctcagaagtttttttcttcgcaggatttttctgagccttttaccactccagcctagcccctaccccccaattaggagggcactggcccccaacaggcatcaccccgctaaatcccctagaagtcccactcctaaacacatccgtattactcgcatcaggagtatcaatcacctgagctcaccatagtctaatagaaaacaaccgaaaccaaataattcaagcactgcttattacaattttactgggtctctattttaccctcctacaagcctcagagtacttcgagtctcccttcaccatttccgacggcatctacggctcaacattttttgtagccacaggcttccacggacttcacgtcattattggctcaactttcctcactatctgcttcatccgccaactaatatttcactttacatccaaacatcactttggcttcgaagccgccgcctgatactggcattttgtagatgtggtttgactatttctgtatgtctccatctattgatgagggtcttactcttttagtataaatagtaccgttaacttccaattaactagttttgacaacattcaaaaaagagtaataaacttcgccttaattttaataatcaacaccctcctagccttactactaataattattacattttgactaccacaactcaacggctacatagaaaaatccaccccttacgagtgcggcttcgaccctatatcccccgcccgcgtccctttctccataaaattcttcttagtagctattaccttcttattatttgatctagaaattgccctccttttacccctaccatgagccctacaaacaactaacctgccactaatagttatgtcatccctcttattaatcatcatcctagccctaagtctggcctatgagtgactacaaaaaggattagactgaaccgaattggtatatagtttaaacaaaacgaatgatttcgactcattaaattatgataatcatatttaccaaatgcccctcatttacataaatattatactagcatttaccatctcacttctaggaatactagtatatcgctcacacctcatatcctccctactatgcctagaaggaataatactatcgctgttcattatagctactctcataaccctcaacacccactccctcttagccaatattgtgcctattgccatactagtctttgccgcctgcgaagcagcggtgggcctagccctactagtctcaatctccaacacatatggcctagactacgtacataacctaaacctactccaatgctaaaactaatcgtcccaacaattatattactaccactgacatgactttccaaaaaacacataatttgaatcaacacaaccacccacagcctaattattagcatcatccctctactattttttaaccaaatcaacaacaacctatttagctgttccccaaccttttcctccgaccccctaacaacccccctcctaatactaactacctgactcctacccctcacaatcatggcaagccaacgccacttatccagtgaaccactatcacgaaaaaaactctacctctctatactaatctccctacaaatctccttaattataacattcacagccacagaactaatcatattttatatcttcttcgaaaccacacttatccccaccttggctatcatcacccgatgaggcaaccagccagaacgcctgaacgcaggcacatacttcctattctacaccctagtaggctcccttcccctactcatcgcactaatttacactcacaacaccctaggctcactaaacattctactactcactctcactgcccaagaactatcaaactcctgagccaacaacttaatatgactagcttacacaatagcttttatagtaaagatacctctttacggactccacttatgactccctaaagcccatgtcgaagcccccatcgctgggtcaatagtacttgccgcagtactcttaaaactaggcggctatggtataatacgcctcacactcattctcaaccccctgacaaaacacatagcctaccccttccttgtactatccctatgaggcataattataacaagctccatctgcctacgacaaacagacctaaaatcgctcattgcatactcttcaatcagccacatagccctcgtagtaacagccattctcatccaaaccccctgaagcttcaccggcgcagtcattctcataatcgcccacgggcttacatcctcattactattctgcctagcaaactcaaactacgaacgcactcacagtcgcatcataatcctctctcaaggacttcaaactctactcccactaatagctttttgatgacttctagcaagcctcgctaacctcgccttaccccccactattaacctactgggagaactctctgtgctagtaaccacgttctcctgatcaaatatcactctcctacttacaggactcaacatactagtcacagccctatactccctctacatatttaccacaacacaatggggctcactcacccaccacattaacaacataaaaccctcattcacacgagaaaacaccctcatgttcatacacctatcccccattctcctcctatccctcaaccccgacatcattaccgggttttcctcttgtaaatatagtttaaccaaaacatcagattgtgaatctgacaacagaggcttacgaccccttatttaccgagaaagctcacaagaactgctaactcatgcccccatgtctaacaacatggctttctcaacttttaaaggataacagctatccattggtcttaggccccaaaaattttggtgcaactccaaataaaagtaataaccatgcacactactataaccaccctaaccctgacttccctaattccccccatccttaccaccctcgttaaccctaacaaaaaaaactcatacccccattatgtaaaatccattgtcgcatccacctttattatcagtctcttccccacaacaatattcatgtgcctagaccaagaagttattatctcgaactgacactgagccacaacccaaacaacccagctctccctaagcttcaaactagactacttctccataatattcatccctgtagcattgttcgttacatggtccatcatagaattctcactgtgatatataaactcagacccaaacattaatcagttcttcaaatatctactcatcttcctaattaccatactaatcttagttaccgctaacaacctattccaactgttcatcggctgagagggcgtaggaattatatccttcttgctcatcagttgatgatacgcccgagcagatgccaacacagcagccattcaagcaatcctatacaaccgtatcggcgatatcggtttcatcctcgccttagcatgatttatcctacactccaactcatgagacccacaacaaatagcccttctaaacgctaatccaagcctcaccccactactaggcctcctcctagcagcagcaggcaaatcagcccaattaggtctccacccctgactcccctcagccatagaaggccccaccccagtctcagccctactccactcaagcactatagttgtagcaggaatcttcttactcatccgcttccaccccctagcagaaaatagcccactaatccaaactctaacactatgcttaggcgctatcaccactctgttcgcagcagtctgcgcccttacacaaaatgacatcaaaaaaatcgtagccttctccacttcaagtcaactaggactcataatagttacaatcggcatcaaccaaccacacctagcattcctgcacatctgtacccacgccttcttcaaagccatactatttatgtgctccgggtccatcatccacaaccttaacaatgaacaagatattcgaaaaataggaggactactcaaaaccatacctctcacttcaacctccctcaccattggcagcctagcattagcaggaatacctttcctcacaggtttctactccaaagaccacatcatcgaaaccgcaaacatatcatacacaaacgcctgagccctatctattactctcatcgctacctccctgacaagcgcctatagcactcgaataattcttctcaccctaacaggtcaacctcgcttccccacccttactaacattaacgaaaataaccccaccctactaaaccccattaaacgcctggcagccggaagcctattcgcaggatttctcattactaacaacatttcccccgcatcccccttccaaacaacaatccccctctacctaaaactcacagccctcgctgtcactttcctaggacttctaacagccctagacctcaactacctaaccaacaaacttaaaataaaatccccactatgcacattttatttctccaacatactcggattctaccctagcatcacacaccgcacaatcccctatctaggccttcttacgagccaaaacctgcccctactcctcctagacctaacctgactagaaaagctattacctaaaacaatttcacagcaccaaatctccacctccatcatcacctcaacccaaaaaggcataattaaactttacttcctctctttcttcttcccactcatcctaaccctactcctaatcacataacctattcccccgagcaatctcaattacaatatatacaccaacaaacaatgttcaaccagtaactactactaatcaacgcccataatcatacaaagcccccgcaccaataggatcctcccgaatcaaccctgacccctctccttcataaattattcagcttcctacactattaaagtttaccacaaccaccaccccatcatactctttcacccacagcaccaatcctacctccatcgctaaccccactaaaacactcaccaagacctcaacccctgacccccatgcctcaggatactcctcaatagccatcgctgtagtatatccaaagacaaccatcattccccctaaataaattaaaaaaactattaaacccatataacctcccccaaaattcagaataataacacacccgaccacaccgctaacaatcaatactaaacccccataaataggagaaggcttagaagaaaaccccacaaaccccattactaaacccacactcaacagaaacaaagcatacatcattattctcgcacggactacaaccacgaccaatgatatgaaaaaccatcgttgtatttcaactacaagaacaccaatgaccccaatacgcaaaactaaccccctaataaaattaattaaccactcattcatcgacctccccaccccatccaacatctccgcatgatgaaacttcggctcactccttggcgcctgcctgatcctccaaatcaccacaggactattcctagccatgcactactcaccagacgcctcaaccgccttttcatcaatcgcccacatcactcgagacgtaaattatggctgaatcatccgctaccttcacgccaatggcgcctcaatattctttatctgcctcttcctacacatcgggcgaggcctatattacggatcatttctctactcagaaacctgaaacatcggcattatcctcctgcttgcaactatagcaacagccttcataggctatgtcctcccgtgaggccaaatatcattctgaggggccacagtaattacaaacttactatccgccatcccatacattgggacagacctagttcaatgaatctgaggaggctactcagtagacagtcccaccctcacacgattctttacctttcacttcatcttgcccttcattattgcagccctagcagcactccacctcctattcttgcacgaaacgggatcaaacaaccccctaggaatcacctcccattccgataaaatcaccttccacccttactacacaatcaaagacgccctcggcttacttctcttccttctctccttaatgacattaacactattctcaccagacctcctaggcgacccagacaattataccctagccaaccccttaaacacccctccccacatcaagcccgaatgatatttcctattcgcctacacaattctccgatccgtccctaacaaactaggaggcgtccttgccctattactatccatcctcatcctagcaataatccccatcctccatatatccaaacaacaaagcataatatttcgcccactaagccaatcactttattgactcctagccgcagacctcctcattctaacctgaatcggaggacaaccagtaagctacccttttaccatcattggacaagtagcatccgtactatacttcacaacaatcctaatcctaataccaactatctccctaattgaaaacaaaatactcaaatgggcctgtccttgtagtataaactaatacaccagtcttgtaaaccggagatgaaaacctttttccaaggacaaatcagagaaaaagtctttaactccaccattagcacccaaagctaagattctaatttaaactattctctgttctttcatggggaagcagatttgggtgccacccaagtattgactcacccatcaacaaccgctatgtatttcgtacattactgccagccaccatgaatattgtacggtaccataaatacttgaccacctgtagtacatgaaaacccaatccacatcaaaaccccctccccatgcttataagcaagtacagcaatcaaccctcaactatcacacatcaactgcaactccaaagccacccctcacccactaggataccaacaaacctacccacccttaacagtacatagtacataaagccatttaccgtacatagcacattacagtcaaatcccttctcgtccccatggatgacccccctcagataggggtcccttgaccaccatcctccgtgaaatcaatatcccgcacaagagtgctactctcctcgctccgggcccataacacttgggggtagctaaagtgaactgtatccgacatctggttcctacttcagggccataaagcctaaatagcccacacgttccccttaaataagacatcacgatg

SEQ ID NO: 554 - DNA, 16572 bp, Homo sapiens mitochondrial
  3110: "n" refers to a nucleotide at position 3107 of the Cambridge Reference Sequence (CRS, Anderson et al. 1981 Nature 290:457-465), later determined to be absent from the human mtDNA sequence according to the revised CRS (rCRS, Andrews et al. 1999 Nature Genetics 23:147); "n" therefore represents a single nucleotide deletion at a position corresponding to nucleotide 3107 of SEQ ID NO:1 as provided herein.
gatcacaggtctatcaccctattaaccactcacgggagctctccatgcatttggtattttcgtctggggggtgtgcacgcgatagcattgcgagacgctggagccggagcaccctatgtcgcagtatctgtctttgattcctgcctcatcctattatttatcgcacctacgttcaatattacagacgaacatacttactaaagtgtgttaattaattaatgcttgtaagacataataataacaattgaatgtctgcacagccgctttccacacagacatcataacaaaaaattttcaccaaaccccccctccccccccgcttctggccacagcacttaaacacatctctgccaaaccccaaaaacaaagaaccctaacaccagcctaaccagatttcaaattttatcttttggcggtatgcacttttaacagtcaccccccaactaacacattattttcccctctcactcccatactactaatctcatcaacacaacccccgcccatcctacccagcacacacacaccgctgctaaccccataccccgaaccaaccaaaccccaaagacaccccccacagtttatgtagcttacctcctcaaagcaatacactgaaaatgtttagacgggctcacatcaccccataaacaaataggtttggtcctagcctttctattagctcttagtaagattacacatgcaagcatccccgttccagtgagttcaccctctaaatcaccacgatcaaaagggacaagcatcaagcacgcagcaatgcagctcaaaacgcttagcctagccacacccccacgggaaacagcagtgattaacctttagcaataaacgaaagtttaactaagctatactaaccccagggttggtcaatttcgtgccagccaccgcggtcacacgattaacccaagtcaatagaagccggcgtaaagagtgttttagatcaccccctccccaataaagctaaaactcacctgagttgtaaaaaactccagttgacacaaaatagactacgaaagtggctttaacatatctgaacacacaatagctaagacccaaactgggattagataccccactatgcttagccctaaacctcaacagttaaatcaacaaaactgctcgccagaacactacgagccacagcttaaaactcaaaggacctggcggtgcttcatatccctctagaggagcctgttctgtaatcgataaaccccgatcaacctcaccacctcttgctcagcctatataccgccatcttcagcaaaccctgatgaaggctacaaagtaagcgcaagtacccacgtaaagacgttaggtcaaggtgtagcccatgaggtggcaagaaatgggctacattttctaccccagaaaactacgatagcccttatgaaacttaagggtcgaaggtggatttagcagtaaactgagagtagagtgcttagttgaacagggccctgaagcgcgtacacaccgcccgtcaccctcctcaagtatacttcaaaggacatttaactaaaacccctacgcatttatatagaggagacaagtcgtaacatggtaagtgtactggaaagtgcacttggacgaaccagagtgtagcttaacacaaagcacccaacttacacttaggagatttcaacttaacttgaccgctctgagctaaacctagccccaaacccactccaccttactaccagacaaccttagccaaaccatttacccaaataaagtataggcgatagaaattgaaacctggcgcaatagatatagtaccgcaagggaaagatgaaaaattataaccaagcataatatagcaaggactaacccctataccttctgcataatgaattaactagaaataactttgcaaggagagccaaagctaagacccccgaaaccagacgagctacctaagaacagctaaaagagcacacccgtctatgtagcaaaatagtgggaagatttataggtagaggcgacaaacctaccgagcctggtgatagctggttgtccaagatagaatcttagttcaactttaaatttgcccacagaaccctctaaatccccttgtaaatttaactgttagtccaaagaggaacagctctttggacactaggaaaaaaccttgtagagagagtaaaaaatttaacacccatagtaggcctaaaagcagccaccaattaagaaagcgttcaagctcaacacccactacctaaaaaatcccaaacatataactgaactcctcacacccaattggaccaatctatcaccctatagaagaactaatgttagtataagtaacatgaaaacattctcctccgcataagcctgcgtcagattaaaacactgaactgacaattaacagcccaatatctacaatcaaccaacaagtcattattaccctcactgtcaacccaacacaggcatgctcataaggaaaggttaaaaaaagtaaaaggaactcggcaaatcttaccccgcctgtttaccaaaaacatcacctctagcatcaccagtattagaggcaccgcctgcccagtgacacatgtttaacggccgcggtaccctaaccgtgcaaaggtagcataatcacttgttccttaaatagggacctgtatgaatggctccacgagggttcagctgtctcttacttttaaccagtgaaattgacctgcccgtgaagaggcgggcatgacacagcaagacgagaagaccctatggagctttaatttattaatgcaaacagtacctaacaaacccacaggtcctaaactaccaaacctgcattaaaaatttcggttggggcgacctcggagcagaacccaacctccgagcagtacatgctaagacttcaccagtcaaagcgaactactatactcaattgatccaataacttgaccaacggaacaagttaccctagggataacagcgcaatcctattctagagtccatatcaacaatagggtttacgacctcgatgttggatcaggacatcccaatggtgcagccgctattaaaggttcgtttgttcaacgattaaagtcctacgtgatctgagttcagaccggagtaatccaggtcggtttctatctacnttcaaattcctccctgtacgaaaggacaagagaaataaggcctacttcacaaagcgccttcccccgtaaatgatatcatctcaacttagtattatacccacacccacccaagaacagggtttgttaagatggcagagcccggtaatcgcataaaacttaaaactttacagtcagaggttcaattcctcttcttaacaacatacccatggccaacctcctactcctcattgtacccattctaatcgcaatggcattcctaatgcttaccgaacgaaaaattctaggctatatacaactacgcaaaggccccaacgttgtaggcccctacgggctactacaacccttcgctgacgccataaaactcttcaccaaagagcccctaaaacccgccacatctaccatcaccctctacatcaccgccccgaccttagctctcaccatcgctcttctactatgaacccccctccccatacccaaccccctggtcaacctcaacctaggcctcctatttattctagccacctctagcctagccgtttactcaatcctctgatcagggtgagcatcaaactcaaactacgccctgatcggcgcactgcgagcagtagcccaaacaatctcatatgaagtcaccctagccatcattctactatcaacattactaataagtggctcctttaacctctccacccttatcacaacacaagaacacctctgattactcctgccatcatgacccttggccataatatgatttatctccacactagcagagaccaaccgaacccccttcgaccttgccgaaggggagtccgaactagtctcaggcttcaacatcgaatacgccgcaggccccttcgccctattcttcatagccgaatacacaaacattattataataaacaccctcaccactacaatcttcctaggaacaacatatgacgcactctcccctgaactctacacaacatattttgtcaccaagaccctacttctaacctccctgttcttatgaattcgaacagcatacccccgattccgctacgaccaactcatacacctcctatgaaaaaacttcctaccactcaccctagcattacttatatgacatgtctccatacccattacaatctccagcattccccctcaaacctaagaaatatgtctgataaaagagttactttgatagagtaaataataggagcttaaacccccttatttctaggactatgagaatcgaacccatccctgagaatccaaaattctccgtgccacctatcacaccccatcctaaagtaaggtcagctaaataagctatcgggcccataccccgaaaatgttggttatacccttcccgtactaattaatcccctggcccaacccgtcatctactctaccatctttgcaggcacactcatcacagcgctaagctcgcactgattttttacctgagtaggcctagaaataaacatgctagcttttattccagttctaaccaaaaaaataaaccctcgttccacagaagctgccatcaagtatttcctcacgcaagcaaccgcatccataatccttctaatagctatcctcttcaacaatatactctccggacaatgaaccataaccaatactaccaatcaatactcatcattaataatcataatggctatagcaataaaactaggaatagccccctttcacttctgagtcccagaggttacccaaggcacccctctgacatccggcctgcttcttctcacatgacaaaaactagcccccatctcaatcatataccaaatctctccctcactaaacgtaagccttctcctcactctctcaatcttatccatcatagcaggcagttgaggtggattaaaccaaacccagctacgcaaaatcttagcatactcctcaattacccacataggatgaataatagcagttctaccgtacaaccctaacataaccattcttaatttaactatttatattatcctaactactaccgcattcctactactcaacttaaactccagcaccacgaccctactactatctcgcacctgaaacaagctaacatgactaacacccttaattccatccaccctcctctccctaggaggcctgcccccgctaaccggctttttgcccaaatgggccattatcgaagaattcacaaaaaacaatagcctcatcatccccaccatcatagccaccatcaccctccttaacctctacttctacctacgcctaatctactccacctcaatcacactactccccatatctaacaacgtaaaaataaaatgacagtttgaacatacaaaacccaccccattcctccccacactcatcgcccttaccacgctactcctacctatctccccttttatactaataatcttatagaaatttaggttaaatacagaccaagagccttcaaagccctcagtaagttgcaatacttaatttctgtaacagctaaggactgcaaaaccccactctgcatcaactgaacgcaaatcagccactttaattaagctaagcccttactagaccaatgggacttaaacccacaaacacttagttaacagctaagcaccctaatcaactggcttcaatctacttctcccgccgccgggaaaaaaggcgggagaagccccggcaggtttgaagctgcttcttcgaatttgcaattcaatatgaaaatcacctcggagctggtaaaaagaggcctaacccctgtctttagatttacagtccaatgcttcactcagccattttacctcacccccactgatgttcgccgaccgttgactattctctacaaaccacaaagacattggaacactatacctattattcggcgcatgagctggagtcctaggcacagctctaagcctccttattcgagccgagctgggccagccaggcaaccttctaggtaacgaccacatctacaacgttatcgtcacagcccatgcatttgtaataatcttcttcatagtaatacccatcataatcggaggctttggcaactgactagttcccctaataatcggtgcccccgatatggcgtttccccgcataaacaacataagcttctgactcttacctccctctctcctactcctgctcgcatctgctatagtggaggccggagcaggaacaggttgaacagtctaccctcccttagcagggaactactcccaccctggagcctccgtagacctaaccatcttctccttacacctagcaggtgtctcctctatcttaggggccatcaatttcatcacaacaattatcaatataaaaccccctgccataacccaataccaaacgcccctcttcgtctgatccgtcctaatcacagcagtcctacttctcctatctctcccagtcctagctgctggcatcactatactactaacagaccgcaacctcaacaccaccttcttcgaccccgccggaggaggagaccccattctataccaacacctattctgatttttcggtcaccctgaagtttatattcttatcctaccaggcttcggaataatctcccatattgtaacttactactccggaaaaaaagaaccatttggatacataggtatggtctgagctatgatatcaattggcttcctagggtttatcgtgtgagcacaccatatatttacagtaggaatagacgtagacacacgagcatatttcacctccgctaccataatcatcgctatccccaccggcgtcaaagtatttagctgactcgccacactccacggaagcaatatgaaatgatctgctgcagtgctctgagccctaggattcatctttcttttcaccgtaggtggcctgactggcattgtattagcaaactcatcactagacatcgtactacacgacacgtactacgttgtagctcacttccactatgtcctatcaataggagctgtatttgccatcataggaggcttcattcactgatttcccctattctcaggctacaccctagaccaaacctacgccaaaatccatttcactatcatattcatcggcgtaaatctaactttcttcccacaacactttctcggcctatccggaatgccccgacgttactcggactaccccgatgcatacaccacatgaaacatcctatcatctgtaggctcattcatttctctaacagcagtaatattaataattttcatgatttgagaagccttcgcttcgaagcgaaaagtcctaatagtagaagaaccctccataaacctggagtgactatatggatgccccccaccctaccacacattcgaagaacccgtatacataaaatctagacaaaaaaggaaggaatcgaaccccccaaagctggtttcaagccaaccccatggcctccatgactttttcaaaaaggtattagaaaaaccatttcataactttgtcaaagttaaattataggctaaatcctatatatcttaatggcacatgcagcgcaagtaggtctacaagacgctacttcccctatcatagaagagcttatcacctttcatgatcacgccctcataatcattttccttatctgcttcctagtcctgtatgcccttttcctaacactcacaacaaaactaactaatactaacatctcagacgctcaggaaatagaaaccgtctgaactatcctgcccgccatcatcctagtcctcatcgccctcccatccctacgcatcctttacataacagacgaggtcaacgatccctcccttaccatcaaatcaattggccaccaatggtactgaacctacgagtacaccgactacggcggactaatcttcaactcctacatacttcccccattattcctagaaccaggcgacctgcgactccttgacgttgacaatcgagtagtactcccgattgaagcccccattcgtataataattacatcacaagacgtcttgcactcatgagctgtccccacattaggcttaaaaacagatgcaattcccggacgtctaaaccaaaccactttcaccgctacacgaccgggggtatactacggtcaatgctctgaaatctgtggagcaaaccacagtttcatgcccatcgtcctagaattaattcccctaaaaatctttgaaatagggcccgtatttaccctatagcaccccctctaccccctctagagcccactgtaaagctaacttagcattaaccttttaagttaaagattaagagaaccaacacctctttacagtgaaatgccccaactaaatactaccgtatggcccaccataattacccccatactccttacactattcctcatcacccaactaaaaatattaaacacaaactaccacctacctccctcaccaaagcccataaaaataaaaaattataacaaaccctgagaaccaaaatgaacgaaaatctgttcgcttcattcattgcccccacaatcctaggcctacccgccgcagtactgatcattctatttccccctctattgatccccacctccaaatatctcatcaacaaccgactaatcaccacccaacgatgactaatcaaactaacctcaaaacaaatgataaccatacacaacactaaaggacgaacctgatctcttatactagtatccttaatcatttttattgccacaactaacctcctcggactcctgcctcactcatttacaccaaccacccaactatctataaacctagccatggccatccccttatgagcgggcgcagtgattataggctttcgctctaagattaaaaatgccctagcccacttcttaccacaaggcacacctacaccccttatccccatactagttattatcgaaaccatcagcctactcattcaaccaatagccctggccgtacgcctaaccgctaacattactgcaggccacctactcatgcacctaattggaggcgccaccctagcaatatcaaccattaaccttccctctacacttatcatcttcacaattctaattctactgactatcctagaaatcgctgtcgccttaatccaagcctacgttttcacacttctagtaagcctctacctgcacgacaacacataatgacccaccaatcacatgcctatcatatagtaaaacccagcccatgacccctaacaggggccctctcagccctcctaatgacctccggcctagccatgtgatttcacttccactccataacgctcctcatactaggcctactaaccaacacactaaccatataccaatgatggcgcgatgtaacacgagaaagcacataccaaggccaccacacaccacctgtccaaaaaggccttcgatacgggataatcctatttattacctcagaagtttttttcttcgcaggatttttctgagccttttaccactccagcctagcccctaccccccaattaggagggcactggcccccaacaggcatcaccccgctaaatcccctagaagtcccactcctaaacacatccgtattactcgcatcaggagtatcaatcacctgagctcaccatagtctaatagaaaacaaccgaaaccaaataattcaagcactgcttattacaattttactgggtctctattttaccctcctacaagcctcagagtacttcgagtctcccttcaccatttccgacggcatctacggctcaacattttttgtagccacaggcttccacggacttcacgtcattattggctcaactttcctcactatctgcttcatccgccaactaatatttcactttacatccaaacatcactttggcttcgaagccgccgcctgatactggcattttgtagatgtggtttgactatttctgtatgtctccatctattgatgagggtcttactcttttagtataaatagtaccgttaacttccaattaactagttttgacaacattcaaaaaagagtaataaacttcgccttaattttaataaccaacaccctcctagccttactactaataattattacattttgactaccacaactcaacggctacatagaaaaatccaccccttacgagtgcggcttcgaccctatatcccccgcccgcgtccctttctccataaaattcttcttagtagctattaccttcttattatttgatctagaaattgccctccttttacccctaccatgagccctacaaacaactaacctgccactaatagttatgtcatccctcttattaatcatcatcctagccctaagtctggcctatgagtgactacaaaaaggattagactgaaccgaattggtatatagtttaaacaaaacgaatgatttcgactcattaaattatgataatcatatttaccaaatgcccctcatttacataaatattatactagcatttaccatctcacttctaggaatactagtatatcgctcacacctcatatcctccctactatgcctagaaggaataatactatcgctgttcattatagctactctcataaccctcaacacccactccctcttagccaatattgtgcctattgccatactagtctttgccgcctgcgaagcagcggtgggcctagccctactagtctcaatctccaacacatatggcctagactacgtacataacctaaacctactccaatgctaaaactaatcgtcccaacaattatattactaccactgacatgactttccaaaaaacacataatttgaatcaacacaaccacccacagcctaattattagcatcatccctctactattttttaaccaaatcaacaacaacctatttagctgttccccaaccttttcctccgaccccctaacaacccccctcctaatactaactacctgactcctacccctcacaatcatggcaagccaacgccacttatccagtgaaccactatcacgaaaaaaactctacctctctatactaatctccctacaaatctccttaattataacattcacagccacagaactaatcatattttatatcttcttcgaaaccacacttatccccaccttggctatcatcacccgatgaggcaaccagccagaacgcctgaacgcaggcacatacttcctattctacaccctagtaggctcccttcccctactcatcgcactgatttacactcacaacaccctaggctcactaaacattctactactcactctcactgcccaagaactatcaaactcctgagccaacaacttaatatgactagcttacacaatagcttttatagtaaagatacctctttacggactccacttatgactccctaaagcccatgtcgaagcccccatcgctgggtcaatagtacttgccgcagtactcttaaaactaggcggctatggtataatacgcctcacactcattctcaaccccctgacaaaacacatagcctaccccttccttgtactatccctatgaggcataattataacaagctccatctgcctacgacaaacagacctaaaatcgctcattgcatactcttcaatcagccacatagccctcgtagtaacagccattctcatccaaaccccctgaagcttcaccggcgcagtcattctcataatcgcccacggacttacatcctcattactattctgcctagcaaactcaaactacgaacgcactcacagtcgcatcataatcctctctcaaggacttcaaactctactcccactaatagctttttgatgacttctagcaagcctcgctaacctcgccttaccccccactattaacctactgggagaactctctgtgctagtaaccacgttctcctgatcaaatatcactctcctacttacaggactcaacatactagtcacagccctatactccctctacatatttaccacaacacaatggggctcactcacccaccacattaacaacataaaaccctcattcacacgagaaaacaccctcatgttcatacacctatcccccattctcctcctatccctcaaccccgacatcattaccgggttttcctcttgtaaatatagtttaaccaaaacatcagattgtgaatctgacaacagaggcttacgaccccttatttaccgagaaagctcacaagaactgctaactcatgcccccatgtctaacaacatggctttctcaacttttaaaggataacagctatccattggtcttaggccccaaaaattttggtgcaactccaaataaaagtaataaccatgcacactactataaccaccctaaccctgacttccctaattccccccatccttaccaccctcgttaaccctaacaaaaaaaactcatacccccattatgtaaaatccattgtcgcatccacctttattatcagtctcttccccacaacaatattcatgtgcctagaccaagaagttattatctcgaactgacactgagccacaacccaaacaacccagctctccctaagcttcaaactagactacttctccataatattcatccctgtggcattgttcgttacatggtccatcatagaattctcactgtgatatataaactcagacccaaacattaatcagttcttcaaatatctactcatcttcctaattaccatactaatcttagttaccgctaacaacctattccaactgttcatcggctgagagggcgtaggaattatatccttcttgctcatcagttgatgatacgcccgagcagatgccaacacagcagccattcaagcaatcctatacaaccgtatcggcgatatcggtttcatcctcgccttagcatgatttatcctacactccaactcatgagacccacaacaaatagcccttctaaacgctaatccaagcctcaccccactactaggcctcctcctagcagcagcaggcaaatcagcccaattaggtctccacccctgactcccctcagccatagaaggccccaccccagtctcagccctactccactcaagcactatagttgtagcaggaatcttcttactcatccgcttccaccccctagcagaaaatagcccactaatccaaactctaacactatgcttaggcgctatcaccactctgttcgcagcagtctgcgcccttacacaaaatgacatcaaaaaaatcgtagccttctccacttcaagtcaactaggactcataatagttacaatcggcatcaaccaaccacacctagcattcctgcacatctgtacccacgccttcttcaaagccatactatttatgtgctccgggtccatcatccacaaccttaacaatgaacaagatattcgaaaaataggaggactactcaaaaccatacctctcacttcaacctccctcaccattggcagcctagcattagcaggaatacctttcctcacaggtttctactccaaagaccacatcatcgaaaccgcaaacatatcatacacaaacgcctgagccctatctattactctcatcgctacctccctgacaagcgcctatagcactcgaataattcttctcaccctaacaggtcaacctcgcttccccacccttactaacattaacgaaaataaccccaccctactaaaccccattaaacgcctgacagccggaagcctattcgcaggatttctcattactaacaacatttcccccgcatcccccttccaaacaacaatccccctctacctaaaactcacagccctcgctgtcactttcctaggacttctaacagccctagacctcaactacctaaccaacaaacttaaaataaaatccccactatgcacattttatttctccaacatactcggattctaccctagcatcacacaccgcacaatcccctatctaggccttcttacgagccaaaacctgcccctactcctcctagacctaacctgactagaaaagctattacctaaaacaatttcacagcaccaaatctccacctccatcatcacctcaacccaaaaaggcataattaaactttacttcctctctttcttcttcccactcatcctaaccctactcctaatcacataacctattcccccgagcaatctcaattacaatatatacaccaacaaacaatgttcaaccagtaactactactaatcaacgcccataatcatacaaagcccccgcaccaataggatcctcccgaatcaaccctgacccctctccttcataaattattcagcttcctacactattaaagtttaccacaaccaccaccccatcatactctttcacccacagcaccaatcctacctccatcgctaaccccactaaaacactcaccaagacctcaacccctgacccccatgcctcaggatactcctcaatagccatcgctgtagtatatccaaagacaaccatcattccccctaaataaattaaaaaaactattaaacccatataacctcccccaaaattcagaataataacacacccgaccacaccgctaacaatcaatactaaacccccataaataggagaaggcttagaagaaaaccccacaaaccccattactaaacccacactcaacagaaacaaagcatacatcattattctcgcacggactacaaccacgaccaatgatatgaaaaaccatcgttgtatttcaactacaagaacaccaatgatcccaatacgcaaaattaaccccctaataaaattaattaaccactcactcatcgacctccccaccccatccaacatctccgcatgatgaaacttcggctcactccttggcgcctgcctgatcctccaaatcaccacaggactattcctagccatgcactactcaccagacgcctcaaccgccttttcatcaatcgcccacatcactcgagacgtaaattatggctgaatcatccgctaccttcacgccaatggcgcctcaatattctttatctgcctcttcctacacatcgggcgaggcctatattacggatcatttctctactcagaaacctgaaacatcggcattatcctcctgcttgcaactatagcaacagccttcataggctatgtcctcccgtgaggccaaatatcattctgaggggccacagtaattacaaacttactatccgccatcccatacattgggacagacctagttcaatgaatctgaggaggctactcagtagacagtcccaccctcacacgattctttacctttcacttcatcttgcccttcattattgcagccctagcagcactccacctcctattcttgcacgaaacgggatcaaacaaccccctaggaatcacctcccattccgataaaatcaccttccacccttactacacaatcaaagacgccctcggcttacttctcttcattctctccttaatgacattaacactattctcaccagacctcctaggcgacccagacaattataccctagccaaccccttaaacacccctccccacatcaagcccgaatgatatttcctattcgcctacacaattctccgatccgtccctaacaaactaggaggcgtccttgccctattactatccatcctcatcctagcaataatccccatcctccatatatccaaacaacaaagcataatatttcgcccactaagccaatcactttattgactcctagccgcagacctcctcattctaacctgaatcggaggacaaccagtaagctacccttttaccatcattggacaagtagcatccgtactatacttcacaacaatcctaatcctaataccaactatctccctaattgaaaacaaaatactcaaatgggcctgtccttgtagtataaactaatacaccagtcttgtaaaccggagatgaaaacctttttccaaggacaaatcagagaaaaagtctttaactccaccattagcacccaaagctaagattctaatttaaactattctctgttctttcatggggaagcagatttgggtaccacccaagtattgacttacccatcaacaaccgctatgtatttcgtacattactgccagccaccatgaatattgcacggtaccataaatacttgaccacctgtagtacataaaaacccaatccacatcaaaaccccccccccatgcttacaagcaagtacagcaatcaaccctcaactatcacacatcaactgcaactccaaagccacccctcgcccactaggataccaacaaacctacccacccttaacagtacatagtacataaaaccatttaccgtacatagcacattacagtcaaatcccttctcgtccccatggatgacccccctcagataggggtcccttgaccaccatcctccgtgaaatcaatatcccgcacaagagtgctactctcctcgctccgggcccataacacttgggggtagctaaagtgaactgtatccgacatctggttcctacttcagggtcataaagcctaaatagcccacacgttccccttaaataagacatcacgatg

SEQ ID NO: 555 - DNA, 16575 bp, Homo sapiens mitochondrial
  3113: "n" refers to a nucleotide at position 3107 of the Cambridge Reference Sequence (CRS, Anderson et al. 1981 Nature 290:457-465), later determined to be absent from the human mtDNA sequence according to the revised CRS (rCRS, Andrews et al. 1999 Nature Genetics 23:147); "n" therefore represents a single nucleotide deletion at a position corresponding to nucleotide 3107 of SEQ ID NO:1 as provided herein.
gatcacaggtctatcaccctattaaccactcacgggagctctccatgcatttggtattttcgtctggggggtatgcacgcgatagcattgcgagacgctggagccggagcaccctatgtcgcagtatctgtctttgattcctgcctcatcctattatttatcgcacctacgttcaatattacaggcgaacatacttactaaagtgtgttaattaattaatgcttgtaggacataataataacaattgaatgtctgcacagccgctttccacacagacatcataacaaaaaatttccaccaaaccccccctcccccccgcttctggccacagcacttaaacacatctctgccaaaccccaaaaacaaagaaccctaacaccagcctaaccagatttcaaattttatcttttggcggtatgcacttttaacagtcaccccccaactaacacattattttcccctcccactcccatactactaatctcatcaatacaacccccgcccatcctacccagcacacacacaccgctgctaaccccataccccgaaccaaccaaaccccaaagacaccccccacccccagtttatgtagcttacctcctcaaagcaatacactgaaaatgtttagacgggctcacatcaccccataaacaaataggtttggtcctagcctttctattagctcttagtaagattacacatgcaagcatccccgttccagtgagttcaccctctaaatcaccacgatcaaaagggacaagcatcaagcacgcagcaatgcagctcaaaacgcttagcctagccacacccccacgggaaacagcagtgattaacctttagcaataaacgaaagtttaactaagctatactaaccccagggttggtcaatttcgtgccagccaccgcggtcacacgattaacccaagtcaatagaagccggcgtaaagagtgttttagatcaccccctccccaataaagctaaaactcacctgagttgtaaaaaactccagttgacacaaaatagactacgaaagtggctttaacatatctgaacacacaatagctaagacccaaactgggattagataccccactatgcttagccctaaacctcaacagttaaatcaacaaaactgctcgccagaacactacgagccacagcttaaaactcaaaggacctggcggtgcttcatatccctctagaggagcctgttctgtaatcgataaaccccgatcaacctcaccacctcttgctcagcctatataccgccatcttcagcaaaccctgatgaaggctacaaagtaagcgcaagtacccacgtaaagacgttaggtcaaggtgtagcccatgaggtggcaagaaatgggctacattttctaccccagaaaactacgatagcccttatgaaacttaagggtcgaaggtggatttagcagtaaactgagagtagagtgcttagttgaacagggccctgaagcgcgtacacaccgcccgtcaccctcctcaagtatacttcaaaggacatttaactaaaacccctacgcatttatatagaggagacaagtcgtaacatggtaagtgtactggaaagtgcacttggacgaaccagagtgtagcttaacacaaagcacccaacttacacttaggagatttcaacttaacttgaccgctctgagctaaacctagccccaaacccactccaccttactaccagacaaccttagccaaaccatttacccaaataaagtataggcgatagaaattgaaacctggcgcaatagatatagtaccgcaagggaaagatgaaaaattataaccaagcataatatagcaaggactaacccctataccttctgcataatgaattaactagaaataactttgcaaggagagccaaagctaagacccccgaaaccagacgagctacctaagaacagctaaaagagcacacccgtctatgtagcaaaatagtgggaagatttataggtagaggcgacaaacctaccgagcctggtgatagctggttgtccaagatagaatcttagttcaactttaaatttgcccacagaaccctctaaatccccttgtaaatttaactgttagtccaaagaggaacagctctttggacactaggaaaaaaccttgtagagagagtaaaaaatttaacacccatagtaggcctaaaagcagccaccaattaagaaagcgttcaagctcaacacccactacctaaaaaatcccaaacatataactgaactcctcacacccaattggaccaatctatcaccctatagaagaactaatgttagtataagtaacatgaaaacattctcctccgcataagcctgcgtcagattaaaacactgaactgacaattaacagcccaatatctacaatcaaccaacaagtcattattaccctcactgtcaacccaacacaggcatgctcataaggaaaggttaaaaaaagtaaaaggaactcggcaaatcttaccccgcctgtttaccaaaaacatcacctctagcatcaccagtattagaggcaccgcctgcccagtgacacatgtttaacggccgcggtaccctaaccgtgcaaaggtagcataatcacttgttccttaaatagggacctgtatgaatggctccacgagggttcagctgtctcttacttttaaccagtgaaattgacctgcccgtgaagaggcgggcataacacagcaagacgagaagaccctatggagctttaatttattaatgcaaacagtacctaacaaacccacaggtcctaaactaccaaacctgcattaaaaatttcggttggggcgacctcggagcagaacccaacctccgagcagtacatgctaagacttcaccagtcaaagcgaactactatactcaattgatccaataacttgaccaacggaacaagttaccctagggataacagcgcaatcctattctagagtccatatcaacaatagggtttacgacctcgatgttggatcaggacatcccgatggtgcagccgctattaaaggttcgtttgttcaacgattaaagtcctacgtgatctgagttcagaccggagtaatccaggtcggtttctatctacnttcaaattcctccctgtacgaaaggacaagagaaataaggcctacttcacaaagcgccttcccccgtaaatgatatcatctcaacttagtattatacccacacccacccaagaacagggtttgttaagatggcagagcccggtaatcgcataaaacttaaaactttacagtcagaggttcaattcctcttcttaacaacatacccatggccaacctcctactcctcattgtacccattctaatcgcaatggcattcctaatgcttaccgaacgaaaaattctaggctatatacaactacgcaaaggccccaacgttgtaggcccctacgggctactacaacccttcgctgacgccataaaactcttcaccaaagagcccctaaaacccgccacatctaccatcaccctctacatcaccgccccgaccttagctctcaccatcgctcttctactatgaacccccctccccatacccaaccccctggtcaacctcaacctaggcctcctatttattctagccacctctagcctagccgtttactcaatcctctgatcagggtgagcatcaaactcaaactacgccctgatcggcgcactgcgagcagtagcccaaacaatctcatatgaagtcaccctagccatcattctactatcaacattactaataagtggctcctttaacctctccacccttatcacaacacaagaacacctctgattactcctgccatcatgacccttggccataatatgatttatctccacactagcagagaccaaccgaacccccttcgaccttgccgaaggggagtccgaactagtctcaggcttcaacatcgaatacgccgcaggccccttcgccctattcttcatagccgaatacacaaacattattataataaacaccctcaccactacaatcttcctaggaacaacatatgacgcactctcccctgaactctacacaacatattttgtcaccaagaccctacttctaacctccctgttcttatgaattcgaacagcatacccccgattccgctacgaccaactcatacacctcctatgaaaaaacttcctaccactcaccctagcattacttatatgatatgtctccatacccattacaatctccagcattccccctcaaacctaagaaatatgtctgataaaagagttactttgatagagtaaataataggagcttaaacccccttatttctaggactatgagaatcgaacccatccctgagaatccaaaattctccgtgccacctatcacaccccatcctaaagtaaggtcagctaaataagctatcgggcccataccccgaaaatgttggttatacccttcccgtactaattaatcccctggcccaacccgtcatctactctaccatctttgcaggcacactcatcacagcgctaagctcgcactgattttttacctgagtaggcctagaaataaacatgctagcttttattccagttctaaccaaaaaaataaaccctcgttccacagaagctgccatcaagtatttcctcacgcaagcaaccgcatccataatccttctaatagctatcctcttcaacaatatactctccggacaatgaaccataaccaatactaccaatcaatactcatcattaataatcataatggctatagcaataaaactaggaatagccccctttcacttctgagtcccagaggttacccaaggcacccctctgacatccggcctgcttcttctcacatgacaaaaactagcccccatctcaatcatataccaaatctctccctcactaaacgtaagccttctcctcactctctcaatcttatccatcatagcaggcagttgaggtggattaaaccaaacccagctacgcaaaatcttagcatactcctcaattacccacataggatgaataatagcagttctaccgtacaaccctaacataaccattcttaatttaactatttatattatcctaactactaccgcattcctactactcaacttaaactccagcaccacgaccctactactatctcgcacctgaaacaagctaacatgactaacacccttaattccatccaccctcctctccctaggaggcctgcccccgctaaccggctttttgcccaaatgggccattatcgaagaattcacaaaaaacaatagcctcatcatccccaccatcatagccaccatcaccctccttaacctctacttctacctacgcctaatctactccacctcaatcacactactccccatatctaacaacgtaaaaataaaatgacagtttgaacatacaaaacccaccccattcctccccacactcatcgcccttaccacgctactcctacctatctccccttttatactaataatcttatagaaatttaggttaaatacagaccaagagccttcaaagccctcagtaagttgcaatacttaatttctgtaacagctaaggactgcaaaaccccactctgcatcaactgaacgcaaatcagccactttaattaagctaagcccttactagaccaatgggacttaaacccacaaacacttagttaacagctaagcaccctaatcaactggcttcaatctacttctcccgccgccgggaaaaaaggcgggagaagccccggcaggtttgaagctgcttcttcgaatttgcaattcaatatgaaaatcacctcggagctggtaaaaagaggcctaacccctgtctttagatttacagtccaatgcttcactcagccattttacctcacccccactgatgttcgccgaccgttgactattctctacaaaccacaaagacattggaacactatacctattattcggcgcatgagctggagtcctaggcacagctctaagcctccttattcgagccgagctgggccagccaggcaaccttctaggtaacgaccacatctacaacgttatcgtcacagcccatgcatttgtaataatcttcttcatagtaatacccatcataatcggaggctttggcaactgactagttcccctaataatcggtgcccccgatatggcgtttccccgcataaacaacataagcttctgactcttacctccctctctcctactcctgctcgcatctgctatagtggaggccggagcaggaacaggttgaacagtctaccctcccttagcagggaactactcccaccctggagcctccgtagacctaaccatcttctccttacacctagcaggtgtctcctctatcttaggggccatcaatttcatcacaacaattatcaatataaaaccccctgccataacccaataccaaacgcccctcttcgtctgatccgtcctaatcacagcagtcctacttctcctatctctcccagtcctagctgctggcatcactatactactaacagaccgcaacctcaacaccaccttcttcgaccccgccggaggaggagaccccattctataccaacacctattctgatttttcggtcaccctgaagtttatattcttatcctaccaggcttcggaataatctcccatattgtaacttactactccggaaaaaaagaaccatttggatacataggtatggtctgagctatgatatcaattggcttcctagggtttatcgtgtgagcacaccatatatttacagtaggaatagacgtagacacacgagcatatttcacctccgctaccataatcatcgctatccccaccggcgtcaaagtatttagctgactcgccacactccacggaagcaatatgaaatgatctgctgcagtgctctgagccctaggattcatctttcttttcaccgtaggtggcctgactggcattgtattagcaaactcatcactagacatcgtactacacgacacgtactacgttgtagcccacttccactatgtcctatcaataggagctgtatttgccatcataggaggcttcattcactgatttcccctattctcaggctacaccctagaccaaacctacgccaaaatccatttcactatcatattcatcggcgtaaatctaactttcttcccacaacactttctcggcctatccggaatgccccgacgttactcggactaccccgatgcatacaccacatgaaacatcctatcatctgtaggctcattcatttctctaacagcagtaatattaataattttcatgatttgagaagccttcgcttcgaagcgaaaagtcctaatagtagaagaaccctccataaacctggagtgactatatggatgccccccaccctaccacacattcgaagaacccgtatacataaaatctagacaaaaaaggaaggaatcgaaccccccaaagctggtttcaagccaaccccatggcctccatgactttttcaaaaaggtattagaaaaaccatttcataactttgtcaaagttaaattataggctaaatcctatatatcttaatggcacatgcagcgcaagtaggtctacaagacgctacttcccctatcatagaagagcttatcacctttcatgatcacgccctcataatcattttccttatctgcttcctagtcctgtatgcccttttcctaacactcacaacaaaactaactaatactaacatctcagacgctcaggaaatagaaaccgtctgaactatcctgcccgccatcatcctagtcctcatcgccctcccatccctacgcatcctttacataacagacgaggtcaacgatccctcccttaccatcaaatcaattggccaccaatggtactgaacctacgagtacaccgactacggcggactaatcttcaactcctacatacttcccccattattcctagaaccaggcgacctgcgactccttgacgttgacaatcgagtagtactcccgattgaagcccccattcgtataataattacatcacaagacgtcttgcactcatgagctgtccccacattaggcttaaaaacagatgcaattcccggacgtctaaaccaaaccactttcaccgctacacgaccgggggtatactacggtcaatgctctgaaatctgtggagcaaaccacagtttcatgcccatcgtcctagaattaattcccctaaaaatctttgaaatagggcccgtatttaccctatagcaccccctctaccccctctagagcccactgtaaagctaacttagcattaaccttttaagttaaagattaagagaaccaacacctctttacagtgaaatgccccaactaaatactaccgtatggcccaccataattacccccatactccttacactattcctcatcacccaactaaaaatattaaacacaaactaccacctacctccctcaccaaagcccataaaaataaaaaattataacaaaccctgagaaccaaaatgaacgaaaatctgttcgcttcattcattgcccccacaatcctaggcctacccgccgcagtactgatcattctatttccccctctattgatccccacctccaaatatctcatcaacaaccgactaatcaccacccaacaatgactaatcaaactaacctcaaaacaaatgataaccatacacaacactaaaggacgaacctgatctcttatactagtatccttaatcatttttattgccacaactaacctcctcggactcctgcctcactcatttacaccaaccacccaactatctataaacctagccatggccatccccttatgagcgggcgcagtgattataggctttcgctctaagattaaaaatgccctagcccacttcttaccacaaggcacacctacaccccttatccccatactagttattatcgaaaccatcagcctactcattcaaccaatagccctggccgtacgcctaaccgctaacattactgcaggccacctactcatgcacctaattggaagcgccaccctagcaatatcaaccattaaccttccctctacacttatcatcttcacaattctaattctactgactatcctagaaatcgctgtcgccttaatccaagcctacgttttcacacttctagtaagcctctacctgcacgacaacacataatgacccaccaatcacatgcctatcatatagtaaaacccagcccatgacccctaacaggggccctctcagccctcctaatgacctccggcctagccatgtgatttcacttccactccataacgctcctcatactaggcctactaaccaacacactaaccatataccaatgatggcgcgatgtaacacgagaaagcacataccaaggccaccacacaccacctgtccaaaaaggccttcgatacgggataatcctatttattacctcagaagtttttttcttcgcaggatttttctgagccttttaccactccagcctagcccctaccccccaattaggagggcactggcccccaacaggcatcaccccgctaaatcccctagaagtcccactcctaaacacatccgtattactcgcatcaggagtatcaatcacctgagctcaccatagtctaatagaaaacaaccgaaaccaaataattcaagcactgcttattacaattttactgggtctctattttaccctcctacaagcctcagagtacttcgagtctcccttcaccatttccgacggcatctacggctcaacattttttgtagccacaggcttccacggacttcacgtcattattggctcaactttcctcactatctgcttcatccgccaactaatatttcactttacatccaaacatcactttggcttcgaagccgccgcctgatactggcattttgtagatgtggtttgactatttctgtatgtctccatctattgatgagggtcttactcttttagtataaatagtaccgttaacttccaattaactagttttgacaacattcaaaaaagagtaataaacttcgccttaattttaataatcaacaccctcctagccttactactaataattattacattttgactaccacaactcaacggctacatagaaaaatccaccccttacgagtgcggcttcgaccctatatcccccgcccgcgtccctttctccataaaattcttcttagtagctattaccttcttattatttgatctagaaattgccctccttttacccctaccatgagccctacaaacaactaacctgccactaatagttatgtcatccctcttattaatcatcatcctagccctaagtctggcctatgagtgactacaaaaaggattagactgaaccgaattggtatatagtttaaacaaaacgaatgatttcgactcattaaattatgataatcatatttaccaaatgcccctcatttacataaatattatactagcatttaccatctcacttctaggaatactagtatatcgctcacacctcatatcctccctactatgcctagaaggaataatactatcgctgttcattatagctactctcataaccctcaacacccactccctcttagccaatattgtgcctattgccatactagtctttgccgcctgcgaagcagcggtgggcctagccctactagtctcaatctccaacacatatggcctagactacgtacataacctaaacctactccaatgctaaaactaatcgtcccaacaattatattactaccactgacatgactttccaaaaaacacataatttgaatcaacacaaccacccacagcctaattattagcatcatccctctactattttttaaccaaatcaacaacaacctatttagctgttccccaaccttttcctccgaccccctaacaacccccctcctaatactaactacctgactcctacccctcacaatcatggcaagccaacgccacttatccagtgaaccactatcacgaaaaaaactctacctctctatactaatctccctacaaatctccttaattataacattcacagccacagaactaatcatattttatatcttcttcgaaaccacacttatccccaccttggctatcatcacccgatgaggcaaccagccagaacgcctgaacgcaggcacatacttcctattctacaccctagtaggctcccttcccctactcatcgcactaatttacactcacaacaccctaggctcactaaacattctactactcactctcactgcccaagaactatcaaactcctgagccaacaacttaatatgactagcttacacaatagcttttatagtaaagatacctctttacggactccacttatgactccctaaagcccatgtcgaagcccccatcgctgggtcaatagtacttgccgcagtactcttaaaactaggcggctatggtataatacgcctcacactcattctcaaccccctgacaaaacacatagcctaccccttccttgtactatccctatggggcataattataacaagctccatctgcctacgacaaacagacctaaaatcgctcattgcatactcttcaatcagccacatagccctcgtagtaacagccattctcatccaaaccccctgaagcttcaccggcgcagtcattctcataatcgcccacgggcttacatcctcattactattctgcctagcaaactcaaactacgaacgcactcacagtcgcatcataatcctctctcaaggacttcaaactctactcccactaatagctttttgatgacttctagcaagcctcgctaacctcgccttaccccccactattaacctactgggagaactctctgtgctagtaaccacgttctcctgatcaaatatcactctcctacttacaggactcaacatactagtcacagccctatactccctctacatatttaccacaacacaatggggctcactcacccaccacattaacaacataaaaccctcattcacacgagaaaacaccctcatgttcatacacctatcccccattctcctcctatccctcaaccccgacatcattaccgggttttcctcttgtaaatatagtttaaccaaaacatcagattgtgaatctgacaacagaggcttacgaccccttatttaccgagaaagctcacaagaactgctaactcatgcccccatgtctaacaacatggctttctcaacttttaaaggataacagctatccattggtcttaggccccaaaaattttggtgcaactccaaataaaagtaataaccatgcacactactataaccaccctaaccctgacttccctaattccccccatccttaccaccctcgttaaccctaacaaaaaaaactcatacccccattatgtaaaatccattgtcgcatccacctttattatcagtctcttccccacaacaatattcatgtgcctagaccaagaagttattatctcgaactgacactgagccacaacccaaacaacccagctctccctaagcttcaaactagactacttctccataatattcatccctgtagcattgttcgttacatggtccatcatagaattctcactgtgatatataaactcagacccaaacattaatcagttcttcaaatatctactcatcttcctaattaccatactaatcttagttaccgctaacaacctattccaactgttcatcggctgagagggcgtaggaattatatccttcttgctcatcagttgatgatacgcccgagcagatgccaacacagcagccattcaagcaatcctatacaaccgtatcggcgatatcggtttcatcctcgccttagcatgatttatcctacactccaactcatgagacccacaacaaatagcccttctaaacgctaatccaagcctcaccccactactaggcctcctcctagcagcagcaggcaaatcagcccaattaggtctccacccctgactcccctcagccatagaaggccccaccccagtctcagccctactccactcaagcactatagttgtagcaggaatcttcttactcatccgcttccaccccctagcagaaaatagcccactaatccaaactctaacactatgcttaggcgctatcaccactctgttcgcagcagtctgcgcccttacacaaaatgacatcaaaaaaatcgtagccttctccacttcaagtcaactaggactcataatagttacaatcggcatcaaccaaccacacctagcattcctgcacatctgtacccacgccttcttcaaagccatactatttatgtgctccgggtccatcatccacaaccttaacaatgaacaagatattcgaaaaataggaggactactcaaaaccatacctctcacttcaacctccctcaccattggcagcctagcattagcaggaatacctttcctcacaggtttctactccaaagaccacatcatcgaaaccgcaaacatatcatacacaaacgcctgagccctatctattactctcatcgctacctccctgacaagcgcctatagcactcgaataattcttctcaccctaacaggtcaacctcgcttccccacccttactaacattaacgaaaataaccccaccctactaaaccccattaaacgcctggcagccggaagcctattcgcaggatttctcattactaacaacatttcccccgcatcccccttccaaacaacaatccccctctacctaaaactcacagccctcgctgtcactttcctaggacttctaacagccctagacctcaactacctaaccaacaaacttaaaataaaatccccactatgcacattttatttctccaacatactcggattctaccctagcatcacacaccgcacaatcccctatctaggccttcttacgagccaaaacctgcccctactcctcctagacctaacctgactagaaaagctattacctaaaacaatttcacagcaccaaatctccacctccatcatcacctcaacccaaaaaggcataattaaactttacttcctctctttcttcttcccactcatcctaaccctactcctaatcacataacctattcccccgagcaatctcaattacaatatatacaccaacaaacaatgttcaaccagtaactactactaatcaacgcccataatcatacaaagcccccgcaccaataggatcctcccgaatcaaccctgacccctctccttcataaattattcagcttcctacactattaaagtttaccacaaccaccaccccatcatactctttcacccacagcaccaatcctacctccatcgctaaccccactaaaacactcaccaagacctcaacccctgacccccatgcctcaggatactcctcaatagccatcgctgtagtatatccaaagacaaccatcattccccctaaataaattaaaaaaactattaaacccatataacctcccccaaaattcagaataataacacacccgaccacaccgctaacaatcaatactaaacccccataaataggagaaggcttagaagaaaaccccacaaaccccattactaaacccacactcaacagaaacaaagcatacatcattattctcgcacggactacaaccacgaccaatgatatgaaaaaccatcgttgtatttcaactacaagaacaccaatgaccccaatacgcaaaactaaccccctaataaaattaattaaccactcattcatcgacctccccaccccatccaacatctccgcatgatgaaacttcggctcactccttggcgcctgcctgatcctccaaatcaccacaggactattcctagccatgcactactcaccagacgcctcaaccgccttttcatcaatcgcccacatcactcgagacgtaaattatggctgaatcatccgctaccttcacgccaatggcgcctcaatattctttatctgcctcttcctacacatcgggcgaggcctatattatggatcatttctctactcagaaacctgaaacatcggcattatcctcctgcttgcaactatagcaacagccttcataggctatgtcctcccgtgaggccaaatatcattctgaggggccacagtaattacaaacttactatccgccatcccatacattgggacagacctagttcaatgaatctgaggaggctactcagtagacagtcccaccctcacacgattctttacctttcacttcatcttgcccttcattattgcagccctagcagcactccacctcctattcttgcacgaaacgggatcaaacaaccccctaggaatcacctcccattccgataaaatcaccttccacccttactacacaatcaaagacgccctcggcttacttctcttccttctctccttaatgacattaacactattctcaccagacctcctaggcgacccagacaattataccctagccaaccccttaaacacccctccccacatcaagcccgaatgatatttcctattcgcctacacaattctccgatccgtccctaacaaactaggaggcgtccttgccctattactatccatcctcatcctagcaataatccccatcctccatatatccaaacaacaaagcataatatttcgcccactaagccaatcactttattgactcctagccgcagacctcctcattctaacctgaatcggaggacaaccagtaagctacccttttaccatcattggacaagtagcatccgtactatacttcacaacaatcctaatcctaataccaactatctccctaattgaaaacaaaatactcaaatgggcctgtccttgtagtataaactaatacaccagtcttgtaaaccggagatgaaaacctttttccaaggacaaatcagagaaaaagtctttaactccaccattagcacccaaagctaagattctaatttaaactattctctgttctttcatggggaagcagatttgggtaccacccaagtattgactcacccatcaacaaccgctatgtatttcgtacattactgccagccaccatgaatattgtacggtaccataaatacttgaccacctgtagtacataaaaacccaatccacgtcaaaaccccctccccatgcttacaagcaagtacagcaatcaaccctcaactatcacacatcaactgcaactccaaagccacccctcacccactaggataccaacaaacctacccacccttaacagtacatagtacataaagccatttaccgtacatagcacattacagtcaaatcccttctcgtccccatggatgacccccctcagataggggtcccttgaccaccatcctccgtgaaatcaatatcccgcacaagagtgctactctcctcgctccgggcccataacacttgggggtagctaaagtgaactgtatccgacatctggttcctacttcagggccataaagcctaaatagcccacacgttccccttaaataagacatcacgatg

SEQ ID NO: 556 - DNA, 16570 bp, Homo sapiens mitochondrial
  3108: "n" refers to a nucleotide at position 3107 of the Cambridge Reference Sequence (CRS, Anderson et al. 1981 Nature 290:457-465), later determined to be absent from the human mtDNA sequence according to the revised CRS (rCRS, Andrews et al. 1999 Nature Genetics 23:147); "n" therefore represents a single nucleotide deletion at a position corresponding to nucleotide 3107 of SEQ ID NO:1 as provided herein.
gatcacaggtctatcaccctattaaccactcacgggagctctccatgcatttggtattttcgtctggggggtgtgcacgcgatagcattgcgagacgctggagccggagcaccctatgtcgcagtatctgtctttgattcctgcctcatcctgttatttatcgcacctacgttcaatattacaggcgaacatacctactaaagtgtgttaattaattaatgcttacgggacataataataacaattgaatgtctgcacagccgctttccacacagacatcataacaaaaaatttccaccaaaccccccctcccccgccttctggccacagcacttaaacacatctctgccaaaccccaaaaacaaagaaccctaacaccagcctaaccagatttcaaattttatcttttggcggtatgcacttttaacagtcaccccccaactaacacattattttcccctcccactcccatactactaatctcatcaatacaacccccgcccatcctacccagcacacacacaccgctgctaaccccataccccgaaccaaccaaaccccaaagacaccccccacagtttatgtagcttacctcctcaaagcaatacactgaaaatgtttagacgggctcacatcaccccataaacaaataggtttggtcctagcctttctattagctcttagtaagattacacatgcaagcatccccgttccagtgagttcaccctctaaatcaccacgatcaaaagggacaagcatcaagcacgcagcaatgcagctcaaaacgcttagcctagccacacccccacgggaaacagcagtgattaacctttagcaataaacgaaagtttaactaagctatactaaccccagggttggtcaatttcgtgccagccaccgcggtcacacgattaacccaagtcaatagaagccggcgtaaagagtgttttagatcaccccctccccaataaagctaaaactcacctgagttgtaaaaaactccagttgacacaaaatagactacgaaagtggctttaacatatctgaacacacaatagctaagacccaaactgggattagataccccactatgcttagccctaaacctcaacagttaaatcaacaaaactgctcgccagaacactacgagccacagcttaaaactcaaaggacctggcggtgcttcatatccctctagaggagcctgttctgtaatcgataaaccccgatcaacctcaccacctcttgctcagcctatataccgccatcttcagcaaaccctgatgaaggctacaaagtaagcgcaagtacccacgtaaagacgttaggtcaaggtgtagcccatgaggtggcaagaaatgggctacattttctaccccagaaaactacgatagcccttatgaaacttaagggtcgaaggtggatttagcagtaaactgagagtagagtgcttagttgaacagggccctgaagcgcgtacacaccgcccgtcaccctcctcaagtatacttcaaaggacatttaactaaaacccctacgcatttatatagaggagacaagtcgtaacatggtaagtgtactggaaagtgcacttggacgaaccagagtgtagcttaacacaaagcacccaacttacacttaggagatttcaacttaacttgaccgctctgagctaaacctagccccaaacccactccaccttactaccagacaaccttaaccaaaccatttacccaaataaagtataggcgatagaaattgaaacctggcgcaatagatatagtaccgcaagggaaagatgaaaaattataaccaagcataatatagcaaggactaacccctataccttctgcataatgaattaactagaaataactttgcaaggagagccaaagctaagacccccgaaaccagacgagctacctaagaacagctaaaagagcacacccgtctatgtagcaaaatagtgggaagatttataggtagaggcgacaaacctaccgagcctggtgatagctggttgtccaagatagaatcttagttcaactttaaatttgcccacagaaccctctaaatccccttgtaaatttaactgttagtccaaagaggaacagctctttggacactaggaaaaaaccttgtagagagagtaaaaaatttaacacccatagtaggcctaaaagcagccaccaattaagaaagcgttcaagctcaacacccactacctaaaaaatcccaaacatataactgaactcctcacacccaattggaccaatctatcaccctatagaagaactaatgttagtataagtaacatgaaaacattctcctccgcataagcctgcgtcagattaaaacactgaactgacaattaacagcccaatatctacaatcaaccaacaagtcattattaccctcactgtcaacccaacacaggcatgctcataaggaaaggttaaaaaaagtaaaaggaactcggcaaatcttaccccgcctgtttaccaaaaacatcacctctagcatcaccagtattagaggcaccgcctgcccagtgacacatgtttaacggccgcggtaccctaaccgtgcaaaggtagcataatcacttgttccttaaatagggacctgtatgaatggctccacgagggttcagctgtctcttacttttaaccagtgaaattgacctgcccgtgaagaggcgggcatgacacagcaagacgagaagaccctatggagctttaatttattaatgcaaacagtacctaacaaacccacaggtcctaaactaccaaacctgcattaaaaatttcggttggggcgacctcggagcagaacccaacctccgagcagtacatgctaagacttcaccagtcaaagcgaactactatactcaattgatccaataacttgaccaacggaacaagttaccctagggataacagcgcaatcctattctagagtccatatcaacaatagggtttacgacctcgatgttggatcaggacatcccgatggtgcagccgctattaaaggttcgtttgttcaacgattaaagtcctacgtgatctgagttcagaccggagtaatccaggtcggtttctatctacnttcaaattcctccctgtacgaaaggacaagagaaataaggcctacttcacaaagcgccttcccccgtaaatgatatcatctcaacttagtattatacccacacccacccaagaacagggtttgttaagatggcagagcccggtaatcgcataaaacttaaaactttacagtcagaggttcaattcctcttcttaacaacatacccatggccaacctcctactcctcattgtacccattctaatcgcaatggcattcctaatgcttaccgaacgaaaaattctaggctatatacaactacgcaaaggccccaacgttgtaggcccctacgggctactacaacccttcgctgacgccataaaactcttcaccaaagagcccctaaaacccgccacatctaccatcaccctctacatcaccgccccgaccttagctctcaccatcgctcttctactatgaacccccctccccatacccaaccccctggtcaacctcaacctaggcctcctatttattctagccacctctagcctagccgtttactcaatcctctgatcagggtgagcatcaaactcaaactacgccctgatcggcgcactgcgagcagtagcccaaacaatctcatatgaagtcaccctagccatcattctactatcaacattactaataagtggctcctttaacctctccacccttatcacaacacaagaacacctctgattactcctgccatcatgacccttggccataatatgatttatctccacactagcagagaccaaccgaacccccttcgaccttgccgaaggggagtccgaactagtctcaggcttcaacatcgaatacgccgcaggccccttcgccctattcttcatagccgaatacacaaacattattataataaacaccctcaccactacaatcttcctaggaacaacatatgacgcactctcccctgaactctacacaacatattttgtcaccaagaccctacttctaacctccctgttcttatgaattcgaacagcatacccccgattccgctacgaccaactcatacacctcctatgaaaaaacttcctaccactcaccctagcattacttatatgatatgtctccatacccattacaatctccagcattccccctcaaacctaagaaatatgtctgataaaagagttactttgatagagtaaataataggagcttaaacccccttatttctaggactatgagaatcgaacccatccctgagaatccaaaattctccgtgccacctatcacaccccatcctaaagtaaggtcagctaaataagctatcgggcccataccccgaaaatgttggttatacccttcccgtactaattaatcccctggcccaacccgtcatctactctaccatctttgcaggcacactcatcacagcgctaagctcgcactgattttttacctgagtaggcctagaaataaacatgctagcttttattccagttctaaccaaaaaaataaaccctcgttccacagaagctgccatcaagtatttcctcacgcaagcaaccgcatccataatccttctaatagctatcctcttcaacaatatactctccggacaatgaaccataaccaatactaccaatcaatactcatcattaataatcataatggctatagcaataaaactaggaatagccccctttcacttctgagtcccagaggttacccaaggcacccctctgacatccggcctgcttcttctcacatgacaaaaactagcccccatctcaatcatataccaaatctctccctcactaaacgtaagccttctcctcactctctcaatcttatccatcatagcaggcagttgaggtggattaaaccaaacccagctacgcaaaatcttagcatactcctcaattacccacataggatgaataatagcagttctaccgtacaaccctaacataaccattcttaatttaactatttatattatcctaactactaccgcattcctactactcaacttaaactccagcaccacgaccctactactatctcgcacctgaaacaagctaacatgactaacacccttaattccatccaccctcctctccctaggaggcctgcccccgctaaccggctttttgcccaaatgggccattatcgaagaattcacaaaaaacaatagcctcatcatccccaccatcatagccaccatcaccctccttaacctctacttctacctacgcctaatctactccacctcaatcacactactccccatatctaacaacgtaaaaataaaatgacagtttgaacatacaaaacccaccccattcctccccacactcatcgcccttaccacgctactcctacctatctccccttttatactaataatcttatagaaatttaggttaaatacagaccaagagccttcaaagccctcagtaagttgcaatacttaatttctgtaacagctaaggactgcaaaaccccactctgcatcaactgaacgcaaatcagccactttaattaagctaagcccttactagaccaatgggacttaaacccacaaacacttagttaacagctaagcaccctaatcaactggcttcaatctacttctcccgccgccgggaaaaaaggcgggagaagccccggcaggtttgaagctgcttcttcgaatttgcaattcaatatgaaaatcacctcggagctggtaaaaagaggcctaacccctgtctttagatttacagtccaatgcttcactcagccattttacctcacccccactgatgttcgccgaccgttgactattctctacaaaccacaaagacattggaacactatacctattattcggcgcatgagctggagtcctaggcacagctctaagcctccttattcgagccgagctgggccagccaggcaaccttctaggtaacgaccacatctacaacgttatcgtcacagcccatgcatttgtaataatcttcttcatagtaatacccatcataatcggaggctttggcaactgactagttcccctaataatcggtgcccccgatatggcgtttccccgcataaacaacataagcttctgactcttacccccctctctcctactcctgctcgcatctgctatagtggaggccggagcaggaacaggttgaacagtctaccctcccttagcagggaactactcccaccctggagcctccgtagacctaaccatcttctccttacacctagcaggtgtctcttctatcttaggggccatcaatttcatcacaacaattatcaatataaaaccccctgccataacccaataccaaacgcccctcttcgtctgatccgtcctaatcacagcagtcctacttctcctatctctcccagtcctagctgctggcatcactatactactaacagaccgcaacctcaacaccaccttcttcgaccccgccggaggaggagaccccattctataccaacacctattctgatttttcggtcaccctgaagtttatattcttatcctaccaggcttcggaataatctcccatattgtaacttactactccggaaaaaaagaaccatttggatacataggtatggtctgagctatgatatcaattggcttcctagggtttatcgtgtgagcacaccatatatttacagtaggaatagacgtagacacacgagcatatttcacctccgctaccataatcatcgctatccccaccggcgtcaaagtatttagctgactcgccacactccacggaagcaatatgaaatgatctgctgcagtgctctgagccctaggattcatctttcttttcaccgtaggtggcctgactggcattgtattagcaaactcatcactagacatcgtactacacgacacgtactacgttgtagctcacttccactatgtcctatcaataggagctgtatttgccatcataggaggcttcattcactgatttcccctattctcaggctacaccctagaccaaacctacgccaaaatccatttcactatcatattcatcggcgtaaatctaactttcttcccacaacactttctcggcctatccggaatgccccgacgttactcggactaccccgatgcatacaccacatgaaacatcctatcatctgtaggctcattcatttctctaacagcagtaatattaataattttcatgatttgagaagccttcgcttcgaagcgaaaagtcctaatagtagaagaaccctccataaacctggagtgactatatggatgccccccaccctaccacacattcgaagaacccgtatacataaaatctagacaaaaaaggaaggaatcgaaccccccaaagctggtttcaagccaaccccatggcctccatgactttttcaaaaaggtattagaaaaaccatttcataactttgtcaaagttaaattataggctaaatcctatatatcttaatggcacatgcagcgcaagtaggtctacaagacgctacttcccctatcatagaagagcttatcacctttcatgatcacgccctcataatcattttccttatctgcttcctagtcctgtatgcccttttcctaacactcacaacaaaactaactaatactaacatctcagacgctcaggaaatagaaaccgtctgaactatcctgcccgccatcatcctagtcctcatcgccctcccatccctacgcatcctttacataacagacgaggtcaacgatccctcccttaccatcaaatcaattggccaccaatggtactgaacctacgagtacaccgactacggcggactaatcttcaactcctacatacttcccccattattcctagaaccaggcgacctgcgactccttgacgttgacaatcgagtagtactcccgattgaagcccccattcgtataataattacatcacaagacgtcttgcactcatgagctgtccccacattaggcttaaaaacagatgcaattcccggacgtctaaaccaaaccactttcaccgctacacgaccgggggtatactacggtcaatgctctgaaatctgtggagcaaaccacagtttcatgcccatcgtcctagaattaattcccctaaaaatctttgaaatagggcccgtatttaccctatagcaccccctctaccccctctagagcccactgtaaagctaacttagcattaaccttttaagttaaagattaagagaaccaacacctctttacagtgaaatgccccaactaaatactaccgtatggcccaccataattacccccatactccttacactattcctcatcacccaactaaaaatattaaacacaaactaccacctacctccctcaccaaagcccataaaaataaaaaattataacaaaccctgagaaccaaaatgaacgaaaatctgttcgcttcattcattgcccccacaatcctaggcctacccgccgcagtactgatcattctatttccccctctattgatccccacctccaaatatctcatcaacaaccgactaatcaccacccaacaatgactaatcaaactaacctcaaaacaaatgataaccacacacaacactaaaggacgaacctgatctcttatactagtatccttaatcatttttattgccacaactaacctcctcggactcctgcctcactcatttacaccaaccacccaactatctataaacctagccatggccatccccttatgagcgggcgcagtgattataggctttcgctctaagattaaaaatgccctagcccacttcttaccacaaggcacacctacaccccttatccccatactagttattatcgaaaccatcagcctactcattcaaccaatagccctggccgtacgcctaaccgctaacattactgcaggccacctactcatgcacctaattggaagcgccaccctagcaatatcaaccattaaccttccctctacacttatcatcttcacaattctaattctactgactatcctagaaatcgctgtcgccttaatccaagcctacgttttcacacttctagtaagcctctacctgcacgacaacacataatgacccaccaatcacatgcctatcatatagtaaaacccagcccatgacccctaacaggggccctctcagccctcctaatgacctccggcctagccatgtgatttcacttccactccataacgctcctcatactaggcctactaaccaacacactaaccatataccaatgatggcgcgatgtaacacgagaaagcacataccaaggccaccacacaccacctgtccaaaaaggccttcgatacgggataatcctatttattacctcagaagtttttttcttcgcaggatttttctgagccttttaccactccagcctagcccctaccccccaattaggagggcactggcccccaacaggcatcaccccgctaaatcccctagaagtcccactcctaaacacatccgtattactcgcatcaggagtatcaatcacctgagctcaccatagtctaatagaaaacaaccgaaaccaaataattcaagcactgcttattacaattttactgggtctctattttaccctcctacaagcctcagagtacttcgagtctcccttcaccatttccgacggcatctacggctcaacattttttgtagccacaggcttccacggacttcacgtcattattggctcaactttcctcactatctgcttcatccgccaactaatatttcactttacatccaaacatcactttggcttcgaagccgccgcctgatactggcattttgtagatgtggtttgactatttctgtatgtctccatctattgatgagggtcttactcttttagtataaatagtaccgttaacttccaattaactagttttgacaacattcaaaaaagagtaataaacttcgccttaattttaataatcaacaccctcctagccttactactaataattattacattttgactaccacaactcaacggctacatagaaaaatccaccccttacgagtgcggcttcgaccctatatcccccgcccgcgtccctttctccataaaattcttcttagtagctattaccttcttattatttgatctagaaattgccctccttttacccctaccatgagccctacaaacaactaacctgccactaatagttatgtcatccctcttattaatcatcatcctagccctaagtctggcctatgagtgactacaaaaaggattagactgaaccgaattggtatatagtttaaacaaaacgaatgatttcgactcattaaattatgataatcatatttaccaaatgcccctcatttacataaatattatactagcatttaccatctcacttctaggaatactagtatatcgctcacacctcatatcctccctactatgcctagaaggaataatactatcgctgttcattatagctactctcataaccctcaacacccactccctcttagccaatattgtgcctattgccatactagtctttgccgcctgcgaagcagcggtgggcctagccctactagtctcaatctccaacacatatggcctagactacgtacataacctaaacctactccaatgctaaaactaatcgtcccaacaattatattactaccactgacatgactttccaaaaaacacataatttgaatcaacacaaccacccacagcctaattattagcatcatccctctactattttttaaccaaatcaacaacaacctatttagctgttccccaaccttttcctccgaccccctaacaacccccctcctaatactaactacctgactcctacccctcacaatcatggcaagccaacgccacttatccagtgaaccactatcacgaaaaaaactctacctctctatactaatctccctacaaatctccttaattataacattcacagccacagaactaatcatattttatatcttcttcgaaaccacacttatccccaccttggctatcatcacccgatgaggcaaccagccagaacgcctgaacgcaggcacatacttcctattctacaccctagtaggctcccttcccctactcatcgcactaatttacactcacaacaccctaggctcactaaacattctactactcactctcactgcccaagaactatcaaactcctgagccaacaacttaatatgactagcttacacaatagcttttatagtaaagatacctctttacggactccacttatgactccctaaagcccatgtcgaagcccccatcgctgggtcaatagtacttgccgcagtactcttaaaactaggcggctatggtataatacgcctcacactcattctcaaccccctgacaaaacacatagcctaccccttccttgtactatccctatgaggcataattataacaagctccatctgcctacgacaaacagacctaaaatcgctcattgcatactcttcaatcagccacatagccctcgtagtaacagccattctcatccaaaccccctgaagcttcaccggcgcagtcattctcataatcgcccacggacttacatcctcattactattctgcctagcaaactcaaactacgaacgcactcacagtcgcatcataatcctctctcaaggacttcaaactctactcccactaatagctttttgatgacttctagcaagcctcgctaacctcgccttaccccccactattaacctactgggagaactctctgtgctagtaaccacgttctcctgatcaaatatcactctcctacttacaggactcaacatactagtcacagccctatactccctctacatatttaccacaacacaatggggctcactcacccaccacattaacaacataaaaccctcattcacacgagaaaacaccctcatgttcatacacctatcccccattctcctcctatccctcaaccccgacatcattaccgggttttcctcttgtaaatatagtttaaccaaaacatcagattgtgaatctgacaacagaggcttacgaccccttatttaccgagaaagctcacaagaactgctaactcatgcccccatgtctaacaacatggctttctcaacttttaaaggataacagctatccattggtcttaggccccaaaaattttggtgcaactccaaataaaagtaataaccatgcacactactataaccaccctaaccctgacttccctaattccccccatccttaccaccctcgttaaccctaacaaaaaaaactcatacccccattatgtaaaatccattgtcgcatccacctttattatcagtctcttccccacaacaatattcatgtgcctagaccaagaagttattatctcgaactgacactgagccacaacccaaacaacccagctctccctaagcttcaaactagactacttctccataatattcatccctgtagcattgttcgttacatggtccatcatagaattctcactgtgatatataaactcagacccaaacattaatcagttcttcaaatatctactcattttcctaattaccatactaatcttagttaccgctaacaacctattccaactgttcatcggctgagagggcgtaggaattatatccttcttgctcatcagttgatgatacgcccgagcagatgccaacacagcagccattcaagcaatcctatacaaccgtatcggcgatatcggtttcatcctcgccttagcatgatttatcctacactccaactcatgagacccacaacaaatagcccttctaaacgctaatccaagcctcaccccactactaggcctcctcctagcagcagcaggcaaatcagcccaattaggtctccacccctgactcccctcagccatagaaggccccaccccagtctcagccctactccactcaagcactatagttgtagcaggaatcttcttactcatccgcttccaccccctagcagaaaatagcccactaatccaaactctaacactatgcttaggcgctatcaccactctgttcgcagcagtctgcgcccttacacaaaatgacatcaaaaaaatcgtagccttctccacttcaagtcaactaggactcataatagttacaatcggcatcaaccaaccacacctagcattcctgcacatctgtacccacgccttcttcaaagccatactatttatgtgctccgggtccatcatccacaaccttaacaatgaacaagatattcgaaaaataggaggactactcaaaaccatacctctcacttcaacctccctcaccattggcagcctagcattagcaggaatacctttcctcacaggtttctactccaaagaccacatcatcgaaaccgcaaacatatcatacacaaacgcctgagccctatctattactctcatcgctacctccctgacaagcgcctatagcactcgaataattcttctcaccctaacaggtcaacctcgcttccccacccttactaacattaacgaaaataaccccaccctactaaaccccattaaacgcctggcagccggaagcctattcgcaggatttctcattactaacaacatttcccccgcatcccccttccaaacaacaatccccctctacctaaaactcacagccctcgctgtcactttcctaggacttctaacagccctagacctcaactacctaaccaacaaacttaaaataaaatccccactatgcacattttatttctccaacatactcggattctaccctagcatcacacaccgcacaatcccctatctaggccttcttgcgagccaaaacctgcccctactcctcctagacctaacctgactagaaaagctattacctaaaacaatttcacagcaccaaatctccacctccatcatcacctcaacccaaaaaggcataattaaactttacttcctctctttcttcttcccactcatcctaaccctactcctaatcacataacctattcccccgagcaatctcaattacaatatatacaccaacaaacaatgttcaaccagtaactactactaatcaacgcccataatcatacaaagcccccgcaccaataggatcctcccgaatcaaccctgacccctctccttcataaattattcagcttcctacactattaaagtttaccacaaccaccaccccatcatactctttcacccacagcaccaatcctacctccatcgctaaccccactaaaacactcaccaagacctcaacccctgacccccatgcctcaggatactcctcaatagccatcgctgtagtatacccaaagacaaccatcattccccctaaataaattaaaaaaactattaaacccatataacctcccccaaaattcagaataataacacacccgaccacaccgctaacaatcaatactaaacccccataaataggagaaggcttagaagaaaaccccacaaaccccattactaaacccacactcaacagaaacaaagcatacatcattattctcgcacggactacaaccacgaccaatgatatgaaaaaccatcgttgtatttcaactacaagaacaccaatgaccccaatacgcaaaattaaccccctaataaaattaattaaccactcattcatcgacctccccaccccatccaacatctccgcatgatgaaacttcggctcactccttggcgcctgcctgatcctccaaatcaccacaggactattcctagccatgcactactcaccagacgcctcaaccgccttttcatcaatcgcccacatcactcgagacgtaaattatggctgaatcatccgctaccttcacgccaatggcgcctcaatattctttatctgcctcttcctacacatcgggcgaggcctatattacggatcatttctctactcagaaacctgaaacatcggcattatcctcctgcttgcaactatagcaacagccttcataggctatgtcctcccgtgaggccaaatatcattctgaggggccacagtaattacaaacttactatccgccatcccatacattgggacagacctagttcaatgaatctgaggaggctactcagtagacagtcccaccctcacacgattctttacctttcacttcatcttgcccttcattatcgcagccctagcagcactccacctcctattcttgcacgaaacgggatcaaacaaccccctaggaatcacctcccattccgataaaatcaccttccacccttactacacaatcaaagacgccctcggcttacttctcttccttctctccttaatgacattaacactattctcaccagacctcctaggcgacccagacaattataccctagccaaccccttaaacacccctccccacatcaagcccgaatgatatttcctattcgcctacacaattctccgatccgtccctaacaaactaggaggcgtccttgccctattactatccatcctcatcctagcaataatccccatcctccatatatccaaacaacaaagcataatatttcgcccactaagccaatcactttattgactcctagccgcagacctcctcattctaacctgaatcggaggacaaccagtaagctacccttttaccatcattggacaagtagcatccgtactatacttcacaacaatcctaatcctaataccaactatctccctaattgaaaacaaaatactcaaatgggcctgtccttgtagtataaactaatacaccagtcttgtaaaccggagatgaaaacctttttccaaggacaaatcagagaaaaagtctttaactccaccattagcacccaaagctaagattctaatttaaactattctctgttctttcatggggaagcagatttgggtaccacccaagtattgactcacccatcaacaaccgctatgtatttcgtacattactgccagccaccatgaatattgtacggtaccataaatacttgaccacctgtagtacataaaaacccaatccacatcaaacccccccccccatgcttacaagcaagtacagcaatcaaccttcaactatcacacatcaactgcaactccaaaaccacccctcacccactaggatatcaacaaacctacccacccttaacagtacatagtacataaagccatttaccgtacatagcacattacagtcaaatcccttctcgtccccatggatgacccccctcagataggggtcccttgaccaccatcctccgtgaaatcaatatcccgcacaagagtgctactctcctcgctccgggcccataacacttgggggtagctaaagtgaactgtatccgacatctggttcctacttcagggccataaagcctaaatagcccacacgttccccttaaataagacatcacgatg

SEQ ID NO: 557 - DNA, 16571 bp, Homo sapiens mitochondrial
  3109: "n" refers to a nucleotide at position 3107 of the Cambridge Reference Sequence (CRS, Anderson et al. 1981 Nature 290:457-465), later determined to be absent from the human mtDNA sequence according to the revised CRS (rCRS, Andrews et al. 1999 Nature Genetics 23:147); "n" therefore represents a single nucleotide deletion at a position corresponding to nucleotide 3107 of SEQ ID NO:1 as provided herein.
gatcacaggtctatcaccctattaaccactcacgggagctctccatgcatttggtattttcgtctggggggtgtgcacgcgatagcattgcgagacgctggagccggagcaccctatgtcgcagtatctgtctttgattcctgcctcattctattatttatcgcacctacgttcaatattacaggcgaacatacttactaaagtgtgttaattaattaatgcttgtaggacataataataacaattgaatgtctgcacagccgctttccacacagacatcataacaaaaaatttccaccaaaccccccctcccccccgcttctggccacagcacttaaacacatctctgccaaaccccaaaaacaaagaaccctaacaccagcctaaccagatttcaaattttatcttttggcggtatgcacttttaacagtcaccccccaactaacacattattttcccctcccactcccatactactaatctcatcaatacaacccccacccatcctacccagcacacacacaccgctgctaaccccataccccgaaccaaccaaaccccaaagacaccccccacagtttatgtagcttacctcctcaaagcaatacactgaaaatgtttagacgggctcacatcaccccataaacaaataggtttggtcctagcctttctattagctcttagtaagattacacatgcaagcatccccattccagtgagttcaccctctaaatcaccacgatcaaaagggacaagcatcaagcacgcagcaatgcagctcaaaacgcttagcctagccacacccccacgggaaacagcagtgattaacctttagcaataaacgaaagtttaactaagctatactaaccccagggttggtcaatttcgtgccagccaccgcggtcacacgattaacccaagtcaatagaagccggcgtaaagagtgttttagatcaccccctccccaataaagctaaaactcacctgagttgtaaaaaactccagttgacacaaaatagactacgaaagtggctttaacatatctgaacacacaatagctaagacccaaactgggattagataccccactatgcttagccctaaacctcaacagttaaatcaacaaaactgctcgccagaacactacgagccacagcttaaaactcaaaggacctggcggtgcttcatatccctctagaggagcctgttctgtaatcgataaaccccgatcaacctcaccacctcttgctcagcctatataccgccatcttcagcaaaccctgatgaaggctacaaagtaagcgcaagtacccacgtaaagacgttaggtcaaggtgtagcccatgaggtggcaagaaatgggctacattttctaccccagaaaactacgatagcccttatgaaacttaagggtcgaaggtggatttagcagtaaactgagagtagagtgcttagttgaacagggccctgaagcgcgtacacaccgcccgtcaccctcctcaagtatacttcaaaggacatttaactaaaacccctacgcatttatatagaggagacaagtcgtaacatggtaagtgtactggaaagtgcacttggacgaaccagagtgtagcttaacacaaagcacccaacttacacttaggagatttcaacttaacttgaccgctctgagctaaacctagccccaaacccactccaccttactaccagacaaccttaaccaaaccatttacccaaataaagtataggcgatagaaattgaaacctggcgcaatagatatagtaccgcaagggaaagatgaaaaattataaccaagcataatatagcaaggactaacccctataccttctgcataatgaattaactagaaataactttgcaaggagaaccaaagctaagacccccgaaaccagacgagctacctaagaacagctaaaagagcacacccgtctatgtagcaaaatagtgggaagatttataggtagaggcgacaaacctaccgagcctggtgatagctggttgtccaagatagaatcttagttcaactttaaatttgcccacagaaccctctaaatccccttgtaaatttaactgttagtccaaagaggaacagctctttggacactaggaaaaaaccttgtagagagagtaaaaaatttaacacccatagtaggcctaaaagcagccaccaattaagaaagcgttcaagctcaacacccactacctaaaaaatcccaaacatataactgaactcctcacacccaattggaccaatctatcaccctatagaagaactaatgttagtataagtaacatgaaaacattctcctccgcataagcctgcgtcagattaaaacactgaactgacaattaacagcccaatatctacaatcaaccaacaagtcattattaccctcactgtcaacccaacacaggcatgctcataaggaaaggttaaaaaaagtaaaaggaactcggcaaatcttaccccgcctgtttaccaaaaacatcacctctagcatcaccagtattagaggcaccgcctgcccagtgacacatgtttaacggccgcggtaccctaaccgtgcaaaggtagcataatcacttgttccttaaatagggacctgtatgaatggctccacgagggttcagctgtctcttacttttaaccagtgaaattgacctgcccgtgaagaggcgggcatgacacagcaagacgagaagaccctatggagctttaatttattaatgcaaacagtacctaacaaacccacaggtcctaaactaccaaacctgcattaaaaatttcggttggggcgacctcggagcagaacccaacctccgagcagtacatgctaagacttcaccagtcaaagcgaactactatactcaattgatccaataacttgaccaacggaacaagttaccctagggataacagcgcaatcctattctagagtccatatcaacaatagggtttacgacctcgatgttggatcaggacatcccgatggtgcagccgctattaaaggttcgtttgttcaacgattaaagtcctacgtgatctgagttcagaccggagtaatccaggtcggtttctatctacnttcaaattcctccctgtacgaaaggacaagagaaataaggcctacttcacaaagcgccttcccccgtaaatgatatcatctcaacttagtattatacccacacccacccaagaacagggtttgttaagatggcagagcccggtaatcgcataaaacttaaaactttacagtcagaggttcaattcctcttcttaacaacatacccatggccaacctcctactcctcattgtacccattctaatcgcaatggcattcctaatgcttaccgaacgaaaaattctaggctatatacaactacgcaaaggccccaacgttgtaggcccctacgggctactacaacccttcgctgacgccataaaactcttcaccaaagagcccctaaaacccgccacatctaccatcaccctctacatcaccgccccgaccttagctctcaccatcgctcttctactatgaacccccctccccatacccaaccccctggtcaacctcaacctaggcctcctatttattctagccacctctagcctagccgtttactcaatcctctgatcagggtgagcatcaaactcaaactacgccctgatcggcgcactgcgagcagtagcccaaacaatctcatatgaagtcaccctagccatcattctactatcaacattactaataagtggctcctttaacctctccacccttatcacaacacaagaacacctctgattactcctgccatcatgacccttggccataatatgatttatctccacactagcagagaccaaccgaacccccttcgaccttgccgaaggggagtccgaactagtctcaggcttcaacatcgaatacgccgcaggccccttcgccctattcttcatagccgaatacacaaacattattataataaacaccctcaccactacaatcttcctaggaacaacatatgacgcactctcccctgaactctacacaacatattttgtcaccaagaccctacttctaacctccctgttcttatgaattcgaacagcatacccccgattccgctacgaccaactcatacacctcctatgaaaaaacttcctaccactcaccctagcattacttatatgacatgtctccatacccattacaatctccagcattccccctcaaacctaagaaatatgtctgataaaagagttactttgatagagtaaataataggagcttaaacccccttatttctaggactatgagaatcgaacccatccctgagaatccaaaattctccgtgccacctatcacaccccatcctaaagtaaggtcagctaaataagctatcgggcccataccccgaaaatgttggttatacccttcccgtactaattaatcccctggcccaacccgtcatctactctaccatctttgcaggcacactcatcacagcgctaagctcgcactgattttttacctgagtaggcctagaaataaacatgctagcttttattccagttctaaccaaaaaaataaaccctcgttccacagaagctgccatcaagtatttcctcacgcaagcaaccgcatccataatccttctaatagctatcctcttcaacaatatactctccggacaatgaaccataaccaatactaccaatcaatactcatcattaataatcataatggctatagcaataaaactaggaatagccccctttcacttctgagtcccagaggttacccaaggcacccctctgacatccggcctgcttcttctcacatgacaaaaactagcccccatctcaatcatataccaaatctctccctcactagacgtaagccttctcctcactctctcaatcttatccatcatagcaggcagttgaggtggattaaaccaaacccagctacgcaaaatcttagcatactcctcaattacccacataggatgaataatagcagttctaccgtacaaccctaacataaccattcttaatttaactatttatattatcctaactactaccgcattcctactactcaacttaaactccagcaccacgaccctactactatctcgcacctgaaacaagctaacatgactaacacccttaattccatccaccctcctctccctaggaggcctgcccccgctaaccggctttttgcccaaatgggccattatcgaagaattcacaaaaaacaatagcctcatcatccccaccatcatagccaccatcaccctccttaacctctacttctacctacgcctaatctactccacctcaatcacactactccccatatctaacaacgtaaaaataaaatgacagtttgaacatacaaaacccaccccattcctccccacactcatcgcccttaccacgctactcctacctatctccccttttatactaataatcttatagaaatttaggttaaatacagaccaagagccttcaaagccctcagtaagttgcaatacttaatttctgtaacagctaaggactgcaaaaccccactctgcatcaactgaacgcaaatcagccactttaattaagctaagcccttactagaccaatgggacttaaacccacaaacacttagttaacagctaagcaccctaatcaactggcttcaatctacttctcccgccgccgggaaaaaaggcgggagaagccccggcaggtttgaagctgcttcttcgaatttgcaattcaatatgaaaatcacctcggagctggtaaaaagaggcctaacccctgtctttagatttacagtccaatgcttcactcagccattttacctcacccccactgatgttcgccgaccgttgactattctctacaaaccacaaagacattggaacactatacctattattcggcgcatgagctggagtcctaggcacagccctaagcctccttattcgagccgagctgggccagccaggcaaccttctaggtaacgaccacatctacaacgttatcgtcacagcccatgcatttgtaataatcttcttcatagtaatacccatcataatcggaggctttggcaactgactagttcccctaataatcggtgcccccgatatggcgtttccccgcataaacaacataagcttctgactcttacctccctctctcctactcctgctcgcatctgctatagtggaggccggagcaggaacaggttgaacagtctaccctcccttagcagggaactactcccaccctggagcctccgtagacctaaccatcttctccttacacctagcaggtgtctcctctatcttaggggccatcaatttcatcacaacaattatcaatataaaaccccctgccataacccaataccaaacgcccctcttcgtctgatccgtcctaatcacagcagtcctacttctcctatctctcccagtcctagctgctggcatcactatactactaacagaccgcaacctcaacaccaccttcttcgaccccgccggaggaggagaccccattctataccaacacctattctgatttttcggtcaccctgaagtttatattcttatcctaccaggcttcggaataatctcccatattgtaacttactactccggaaaaaaagaaccatttggatacataggtatggtctgagctatgatatcaattggcttcctagggtttatcgtgtgagcacaccatatatttacagtaggaatagacgtagacacacgagcatatttcacctccgctaccataatcatcgctatccccaccggcgtcaaagtatttagctgactcgccacactccacggaagcaatatgaaatgatctgctgcagtgctctgagccctaggattcatctttcttttcaccgtaggtggcctgactggcattgtattagcaaactcatcactagacatcgtactacacgacacgtactacgttgtagctcacttccactatgtcctatcaataggagctgtatttgccatcataggaggcttcattcactgatttcccctattctcaggctacaccctagaccaaacctacgccaaaatccatttcactatcatattcatcggcgtaaatctaactttcttcccacaacactttctcggcctatccggaatgccccgacgttactcggactaccccgatgcatacaccacatgaaacatcctatcatctgtaggctcattcatttctctaacagcagtaatattaataattttcatgatttgagaagccttcgcttcgaagcgaaaagtcctaatagtagaagaaccctccataaacctggagtgactatatggatgccccccaccctaccacacattcgaagaacccgtatacataaaatctagacaaaaaaggaaggaatcgaaccccccaaagctggtttcaagccaaccccatggcctccatgactttttcaaaaaggtattagaaaaaccatttcataactttgtcaaagttaaattataggctaaatcctatatatcttaatggcacatgcagcgcaagtaggtctacaagacgctacttcccctatcatagaagagcttatcacctttcatgatcacgccctcataatcattttccttatctgcttcctagtcctgtatgcccttttcctaacactcacaacaaaactaactaatactaacatctcagacgctcaggaaatagaaaccgtctgaactatcctgcccgccatcatcctagtcctcatcgccctcccatccctacgcatcctttacataacagacgaggtcaacgatccctcccttaccatcaaatcaattggccaccaatggtactgaacctacgagtacaccgactacggcggactaatcttcaactcctacatacttcccccattattcctagaaccaggcgacctgcgactccttgacgttgacaatcgagtagtactcccgattgaagcccccattcgtataataattacatcacaagacgtcttgcactcatgagctgtccccacattaggcttaaaaacagatgcaattcccggacgtctaaaccaaaccactttcaccgctacacgaccgggggtatactacggtcaatgctctgaaatctgtggagcaaaccacagtttcatgcccatcgtcctagaattaattcccctaaaaatctttgaaatagggcccgtatttaccctatagcaccccctctaccccctctagagcccactgtaaagctaacttagcattaaccttttaagttaaagattaagagaaccaacacctctttacagtgaaatgccccaactaaatactaccgtatggcccaccataattacccccatactccttacactattcctcatcacccaactaaaaatattaaacacaaactaccacctacctccctcaccaaagcccataaaaataaaaaattataacaaaccctgagaaccaaaatgaacgaaaatctgttcgcttcattcattgcccccacaatcctaggcctacccgccgcagtactgatcattctatttccccctctattgatccccacctccaaatatctcatcaacaaccgactaatcaccacccaacaatgactaatcaaactaacctcaaaacaaataataaccatacacaacactaaaggacgaacctgatctcttatactagtatccttaatcatttttattgccacaactaacctcctcggactcctgcctcactcatttacaccaaccacccaactatctataaacctagccatggccatccccttatgagcgggcgcagtgattataggctttcgctctaagattaaaaatgccctagcccacttcttaccacaaggcacacctacaccccttatccccatactagttattatcgaaaccatcagcctactcattcaaccaatagccctggccgtacgcctaaccgctaacattactgcaggccacctactcatgcacctaattggaagcgccaccctagcaatatcaaccattaaccttccctctacacttatcatcttcacaattctaattctactgactatcctagaaatcgctgtcgccttaatccaagcctacgttttcacacttctagtaagcctctacctgcacgacaacacataatgacccaccaatcacatgcctatcatatagtaaaacccagcccatgacccctaacaggggccctctcagccctcctaatgacctccggcctagccatgtgatttcacttccactccataacgctcctcatactaggcctactaaccaacacactaaccatataccaatgatggcgcgatgtaacacgagaaagcacataccaaggccaccacacaccacctgtccaaaaaggccttcgatacgggataatcctatttattacctcagaagtttttttcttcgcaggatttttctgagccttttaccactccagcctagcccctaccccccaattaggagggcactggcccccaacaggcatcaccccgctaaatcccctagaagtcccactcctaaacacatccgtattactcgcatcaggagtatcaatcacctgagctcaccatagtctaatagaaaacaaccgaaaccaaataattcaagcactgcttattacaatttcactgggtctctattttaccctcctacaagcctcagagtacttcgagtctcccttcaccatttccgacggcatctacggctcaacattttttgtagccacaggcttccacggacttcacgtcattattggctcaactttcctcactatctgcttcatccgccaactaatatttcactttacatccaaacatcactttggcttcgaagccgccgcctgatactggcattttgtagatgtggtttgactatttctgtatgtctccatctattgatgagggtcttactcttttagtataaatagtaccgttaacttccaattaactagttttgacaacattcaaaaaagagtaataaacttcgccttaattttaataatcaacaccctcctagccttactactaataattattacattttgactaccacaactcaacggctacatagaaaaatccaccccttacgagtgcggcttcgaccctatatcccccgcccgcgtccctttctccataaaattcttcttagtagctattaccttcttattatttgatctagaaattgccctccttttacccctaccatgagccctacaaacaactaacctgccactaatagttatgtcatccctcttattaatcatcatcctagccctaagtctggcctatgagtgactacaaaaaggattagactgaaccgaattggtatatagtttaaacaaaacgaatgatttcgactcattaaattatgataatcatatctaccaaatgcccctcatttacataaatattatactagcatttaccatctcacttctaggaatactagtatatcgctcacacctcatatcctccctactatgcctagaaggaataatactatcgctgttcattatagctactctcataaccctcaacacccactccctcttagccaatattgtgcctattgccatactagtctttgccgcctgcgaagcagcggtgggcctagccctactagtctcaatctccaacacatatggcctagactacgtacataacctaaacctactccaatgctaaaactaatcgtcccaacaattatattactaccactgacatgactttccaaaaaacacataatttgaatcaacacaaccacccacagcctaattattagcatcatccctctactattttttaaccaaatcaacaacaacctatttagctgttccccaaccttttcctccgaccccctaacaacccccctcctaatactaactacctgactcctacccctcacaatcatggcaagccaacgccacttatccagtgaaccactatcacgaaaaaaactctacctctctatactaatctccctacaaatctccttaattataacattcacagccacagaactaatcatattttatatcttcttcgaaaccacacttatccccaccttggctatcatcacccgatgaggcaaccagccagaacgcctgaacgcaggcacatacttcctattctacaccctagtaggctcccttcccctactcatcgcactgatttacactcacaacaccctaggctcactaaacattctactactcactctcactgcccaagaactatcaaactcctgagccaacaacttaatatgactagcttacacaatagcttttatagtaaagatacctctttacggactccacttatgactccctaaagcccatgtcgaagcccccatcgctgggtcaatagtacttgccgcagtactcttaaaactaggcggctatggtataatacgcctcacactcattctcaaccccctgacaaaacacatagcctaccccttccttgtactatccctatgaggcataattataacaagctccatctgcctacgacaaacagacctaaaatcgctcattgcatactcttcaatcagccacatagccctcgtagtaacagccattctcatccaaaccccctgaagcttcaccggcgcagtcattctcataatcgcccacggacttacatcctcattactattctgcctagcaaactcaaactacgaacgcactcacagtcgcatcataatcctctctcaaggacttcaaactctgctcccactaatagctttttgatgacttctagcaagcctcgctaacctcgccttaccccccactattaacctactgggagaactctctgtgctagtaaccacgttctcctgatcaaatatcactctcctacttacaggactcaacatactagtcacagccctatactccctctacatatttaccacaacacaatggggctcactcacccaccacattaacaacataaaaccctcattcacacgagaaaacaccctcatgttcatacacctatcccccattctcctcctatccctcaaccccgacatcattaccgggttttcctcttgtaaatatagtttaaccaaaacatcagattgtgaatctgacaacagaggcttacgaccccttatttaccgagaaagctcacaagaactgctaactcatgcccccatgtctaacaacatggctttctcaacttttaaaggataacagctatccattggtcttaggccccaaaaattttggtgcaactccaaataaaagtaataaccatgcacactactataaccaccctaaccctgacttccctaattccccccatccttaccaccctcgttaaccctaacaaaaaaaactcatacccccattatgtaaaatccattgtcgcatccacctttattatcagtctcttccccacaacaatattcatgtgcctagaccaagaagttattatctcgaactgacactgagccacaacccaaacaacccagctctccctaagcttcaaactagactacttctccataatattcatccctgtagcattgttcgttacatggtccatcatagaattctcactgtgatatataaactcagacccaaacattaatcagttcttcaaatatctactcatcttcctaattaccatactaatcttagttaccgctaacaacctattccaactgttcatcggctgagagggcgtaggaattatatccttcttgctcatcagttgatgatacgcccgagcagatgccaacacagcagccattcaagcaatcctatacaaccgtatcggcgatatcggtttcatcctcgccttagcatgatttatcctacactccaactcatgagacccacaacaaatagcccttctaaacgctaatccaagcctcaccccactactaggcctcctcctagcagcagcaggcaaatcagcccaattaggtctccacccctgactcccctcagccatagaaggccccaccccagtctcagccctactccactcaagcactatagttgtagcaggaatcttcttactcatccgcttccaccccctagcagaaaatagcccactaatccaaactctaacactatgcttaggcgctatcaccactctgttcgcagcagtctgcgcccttacacaaaatgacatcaaaaaaatcgtagccttctccacttcaagtcaactaggactcataatagttacaatcggcatcaaccaaccacacctagcattcctgcacatctgtacccacgccttcttcaaagccatactatttatgtgctccggatccatcatccacaaccttaacaatgaacaagatattcgaaaaataggaggactactcaaaaccatacctctcacttcaacctccctcaccattggcagcctagcattagcaggaatacctttcctcacaggtttctactccaaagaccacatcatcgaaaccgcaaacatatcatacacaaacgcctgagccctatctattactctcatcgctacctccctgacaagcgcctatagcactcgaataattcttctcaccctaacaggtcaacctcgcttccccacccttactaacattaacgaaaataaccccaccctactaaaccccattaaacgcctggcagccggaagcctattcgcaggatttctcattactaacaacatttcccccgcatcccccttccaaacaacaatccccctctacctaaaactcacagccctcgctgtcactttcctaggacttctaacagccctagacctcaactacctaaccaacaaacttaaaataaaatccccactatgcacattttatttctccaacatactcggattctaccctagcatcacacaccgcacaatcccctatctaggccttcttacgagccaaaacctgcccctactcctcctagacctaacctgactagaaaagctattacctaaaacaatttcacagcaccaaatctccacctccatcatcacctcaacccaaaaaggcataattaaactttacttcctctctttcttcttcccactcatcctaaccctactcctaatcacataacctattcccccgagcaatctcaattacaatatatacaccaacaaacaatgttcaaccagtaactactactaatcaacgcccatagtcatacaaagcccccgcaccaataggatcctcccgaatcaaccctgacccctctccttcataaattattcagcttcctacactattaaagtttaccacaaccaccaccccatcatactctttcacccacagcaccaatcctacctccatcgctaaccccactaaaacactcaccaagacctcaacccctgacccccatgcctcaggatactcctcaatagccatcgctgtagtatatccaaagacaaccatcattccccctaaataaattaaaaaaactattaaacccatataacctcccccaaaattcagaataataacacacccgaccacaccgctaacaatcaatactaaacccccataaataggagaaggcttagaagaaaaccccacaaaccccattactaaacccacactcaacagaaacaaagcatacatcattattctcgcacggactacaaccacgaccaatgatatgaaaaaccatcgttgtatttcaactacaagaacaccaatgaccccaatacgcaaaattaaccccctaataaaattaattaaccactcattcatcgacctccccaccccatccaacatctccgcatgatgaaacttcggctcactccttggcgcctgcctgatcctccaaatcaccacaggactattcctagccatacactactcaccagacgcctcaaccgccttttcatcaatcgcccacatcactcgagacgtaaattatggctgaatcatccgctaccttcacgccaatggcgcctcaatattctttatctgcctcttcctacacatcgggcgaggcctatattacggatcatttctctactcagaaacctgaaacatcggcattatcctcctgcttgcaactatagcaacagccttcataggctatgtcctcccgtgaggccaaatatcattctgaggggccacagtaattacaaacttactatccgccatcccatacattgggacagacctagttcaatgaatctgaggaggctactcagtagacagtcccaccctcacacgattctttacctttcacttcatcttgcccttcattattgcagccctagcagcactccacctcctattcttgcacgaaacgggatcaaacaaccccctaggaatcacctcccattccgataaaatcaccttccacccttactacacaatcaaagacgccctcggcttacttctcttcattctctccttaatgacattaacactattctcaccagacctcctaggcgacccagacaattataccctagccaaccccttaaacacccctccccacatcaagcccgaatgatatttcctattcgcctacacaattctccgatccgtccctaacaagctaggaggcgtccttgccctattactatccatcctcatcctagcaataatccccatcctccatatatccaaacaacaaagcataatatttcgcccactaagccaatcactttattgactcctagccgcagacctcctcattctaacctgaatcggaggacaaccagtaagctacccttttaccatcattggacaagtagcatccgtactatacttcacaacaatcctaatcctaataccaactatctccctaattgaaaacaaaatactcaaatgggcctgtccttgtagtataaactaatacaccagtcttgtaaaccgaagatgaaaacctttttccaaggacaaatcagagaaaaagtctttaactccaccattagcacccaaagctaagattctaatttaaactattctctgttctttcatggggaagcagatttgggtaccacccaagtattgactcacccatcaacaaccgctatgtatttcgtacattactgccagccaccatgaatattgcacggtaccataaatacttgaccacctatagtacataaaaacccaatccacatcaaaaccccctccccatgcttacaagcaagtacagcaatcaaccctcaactatcacacatcaactgcaactccaaagccacccctcacccactaggataccaacaaacctacccatctttaacagtacatagtacataaagccatttaccgtacatagcacattacagtcaaatcccttctcgtccccatggatgacccccctcagataggggtcccttgaccaccatcctccgtgaaatcaatatcccgcacaagagtgctactctcctcgctccgggcccataacacttgggggtagctaaagtgaactgtatccgacatctggttcctacttcagggccataaagcctaaatagcccacacgttccccttaaataagacatcacgatg
